United States Patent Application Publication US 2024/0327476 A1 - sequence listing, part 103

SEQ ID NO: 197687 - DNA, 4395 bp, synthetic construct
  misc_feature 1..4395: note = Description of Artificial Sequence: Synthetic coding sequence
  source 1..4395: mol_type = other DNA
atgagcggcatgggcgagaacaccagcgaccccagccgggccgagacacgaaagcgtaaggaatgcccagatcagctgggcccttccccgaaaaggaacactgagaagcgaaaccgcgagcaggagaacaagtacattgaggagctggccgagttgattttcgccaactttaatgacatagacaatttcaacttcaagccagacaagtgcgctatccttaaggagaccgtgaagcagatcaggcagatcaaggaacaggagaaggccgcagccgcaaatattgacgaggtgcaaaaatcagacgtaagcagcaccggccagggagtaatcgacaaagacgctctggggccaatgatgttagaggccctggatggtttcttcttcgtagttaatctcgaaggtaacgtcgtgtttgtgagtgaaaatgtaacccagtatctgaggtacaatcaggaagaactgatgaataaaagcgtatattccatactccacgtcggcgaccacacggagttcgttaagaatcttctacccaaaagcatcgtgaacggaggaagttggagcggggaacctcctagacggaacagccacacttttaattgtcgtatgctggtgaagccattaccagacagcgaagaggaaggccatgacaatcaggaagcccaccaaaagtatgagaccatgcaatgtttcgcagtgtctcagcccaagtctataaaagaagagggagaggacctgcagtcttgcctgatatgcgttgcacggcgggtgccgatgaaggaaaggcccgttcttcctagttccgagtctttcactacaaggcaagacctccagggtaaaatcacctcacttgatacttccacaatgagggcagcgatgaagccaggatgggaggaccttgtgcggcgctgtatacagaagttccacgcccagcatgagggagaatcagttagctacgcaaagcggcaccatcacgaagttcttcgccagggtctggcattctcccagatttacaggttctccctgtctgatggcactctggtggccgcccaaacaaaaagtaaactgatccggtcccagacaactaatgagcctcaattggttatttctttgcacatgttgcatagagaacagaatgtttgcgtcatgaatcccgatcttacaggacagaccatgggaaaaccgctaaatccaatcagttcaaattccccagcccaccaagcgctgtgttctggcaatccaggacaggacatgacccttagctccaatatcaacttccctatcaatggaccaaaggaacaaatgggaatgccgatgggaagattcggcggctccggcggcatgaaccatgtatctggaatgcaggccactactccccagggctctaattatgcactcaagatgaacagcccgagccaatcttcccccggaatgaatccaggacagccaacatcaatgctatcgcccaggcatagaatgtctccaggcgtagccggcagtccaaggattccaccctcgcagtttagcccggcagggtcactgcactctccggtaggagtgtgctcatctaccggcaatagccacagttatacaaactccagtttgaacgccctgcaggcactttcagagggccacggagtgagcctgggaagctcattggcttctcccgacttaaaaatgggcaatctccaaaattcccccgtaaacatgaaccctccaccgctatcgaaaatgggcagtttggatagtaaggattgcttcggactgtatggagaaccatcagagggaacaacaggtcaggccgagtctagctgccatcccggtgagcaaaaagagacaaatgatcccaatttacctccagctgtgagtagcgagagggccgacggtcagtctagactgcacgactccaaggggcagactaagctcctgcagctgctgacgacaaagtcagatcagatggagcccagtcctttggcaagtagtctgagcgacacaaacaaggacagcaccggtagtctgcccggatctggctccacccacggtacaagcctgaaggagaagcacaagattctgcaccgcctacttcaggacagttcttctccagtggatctcgcaaaactgaccgccgaagctactgggaaggacctgtctcaggagagttcatccaccgcccctggctcagaagtcacaattaagcaagaacccgtgagtccaaaaaagaaggagaacgcactgctccgatatctattggataaagatgacacaaaggacattggccttcctgagatcactccgaagcttgagcgcctggactcgaagacagatcctgctagcaacaccaaactaatcgctatgaagacggaaaaagaagagatgtcgttcgaacctggggatcagcctggatccgaattggataatctcgaggaaattttagacgacctccaaaactcccagctcccccaactctttccagacactaggccaggggcaccagccggaagtgtggataagcaagccatcattaatgaccttatgcagttaaccgctgaaaacagtcccgtgacacccgtgggggctcagaagactgcactacggatctcacagagcactttcaacaatccgcggcccggtcaacttggtagactcctgccgaatcagaaccttccactcgacattactctacaaagccctactggcgcaggaccttttccccctatccgcaatagctctccgtattccgtaattcctcagcctggcatgatgggcaaccagggcatgatcggaaatcagggaaatcttgggaacagcagcactgggatgatcggtaactcagcaagtaggcctacaatgcctagcggtgaatgggccccccaaagctccgccgtgagggtgacatgcgcggctactacatccgctatgaatagacccgtacagggcgggatgattcgtaatcccgccgctagtatccctatgaggcctagctcacagcccggacaacgacagactctgcagagtcaggttatgaacattggcccatcagagctcgagatgaacatgggcggaccgcagtacagccaacagcaggcgcccccaaatcagaccgcgccctggcctgagtctattctgcccattgaccaagcatcatttgcgtctcaaaacagacagccctttggttcctcgccagacgaccttctgtgccctcatcccgccgctgagagtccatctgacgagggggcgctgctggaccagctgtatttggcactgaggaacttcgatggactcgaggaaatagaccgcgccctcggcattcctgaactggtttcgcagagccaggctgtcgatcccgagcaattttctagccaagattccaacattatgctggagcagaaggccccagtcttcccgcagcagtacgccagccaagcccagatggcacagggctcatactctcccatgcaggatccgaattttcatacaatgggccaaaggccgagctacgcaacattacgtatgcagccacgcccggggctgaggcctaccggcctcgttcaaaatcagcccaatcagttgcgcctccagctgcagcacagacttcaggctcagcagaatcggcagccactcatgaaccaaattagcaatgtttccaacgttaatctcaccctcagacctggagttcctacgcaagcgccaataaatgctcagatgctagctcaaaggcaaagagaaatcctcaaccagcacctgaggcagcggcagatgcatcagcagcagcaagtgcagcagcgaactttgatgatgcggggtcagggcctcaatatgactcctagcatggtagccccttccggtatgccagctacaatgagtaatcccagaatcccgcaagcaaatgctcagcaattcccttttcctcctaactatggaattagccagcagcctgaccctgggtttacgggggcaaccaccccacagtcaccactgatgagccctaggatggcccacactcaatcccctatgatgcagcaatcacaggccaaccccgcctatcaggcgccctcggatataaatggatgggctcagggtaatatgggcggtaattctatgttctctcagcagagtcctccccactttggacagcaggccaacactagtatgtactccaataacatgaacattaatgtgagcatggctacaaacacaggcgggatgtcttccatgaaccagatgaccggccagatctctatgacaagcgtcacgtccgtgcccacttccggactgtcaagtatggggcctgaacaggtcaatgacccagcactgcggggcggcaacttgttcccaaaccagttgcccggtatggatatgataaaacaggagggagacacaaccaggaagtattgttag

SEQ ID NO: 197688 - DNA, 51 bp, synthetic construct
  misc_feature 1..51: note = Description of Artificial Sequence: Synthetic coding sequence
  source 1..51: mol_type = other DNA
atgagcggcatgggcgagaacaccagcgaccccagccgggccgagacctag

SEQ ID NO: 197689 - DNA, 27 bp, synthetic construct
  misc_feature 1..27: note = Description of Artificial Sequence: Synthetic coding sequence
  source 1..27: mol_type = other DNA
atgagcggcatgggcgagaacacctag

SEQ ID NO: 197690 - DNA, 4263 bp, synthetic construct
  misc_feature 1..4263: note = Description of Artificial Sequence: Synthetic coding sequence
  source 1..4263: mol_type = other DNA
atgagcggcctgggcgagaacctggaccccctggccagcgacagcagaaagcggaagttgccttgtgatacccctggacagggcttaacttgctccggcgagaaaaggagacgcgagcaggaaagcaaatatatcgaagaattggctgagctgattagtgccaacctgagcgacatcgataattttaacgtgaaaccggacaagtgcgccatccttaaggagaccgttcgccagatccgacagattaaggagcagggaaagacgatctctaacgacgacgatgttcagaaggcggatgtcagctctaccggccagggggttatcgacaaagactccctgggtcctctattattacaggcgcttgacggattcctattcgtggtgaaccgcgacggaaacatcgtgttcgtcagcgagaacgttacccagtacctacagtacaaacaggaagatttagtcaatacgtctgtctacaacattctgcacgaggaggatcggaaggacttcctgaagaacttgcccaagtcaaccgtgaacggggtttcatggactaacgaaacacaacgccagaagtcacacacattcaattgtagaatgttgatgaagactccccatgacatattggaagatatcaatgcttctccagagatgcggcagcgctatgagacaatgcagtgctttgctctgagtcaaccccgggccatgatggaggagggggaggatctgcagagctgtatgatctgcgtggctcgaaggataactacaggagaaaggactttcccaagtaaccccgaaagctttattactcgacacgacctgtctggaaaggtggttaacattgataccaattccctcagatcttccatgagaccgggatttgaagacatcattcgacggtgcatccagcggtttttttctttgaacgatgggcaatcgtggtcacagaaacgtcactaccaggaggcatacctgaacggacatgcagagacccccgtctacagatttagcttagcagatggcaccatagttacggcccaaaccaagtctaaactctttaggaatcctgtaacgaacgaccggcatgggttcgtctcaacccacttcttgcagagagagcagaatggctatcgcccaaatcctaaccctgtgggacagggcattagacccccaatggctggatgcaatagctctgtaggggggatgagcatgagcccaaatcagggcctgcagatgcctagtagccgcgcttacggtcttgccgacccatctaccacaggccaaatgagcggtgccagatatggcggaagtagcaacattgcctcgctcactccgggaccgggcatgcagtctccttctagctatcagaataacaattatggcttgaatatgtcatcacccccccatggatcaccggggctagctccaaaccagcaaaacattatgatttctcctcggaatcggggctcacccaaaatcgcttcccaccagttctcccctgtagctggggtacacagccccatggcaagctcgggcaacacaggaaaccacagttttagcagctcctctctctcagccttgcaggccatttcggagggcgtgggcactagcctgctaagcaccttgagcagtcccggcccaaagctagataactcgcccaatatgaacatcacacaaccttccaaggtttcaaatcaggatagcaagtcccctctggggttttactgtgatcagaatcccgttgaatcttctatgtgtcagtcgaactctcgcgaccacctaagcgataaagagagcaaggaatcatccgtggaaggcgcagaaaatcaacggggcccacttgagagcaagggccataagaagttactccagctgttgacctgtagctctgacgaccgcggtcactccagtcttacgaactccccactggattcttcctgcaaagaatcgtcagtgtccgtgaccagtccctccggcgtgtcctcatctactagcggaggtgtctcctccacaagcaacatgcacgggagcctgctgcaggagaagcaccgtattctgcacaaattgcttcaaaacggtaactcccccgccgaggttgccaagattacagctgaggccacaggaaaggacacttccagcatcaccagctgcggggacggaaacgtggtgaaacaggaacagcttagccctaagaagaaagaaaacaacgcactgctgcggtacctgctagaccgagacgacccgagcgacgcattaagcaaagagctccaaccccaggtcgagggtgtagacaataagatgagccagtgtacaagttctaccatccccagctcctcccaggaaaaggacccgaagatcaagaccgagacctcagaagagggatccggcgatttagataacctggatgctatcctgggtgatctgacaagcagcgatttttataataacagcatatccagcaacggaagtcatctgggaaccaaacagcaagtgtttcaagggaccaactctctgggactgaagtcttcacagtccgttcagagtattcgtccaccctacaatcgggccgtgagcctggactcccccgtaagtgtcggtagctcgcctcccgtaaagaatatcagcgccttccctatgcttcctaaacagcccatgctcggcggaaatcctcggatgatggactctcaggagaactatggatcttccatgggcggtcccaatcgaaatgtaactgtcactcagaccccttctagcggcgattggggcctcccaaattccaaggccggacgaatggagcccatgaactctaactcaatgggacggcccgggggagactacaacacctcccttcctagacctgcactgggcgggagcattcccaccctaccactgcgatctaattcaatccccggcgcaagacccgtgctccaacagcagcagcagatgctgcagatgcggcctggagagattcctatggggatgggggctaacccatatggccaggctgctgcatcaaaccagctgggaagttggccagacggaatgttaagcatggaacaggtctcccacggaacccagaaccgccctctcttgcggaacagcttggatgacctggtagggcccccctccaatctggagggacagagtgacgagcgcgcactgcttgaccaactgcacacccttctctctaatacagatgccactggtctggaggaaatcgacagagctctgggcatccctgagttggtgaaccaggggcaagcgctggaacctaaacaggacgcgtttcagggtcaggaggccgccgttatgatggaccagaaagctggactgtacggtcaaacctacccagcacagggcccccctatgcagggcgggttccatctgcagggtcagtcccccagctttaattctatgatgaatcagatgaaccagcaggggaattttccccttcagggcatgcacccgagagccaacatcatgagacctcggaccaatacacccaaacagcttcggatgcagctgcagcagaggttgcaggggcaacagttccttaatcagagccgccaagccctagagctgaagatggagaaccctacagcaggcggtgccgcggtcatgcgccctatgatgcagccacagcaggggttcctaaatgcccagatggtagcccagcgcagtcgcgagctactgtcccatcacttcaggcagcagagagtcgccatgatgatgcagcaacagcagcagcagcagcagcagcaacagcagcagcagcaacagcagcagcaacagcagcagcagcaacaacagcagcagcagacacaggctttttctcctccaccgaacgtcaccgcctctccttccatggatggtttgctggcggggccgaccatgccccaggctccaccacagcagtttccctaccagccaaactacgggatgggccagcagcctgaccccgcgtttggaagagtgagcagccccccaaatgctatgatgtcttccagaatgggccccagtcagaaccccatgatgcagcacccacaggcagcatcaatctaccagagttccgagatgaaaggctggccgagcggtaacctcgctagaaattcttccttcagccaacagcaattcgcccaccaaggcaacccggcggtttacagcatggtacacatgaacggatcgtccggacatatgggtcaaatgaatatgaaccccatgccaatgtccggaatgcctatgggccccgatcagaagtattgttag

SEQ ID NO: 197691 - DNA, 4053 bp, synthetic construct
  misc_feature 1..4053: note = Description of Artificial Sequence: Synthetic coding sequence
  source 1..4053: mol_type = other DNA
atgagcggcctgggcgagaacctggaccccctggccagcgacagcagaaaaaggaaacttccttgtgataccccaggccaagggctcacctgctccggagaaaaaaggcgccgggagcaggaaagcaaatatatcgaagaactcgccgagctcatctccgctaacctgagcgatatcgataattttaacgtgaagcctgacaaatgcgccatactcaaagaaaccgtccggcaaataaggcagattaaggaacaggggaagacaattagtaatgacgatgacgttcagaaagccgatgtgtcttcgacaggacagggagtgattgacaaagatagccttgggccactccttttacaggccctggacggtttcctgtttgtggtcaatagagacgggaatatcgtgttcgtctcagagaatgtgacacaatatctgcagtacaaacaggaagacctggtcaatacctccgtctacaacatccttcacgaggaagaccgaaaggacttcctgaaaaacctgcctaaatcaaccgtgaatggggtgtcatggactaatgagacccaacggcaaaagtctcacacttttaattgtcggatgctgatgaagacacctcatgatatcttagaggacattaacgcctccccggagatgagacagcgatatgagactatgcagtgtttcgcccttagtcagccgagggccatgatggaggaaggtgaggatctgcagagttgcatgatctgtgttgccagaagaataacgactggtgagaggacattcccctctaacccagagtcgttcatcacccgtcacgatctttctggtaaggtggtgaacattgacaccaactccctgagaagctccatgcgacctgggttcgaggatatcattagaaggtgcatccagagattcttctcgttaaatgatggccagagctggagtcagaagcggcactaccaggaggtcacatcagacggcattttttccccaactgcatatctgaatggtcacgccgagaccccagtgtatcgtttcagtttggccgacggaaccatcgtaacggcgcagacgaaatccaaactgttcaggaacccagtgactaacgaccggcacggcttcgtttcaacacacttcctgcagcgtgaacaaaacgggtatcggcccaatcccaatccagtaggccaaggcatccgcccacccatggcaggatgcaattcatcagtaggggggatgtccatgtcccccaaccagggtttgcagatgccatcttccagggcatatgggctggcagatccaagcaccactgggcaaatgagtggggcgcgttatggagggtcctccaacatcgcctctctcaccccgggccccggcatgcagtctccgtcttcctaccagaacaataattacggcttgaatatgagctcccctccccacgggagccccggactggcccctaaccagcagaatataatgatctctcctagaaatcggggctcacccaagatcgcatcacaccagtttagcccagtggccggggtacattcccctatggcctcaagcgggaataccgggaatcacagtttctctagttccagcctttccgccttgcaagctatatccgaaggagttgggactagtctgctctcgacactcagctcacctggtccaaagctggataactccccaaacatgaacattactcaacccagtaaagtgtctaaccaggacagcaaaagcccactgggcttctactgtgatcaaaatcccgtggaaagctcaatgtgccaatcaaactccagagatcacctgtctgacaaagaatcaaaggaatcatctgttgaaggcgccgagaaccagcgagggcctctggagagcaaaggccacaagaaattattacagctactgacttgtagttctgatgaccgaggccacagcagtcttacaaactcccccctggatagtagctgcaaagagagttccgttagcgttactagtcccagcggagtgagctcttccacatcaggcggtgtgtcctctactagtaacatgcacggctctcttttgcaagagaaacatagaatcctgcacaaactcctccagaatgggaacagcccagccgaggtagctaaaataacagcagaggcaaccggaaaagatacgagtagtatcacttcttgcggcgatgggaatgttgtcaagcaggagcaactctctccaaagaagaaggagaataacgctctcctgcggtacctactcgatcgggatgatcctagcgatgccctcagtaaggagctgcagcctcaggtggaaggtgtggacaacaaaatgtcacagtgcacgtcctccacaattccaagttcaagccaagaaaaagaccccaagataaaaaccgagacttccgaagaaggctctggggatctggacaatctcgacgctatcctcggagatctcaccagctcagacttctataataactctattagttccaacgggtcccacctagggactaaacagcaggttttccagggcactaattccttgggcgattgggggctccccaacagtaaagccggccgaatggaacccatgaattccaattcaatggggaggcctggcggggattacaacaccagcttgcccaggccagccctgggcgggagcatccccactctgccactccggagtaacagtatccctggagcacggcctgttcttcagcagcagcagcagatgctgcaaatgcggcctggcgagataccaatggggatgggagcgaatccttatggccaggctgccgcctccaaccaactcggctcttggccagacggcatgctcagcatggaacaagtaagccacggtactcaaaatagacccctgctgagaaattctctcgatgacctggtgggacctccctccaaccttgagggtcaaagcgatgaacgggcgctcctggatcagttgcatacacttctgagtaacacagacgcgaccggacttgaggaaatagacagggcactgggaataccagagctcgtcaatcaggggcaggcactggagccaaagcaggacgccttccaggggcaggaggctgcagtgatgatggatcagaaggctggactgtatggacagacttacccagctcagggcccacctatgcaaggcggattccacctccagggacagtccccttcctttaacagtatgatgaatcagatgaatcagcaaggtaacttcccactgcagggcatgcaccctagggccaatatcatgcgtcctcgaacgaatacccctaaacagctgaggatgcagctccaacagcgcctgcagggccagcagttccttaatcagtcccgacaggctctggaattgaaaatggagaatcccacagctggaggtgccgctgtgatgcggccgatgatgcagccacagcagggatttctgaacgctcagatggtggcccagcgaagccgagagcttttaagccaccacttcaggcagcagagggttgccatgatgatgcagcagcagcagcagcagcagcagcagcagcagcaacagcaacaacaacagcagcagcaacagcagcagcagcagcagcagcagcagactcaggccttctccccacctccgaatgtgaccgcctccccaagcatggatggcctactagccggccctaccatgcctcaggcgccccctcagcagtttccataccagccaaattacggtatgggtcagcaacctgatccggcattcgggagggtgagctcgccgcccaacgctatgatgtcctctcgaatgggccccagccagaacccaatgatgcaacatccacaggccgcgagcatctatcaaagttcggagatgaagggctggccttccggtaacctagccagaaacagctcttttagccagcaacaatttgcccaccaaggcaatccagccgtgtacagtatggtacatatgaacgggtcatccggacacatgggccagatgaacatgaaccccatgccaatgtccggaatgcctatgggcccggaccagaagtattgctag

SEQ ID NO: 197692 - DNA, 4248 bp, synthetic construct
  misc_feature 1..4248: note = Description of Artificial Sequence: Synthetic coding sequence
  source 1..4248: mol_type = other DNA
atgagcggcctgggcgagaacctggaccccctggccagcgacagcagaaaacgtaagcttccatgcgacacgcctggtcaggggctgacgtgctcaggagagaaaaggcggagagaacaagagtccaagtacatcgaggagttagccgagctcatttccgcgaacctgtcagatatcgataattttaatgtcaagccagataaatgtgctatactgaaagaaactgtgagacagataaggcagattaaggaacagggcaaaaccatctccaatgacgacgacgtccagaaagccgatgtaagttcaactggtcagggcgttatagataaagatagcttggggcctctattgctgcaagctttggatggctttttattcgtggtcaaccgtgacggtaatatcgtgttcgtttccgagaacgtcacccagtatctgcagtataaacaggaggacctagtgaacacatctgtttataacatcctgcacgaagaggaccgcaaggactttctgaaaaacttgccaaagtctactgtgaatggtgtttcatggactaatgaaacacaacgccagaaaagccatacgttcaactgtcgtatgctgatgaaaactcctcacgacattctggaagatatcaacgcgtcccctgagatgcgccagagatatgaaacaatgcagtgctttgcactttctcaacccagggccatgatggaagagggtgaggatttacaaagctgtatgatttgtgtggcgagacggatcacaacaggggaacggacgtttcccagcaacccagaatctttcatcacgcgccacgacttgtcgggaaaagtggttaacatagataccaacagtctccgcagctcaatgaggccaggattcgaggacatcatcaggcgctgcatacagcgctttttcagtctgaatgacggccagagctggagtcagaagcgccattaccaggaggtcacaagcgacgggatctttagccccactgcctacttgaatggccatgccgaaacccctgtttaccggtttagcctggccgacggcacaattgtaacggcgcagactaaatccaagttatttcgaaaccccgtgactaacgataggcatgggtttgtgagcactcactttctgcagcgggaacagaatggatatagacctaatcccaatccggtcggccaggggatcagacctcccatggcaggctgtaactctagcgtgggcgggatgtcaatgagccctaaccaagggcttcagatgccctcttcccgggcatacgggcttgcggatccgagcaccaccgggcaaatgtctggagcccgctacggagggtcctccaacatagcatctttgacccctggccctgggatgcagtccccgtcaagctatcaaaacaataactacggtttgaatatgagctctccaccccacggttcacccggacttgctcccaatcagcagaatataatgatctcccccaggaaccggggatccccaaaaatcgcgtctcatcagttttcccccgtggctggagtgcattcccccatggctagttctggaaacacagggaatcactcattcagttcatcttcattgagtgcacttcaggctataagcgaaggagtagggacctctctactaagcaccttgtccagtccagggccaaagctggataactctcccaacatgaacattacccagccttcaaaggtttctaatcaggatagcaaaagccctcttgggttctactgcgaccaaaaccccgtggagtcaagtatgtgtcagagcaactcccgcgatcatttatccgacaaggaatccaaggagtcaagcgtcgagggggccgagaaccagagaggccctctggagtctaagggccataagaagttgctacagcttcttacttgctcctccgatgacagaggtcactcctcccttactaattcaccactcgattcatcatgcaaggagtcatccgtgtccgttaccagcccttctggtgtgagttccagcacatccggcggagtctcatccacaagcaacatgcatggatcgttgctgcaggaaaaacatagaatattacacaagctgctacagaacgggaatagccccgccgaggtggccaagatcacagcagaggcaactgggaaggatacaagcagcatcacatcctgtggggacggcaatgtcgttaagcaggagcaacttagtcctaaaaagaaggaaaataatgctctgcttaggtacttattagacagggacgacccatccgacgccctgtcaaaggagttgcagcctcaagtcgaaggggtcgacaataagatgtcgcagtgtacaagctccactattccaagttcaagtcaggagaaggacccgaagatcaagacagagacgagcgaagaagggtcaggagaccttgataatctcgacgctatactcggtgatttgaccagcagcgatttctacaataattccatcagctctaatggcagtcacttagggaccaagcaacaagttttccaaggaaccaacagcctcggcctgaagagctcccaaagcgtgcagtccataaggcctccgtataaccgggccgtttcgctggactcccccgtgagcgtggggagctcccccccagttaagaacatttctgcgttccccatgcttcccaagcagcctatgctgggtggcaaccctcggatgatggactcgcaggaaaactatggctcctccatgggggattggggcctgcctaacagtaaggccggacgcatggaacctatgaacagcaacagtatgggccggcccggaggcgattacaatacaagcctgcctcggcccgccctagggggctccattcctactctcccattgcgatcaaatagcattccaggagccagacccgtcctccagcaacagcagcagatgctgcagatgagaccgggtgagataccaatgggtatgggtgccaacccttacggccaggctgccgcgtctaatcagctcggttcttggccagacggtatgctctctatggagcaggtgagccatggcacccagaacaggccgctgctccggaactccttagatgacctcgtcggccctccctcaaacctggagggccagtctgacgagcgggccctgcttgatcaactacacaccctgctgagcaataccgacgccactggcctggaggagatcgaccgcgccctcggcatccccgagctggttaaccagggacaggctttggagccaaagcaagacgcatttcagggtcaggaggccgccgtgatgatggatcagaaagccggtctctacggacagacctatccagcacagggacctcctatgcagggaggattccacttgcagggccagagccctagcttcaactcaatgatgaatcaaatgaaccaacagggtaatttcccgcttcaaggcatgcatcctcgggccaatataatgcggccccgtaccaatacacccaagcaactacgaatgcagctgcagcagagattgcagggacagcagttcttgaaccaatctcgtcaggccctggaattgaaaatggagaaccctacagccgggggagcagccgtgatgcgacctatgatgcaacctcaacagggattcctgaatgcccagatggtggctcagaggagtagggagctgctctcccaccacttccggcagcaacgcgtcgctatgatgatgcaacagcaacagcagcagcaacaacagcagcagcagcagcagcagcagcaacagcagcagcaacagcaacagcagcaacagcagcaaacccaggccttctccccaccgcccaatgttactgcttccccctcaatggacgggctgcttgctggccccaccatgcctcaggcgccccctcagcagtttccttatcagcccaactatggcatgggtcaacagccggatccagcattcggccgggtctccagcccaccaaatgcaatgatgagttctagaatgggaccctctcaaaatcctatgatgcagcatccacaggccgcttctatttatcagtccagtgagatgaagggctggccatccggtaacctagcacggaacagcagtttctcacaacaacagtttgcccaccagggtaaccccgccgtgtattctatggtacacatgaatggatccagtggtcacatggggcagatgaacatgaatccaatgcccatgagcggcatgcctatgggcccggatcagaagtactgctag

SEQ ID NO: 197693 - DNA, 4275 bp, synthetic construct
  misc_feature 1..4275: note = Description of Artificial Sequence: Synthetic coding sequence
  source 1..4275: mol_type = other DNA
atgagcggcctgggcgagaacctggaccccctggccagcgacagccgcaagagaaaattgccctgcgacactcctggccagggcctaacatgctccggggaaaaacggcggcgtgagcaggagtcgaagtatatcgaagagctggctgaactgatttcggccaacctaagtgacattgataacttcaatgtgaagccggataaatgcgccattctcaaggaaactgtccggcagatacggcagatcaaggagcagggaaaaaccatatccaacgacgatgatgtgcagaaggcggatgtgtcaagtacaggtcagggtgtcatcgataaggatagcctggggcccctcctgctgcaggcactcgacggcttcctgttcgttgtcaacagggacggcaatatcgtgtttgtgagtgagaacgtgacccagtacttacagtacaagcaggaagacctagttaatacaagcgtgtataacatcctgcacgaggaggacaggaaggactttctgaagaatctgccaaagagcaccgtcaatggggtgtcctggaccaacgagacccaacggcagaagagccatacctttaattgtcgaatgttgatgaagactcctcatgacatcctcgaggacattaacgcctcccctgaaatgaggcagcggtacgaaacaatgcagtgctttgcgctctcgcagccaagggctatgatggaggaaggggaagatctgcagagctgtatgatttgcgtcgcccgtagaatcaccacaggggagcgcacgtttccgagtaatccagagagcttcatcacccgccatgatctctcaggcaaggtcgtgaatatcgatactaactcactgaggagctctatgaggcctggtttcgaagacatcattagacggtgcattcagagatttttctcgcttaacgacgggcaatcctggtcccagaagcgtcattatcaggaggcatatttgaatggacatgctgagactccggtgtacaggttttctcttgcggatggcaccatcgtgaccgcccagaccaagagcaagctttttcggaatccggtgaccaacgatcggcatggatttgtaagcacacatttcctgcagcgcgaacagaatgggtatcggcctaaccctaaccctgtagggcaggggatcaggcctcccatggctggctgcaattcgtccgtgggcgggatgagtatgtcaccgaatcaagggctgcagatgcctagctctcgggcatacggactggccgatccatccaccacaggccagatgagcggagcaaggtacggcggctcctctaatatcgccagtctgacacccggacctggtatgcagtcccctagctcttatcagaataacaattacggactcaatatgagtagcccaccacacgggtctcctgggttggcacccaaccagcagaacattatgatctcaccccgcaatcggggttcgcctaaaatcgcctcccaccaatttagccctgtagcgggggtgcattctccaatggcctccagcggtaacacaggtaatcactcattttccagctcctccctgagcgccctgcaggccatatctgagggagtgggaacttctctgctatccaccctctcatctcctggccctaagctggacaattcacctaatatgaatatcactcagccatccaaggttagcaaccaggacagtaagagccctctaggcttctactgcgaccagaatccggtcgaatcatccatgtgccagtcaaacagtagggaccatctctcagacaaagaatcgaaggagagtagtgttgagggagctgaaaaccaaagaggaccattggaatccaagggacataagaagctgctgcagttgctcacttgctctagtgacgatagagggcactcatcgctgaccaatagcccactggacagtagctgcaaagagtcctccgtgtcagtgacgagtcctagtggggtcagcagcagcactagcggtggcgtgagttccacttcaaacatgcacggctcactgttacaagaaaaacacagaattctccataagctcctacagaatgggaatagcccagccgaggttgctaagattacggccgaagccaccgggaaagataccagctctatcaccagctgcggcgacggaaatgtagtgaagcaggaacagctttcaccgaagaaaaaggaaaacaacgctctgctacggtacctcctagatcgtgacgaccctagcgacgcgttgtctaaggaactccagccgcaagttgaaggggttgataataaaatgtcccagtgcacatccagcacaattccatcctcaagccaggaaaaggaccctaagattaagacagagaccagcgaagagggttccggggacttagataaccttgacgcaatcctgggtgacctcacaagctcagacttttataataattccatcagtagcaacgggtcccatctcggtactaaacagcaggtgttccagggaaccaactccctcggacttaaatcctcccagtctgtgcagtcaatcaggccaccctataaccgagctgtctctttagattcacctgtgtctgtaggctccagtcctcccgtaaagaatattagcgcgtttccaatgctgcctaagcagccaatgttgggaggtaaccctcgcatgatggattctcaggagaactacggatcaagcatgggggggccgaaccgcaacgtgacggtcacacaaacacccagttctggagactggggattaccaaattctaaggctggtaggatggagccaatgaattcaaattccatgggaaggccagggggtgattacaacacaagcctcccccgccccgcccttggaggctcaattcccacgctgccactgcggtccaactctatcccaggggcgaggccggttctgcagcagcagcagcaaatgctccaaatgaggcccggagagattcccatgggcatgggcgcaaatccgtatggccaagctgcagcttccaatcagttaggatcttggcctgacggtatgctgagcatggagcaggtgtcccacgggacacagaaccggccattgctgcgcaattccctcgatgacctagtgggacccccatctaacctggaagggcagagcgacgagagagccctgctggaccagttgcataccctcctttcaaataccgatgcaacggggttggaggagatcgacagggccctgggcattccggagctggtgaaccagggtcaggccttagagcccaaacaagatgcctttcagggtcaggaggcggccgtgatgatggaccagaaggctgggttgtacggccagacttatccggctcagggcccaccgatgcaaggcggatttcacctgcaggggcaatcacctagctttaattctatgatgaatcagatgaaccagcagggtaatttccctctacagggtatgcatcctagggccaatattatgcgacctagaaccaacacacctaagcagctgagaatgcagctccagcaaaggctacagggtcagcagttcctcaatcagagcaggcaggctctcgaactgaaaatggaaaatcctactgccggaggcgctgcggttatgagacccatgatgcagccgcaggtatcctctcaacagggtttcctaaatgctcagatggtggctcagcggtctcgcgaacttctgtcacaccattttaggcagcagagggtggctatgatgatgcagcagcagcagcaacagcagcagcagcagcaacagcagcagcagcaacagcagcaacagcagcagcaacagcagcagcaacagcagactcaagcattttctcctcctcccaacgtgactgccagtcccagcatggatgggcttctcgccggcccaaccatgccacaggcgcctccacaacagttcccctaccagcctaattacggaatgggacagcagcctgaccccgcctttgggcgggtaagttcccctccaaacgcgatgatgagcagcaggatgggccccagccaaaaccctatgatgcagcatccccaggcagcatccatataccaatcttccgaaatgaaggggtggccttctggtaacttagccaggaattcctcttttagccagcagcaatttgcccaccagggtaaccctgccgtgtactccatggttcacatgaacggcagctctgggcacatgggccaaatgaatatgaacccgatgcccatgtcaggaatgccaatgggaccagatcagaaatactgctag

SEQ ID NO: 197694 - DNA, 4263 bp, synthetic construct
  misc_feature 1..4263: note = Description of Artificial Sequence: Synthetic coding sequence
  source 1..4263: mol_type = other DNA
atgagcggcctgggcgagaacctggaccccctggccagcgacagccgcaaacggaaactcccttgtgacacgcccggtcaagggctgacgtgcagtggcgagaaacgcagacgagagcaggagtctaagtacatagaagagctcgcagagctcatttctgctaatctctcagatattgataacttcaatgtcaaacctgataagtgcgctatcctgaaagaaacagtgagacagatcaggcagatcaaagagcaggggaaaacgatctctaatgacgacgatgttcagaaggcagatgtgagtagtactggccaaggagtgattgacaaggactcactgggaccactgctgctgcaggctctggacggttttctgttcgtagtgaacagagacggaaacatcgtgtttgtgagcgagaacgtgacacagtacctccaatacaagcaggaggatctggtcaataccagcgtgtacaatatcctgcacgaggaagatcggaaagattttttgaagaacctgcctaagagcacagtcaacggcgtaagttggacaaatgaaacacaacgccagaaatcccacacgttcaactgtcgtatgctgatgaaaaccccccacgatattctggaggatatcaatgcgagtcccgagatgaggcagaggtatgagacaatgcaatgctttgctctttcccagcctagggccatgatggaagaaggcgaggatcttcagagctgcatgatttgcgttgccaggaggatcaccaccggcgagcggactttcccaagcaatcccgagagctttataacgcgacacgatctgagtggcaaggtggtgaacattgacacgaattcactcagatcgtcaatgcggcccggcttcgaagacatcattaggaggtgcatccagcggttctttagtttgaatgatgggcagagttggagccaaaagcggcattaccaggaggcatatctcaacggacacgccgaaacccccgtgtatcgcttctcacttgctgatggtacaatcgtaaccgcacagaccaaatcaaagctcttccgaaaccctgttacaaacgataggcatggctttgtttccacccattttttacagcgggagcaaaatggctatcgccctaaccccaaccccgtaggccaaggcattcgaccaccaatggcagggtgtaattctagtgttggagggatgtctatgagccccaatcagggcctgcagatgccgtcaagtcgcgcatatggcttagccgacccatccaccactggacaaatgtcaggcgccaggtatggcggatcgtccaacatcgctagcctaacacctggacctggaatgcagagcccctcgagttaccaaaataataattatggactcaatatgtcgtctccaccgcacggcagccccgggctcgcgcctaatcaacaaaatatcatgatatcacctcgcaacagagggtcccccaagatagcttcacaccaatttagtccagttgccggggtccatagtcccatggcctcgtctggtaatactggtaaccattcttttagtagctcctctttatctgcattacaggcgatctctgaaggcgtgggaacctcactgctgtcgacactctcctctcctggccctaaacttgataatagcccaaatatgaatattacgcagcccagcaaggtgtccaaccaagattccaagtcaccattagggttttactgcgatcagaatcccgttgagtctagcatgtgccaatccaactcccgggaccacctgtcagataaagagtctaaagagtccagcgtcgaaggggcagaaaaccagcgagggccattggaatctaagggccacaagaaattgcttcagttactgacatgtagttccgatgacagaggtcattcttctcttaccaattcaccactggacagctcatgcaaggagagttccgttagcgtaacctccccatcaggtgtgtccagttccacatctggaggagtttctagcaccagcaacatgcacggcagtctgctacaggagaagcacaggattctccataagctgttacagaacggcaactctccagctgaagtggcaaagatcacagccgaggctactggcaaagacacaagctctattacttcatgcggtgacggcaacgttgtaaagcaggagcagctgtcccctaaaaagaaggagaacaatgcgctgttacgttacttgctagaccgggacgacccaagcgatgctctttccaaagaactgcagccgcaggtggagggagtggataataagatgagccagtgcacttcatccaccattccaagttccagtcaagaaaaagacccgaagatcaaaaccgaaacatcagaggaaggatctggagaccttgataacctggacgccatcctgggggatcttacctcgtctgacttttataacaacagcatttccagtaatgggtcgcacctgggtactaaacaacaggtattccagggtactaactcgctaggcttgaagtcctcccagtcagtgcaaagtatcagacctccttataatcgggctgtgtccctcgatagtcctgtgtccgtggggagctccccacctgtgaaaaacatctctgcattccctatgttgcctaaacaacctatgctgggtggaaacccacgcatgatggactctcaggaaaactacggcagctccatgggggggccgaatagaaacgtcactgtgacccagactccgagcagcggcgattggggcttgcccaatagcaaggctgggaggatggagcctatgaattccaattcaatgggacggcccggcggagattacaatacgtccctgccacggccagccctgggaggttcgattccgaccctcccattgagaagcaacagcattcctggggccagacctgtgctccagcagcaacagcaaatgcttcaaatgcgccctggggagatccctatgggcatgggcgcgaatccctatgggcaggccgccgcctccaatcagctcggctcctggcctgatggaatgttgtctatggaacaagttagccatggcacccaaaataggccgctgctgcggaattcattggatgaccttgtcggcccaccgagtaatctcgaaggccagagcgacgagagggcactcttagaccagctccacactttgctctcaaacaccgatgctacaggactggaagagatcgacagggctttggggatacccgagctggtgaaccagggtcaggcgttagagccgaaacaggacgcttttcaggggcaggaggcagccgtcatgatggaccagaaggcaggtttgtacggacagacatacccagcacagggtccacctatgcagggcgggttccacctccaggggcagtccccctcctttaatagcatgatgaatcaaatgaatcaacaggggaattttcccctccaggggatgcatccacgggccaacatcatgcgcccccgcaccaatacgcctaagcaactccggatgcaactacaacagagacttcaggggcagcagttcctaaatcagtcacgtcaagcactggaactgaaaatggagaatcctaccgcaggcggagctgcagtaatgagacccatgatgcagccccagcagggatttcttaatgcacaaatggtcgcacagagaagtcgcgagcttctctcgcatcatttcaggcagcagagagtggcaatgatgatgcaacagcagcaacagcagcagcagcagcagcagcaacagcagcagcagcagcaacaacagcagcagcagcagcagcagcagcaacagactcaggccttctcacccccaccaaatgttactgcttcccctagcatggacggtctgctggccggacccactatgccccaggcacctccgcagcaattcccgtaccagccaaactacggaatgggacaacagcctgaccccgcatttggacgtgtgagctcccctccgaacgctatgatgagcagtcgtatgggtccttcccagaacccaatgatgcagcatccacaggccgcaagcatctaccaatcttccgagatgaagggctggccaagtggaaacctggcgagaaattcctctttctctcagcagcagttcgctcaccaggggaaccccgcagtatacagtatggtccatatgaacggctcctcagggcacatgggtcagatgaatatgaaccctatgcctatgtcaggcatgccaatggggcctgatcaaaagtattgttag

SEQ ID NO: 197695 - DNA, 774 bp, synthetic construct
  misc_feature 1..774: note = Description of Artificial Sequence: Synthetic coding sequence
  source 1..774: mol_type = other DNA
atgatggaggagggcgaggacctgcagagctgcatgatctgcgtggcgaggaggattacaaccggcgaaagaactttcccaagtaatccggagagcttcataacccgccacgacctatcaggcaaggtagttaatattgacaccaattctctacgttccagcatgcgaccgggcttcgaggacattattaggcgctgcattcaacgcttctttagcctcaacgacggtcagtcatggagccagaaaagacactaccaggaggcctaccttaacgggcatgccgagactccagtctacagatttagtctcgccgatggcaccatcgtcactgcacagacaaagtcaaagttatttcgtaacccagttacaaatgacaggcatggcttcgtgagcacacatttcctgcagcgcgaacagaacgggtacaggccaaaccccaatcccgtgggacaaggtatccggccaccgatggccgggtgcaattcgagcgtaggaggaatgtccatgtcgccgaatcaaggactgcagatgccttccagccgcgcgtatggcctggctgacccctcaacaacaggacaaatgagcggtgccaggtacggcggctcctcaaacattgctagcctgacaccggggccaggcatgcagagcccatcaagctatcagaacaacaattatggtctaaacatgagctccccaccacacggatcgcccggcctagcccccaaccagcaaaacattatgattctactggtcatcgtgggcgtacaaagatag

SEQ ID NO: 197696 - DNA, 864 bp, synthetic construct
  misc_feature 1..864: note = Description of Artificial Sequence: Synthetic coding sequence
  source 1..864: mol_type = other DNA
atgaacaccttccaggaccagagcggcagcagcagcaaccgggagcccttgctccggtgtagcgatgctcggcgtgacctcgagctggcgattggaggggttctgagagcagagcagcagatcaaggacaacctcagagaggtgaaggcccaaattcatagttgcatatcaaggcatctggagtgcctcagaagtcgagaggtgtggctctatgaacaagtggacctgatatatcaactgaaagaagaaactctgcagcagcaggcccagcagttgtattccctacttggccagttcaactgtctgacccatcagttagaatgcacacagaacaaagacctggccaaccaggtcagcgtatgcctcgaaaggctgggatccttaacgctaaagcctgaagactccaccgtcttattattcgaagcggacactatcacactgaggcagaccattacaacatttggctctctcaaaactattcagattccagaacacttaatggcacacgcttcatccgctaacataggtccgttcctggagaagcgtggctgcatctcaatgccagaacagaaatccgcctccggtattgtagccgtgcccttttcggaatggttactggggtccaagcccgcctcaggctaccaggctccttatatcccatccactgacccacaggactggctaacacaaaaacagactctcgaaaacagccagcaagaggtccttttaaacagccccttgcaagaggagcataacttccccccggatcattatggattgccagcagtttgcgatctcttcgcgtgcatgcagttaaaagtggacaaggaaaaatggctatacagaaccccccttcaggtctag

SEQ ID NO: 197697 - DNA, 1845 bp, synthetic construct
  misc_feature 1..1845: note = Description of Artificial Sequence: Synthetic coding sequence
  source 1..1845: mol_type = other DNA
atgaacaccttccaggaccagagcggcagcagcagcaaccgggagcccctgttaaggtgctcagatgcgaggcgcgacctcgagttggccatcggcggagtcttacgcgctgaacagcagattaaggacaacctgcgggaggtaaaagcccagattcacagctgtatttcgagacatcttgagtgcctccgtagtagagaggtgtggctctatgagcaggtggatctaatctatcagctgaaagaagagacactgcagcagcaagcccagcagctctacagtttgctcggtcagttcaattgtctgacccaccagctggaatgcacccagaacaaggaccttgctaaccaggtcagcgtctgtttggagcgccttggctccctgaccttgaagccggaagacagtactgtgctgcttttcgaggccgacaccattacactccggcagacaattaccactttcgggagcctcaagaccattcagatccccgaacatctgatggcacacgctagctcggcaaacatcggaccctttttggagaagaggggctgcatcagtatgcctgaacaaaaatccgccagcggaatcgtggcagtacctttttcagagtggctgcttggatctaaacctgccagcggctatcaggccccatatatcccgtcaactgacccccaggactggctgacccagaagcagaccttagagaattcacaaacttcctctcgggcctgtaatttttttaataatgtgggcggcaatctgaagggacttgagaattggttgctaaaatcggaaaaaagcagttaccagaagtgcaacagtcacagtaccacgtcatcgttttccatagagatggagaaagtaggcgaccaggagctaccagaccaagacgagatggacctctctgattggctcgtaaccccgcaggaatcccataagctccggaaacctgagaacggtagtagggaaaccagtgagaaattcaagctgctcttccagagctacaacgtgaatgactggctggtgaagacagatagctgtaccaactgtcaagggaaccagccgaaaggagtcgaaatagaaaatctaggcaatctcaaatgtcttaacgaccatttagaagcaaagaaacctctttccaccccctctatggtcaccgaggactggctggttcagaatcaccaggacccctgcaaggttgaagaagtctgtcgcgcaaatgagccttgcacctcgtttgcagagtgtgtgtgcgatgagaactgtgagaaagaagccctgtataagtggctactgaaaaaggagggaaaggataaaaacggcatgcctgtcgaaccaaagcctgaacccgagaaacataaggactctttgaatatgtggctctgtccgcggaaggaagtgattgaacagactaaagcacccaaagctatgaccccaagccggatagccgacagctttcaagtaattaagaatagccctctatccgagtggctaatccgtcccccctataaagagggatcaccaaaggaagtgccaggcactgaggaccgtgcaggtaagcagaagttcaagtcaccaatgaacacttcctggtgcagctttaacactgcggactgggtgctgccggggaaaaagatgggaaacctgagccagctgagtagcggcgaggacaagtggctgttacgaaaaaaggctcaggaagtgctcttgaacagtccactgcaggaggagcacaacttccccccagaccactatggattaccggcagtctgcgatctcttcgcttgtatgcagctaaaagtagacaaggaaaagtggttgtacaggacacctctgcaaatgtag

SEQ ID NO: 197698 - DNA, 1728 bp, synthetic construct
  misc_feature 1..1728: note = Description of Artificial Sequence: Synthetic coding sequence
  source 1..1728: mol_type = other DNA
atgaacaccttccaggaccagagcggcagcagcagcaaccgggagccactgctgaggtgttcagacgctcgcagagatctggagcttgcaatcgggggcgtattgcgggcggagcagcaaattaaggataatctgcgggaagtaaaagcccagatacactcttgtatttcgagacaccttgagtgccttaggagtcgtgaggtgtggctctacgagcaagtggatctgatttatcagctcaaggaagaaactctccaacagcaggctcagcagctctatagcttgcttggacagtttaattgccttacccatcagctcgaatgtacccagaataaagacctggctaatcaagtaagcgtctgtctggaacgcctcgggtctcttacactcaaaccagaggactctacagttttgctcttcgaggcggacaccataactttgagacaaacaatcacgacattcgggtcgctcaagacaatccaaatcccggagcatctgatggcccacgcttctagtgccaacattggccccttcctcgagaaacgtggctgcatttcaatgcccgaacagaaaagcgccagcggcattgtagccgtgcccttttcagagtggcttctgggatcaaagcccgccagtgggtaccaagctccatatattccctcaacagaccctcaggattggctcacacagaaacagacacttgagaatagccaaacgagtagccgggcatgcaatttctttaacaatgtgggtggcaatctgaaggggctggagaactggctcctcaagtctgagaaatccagttatcagaagtgcaatagtcactctaccacctcttctttcagtatcgagatggaaaaggtgggagaccaggagttgcccgaccaggatgagatggatctttccgactggttggttacccctcaggaatcccataaactgagaaagcctgagaatggatcccgggaaacatctgagaaattcaagctgctgtttcagagctataatgtgaatgactggctggtcaagacagacagctgtactaattgtcagggtaaccagccgaagggtgtggagattgaaaatcttggaaacctgaaatgcttgaatgatcacttagaagcaaagaagcctttgagcacaccctcgatggtgaccgaggactggctcgtccagaatcaccaagatccatgcaaagtcgaagaggtgtgcagagcgaacgagccatgcacttcgttcgccgagtgtgtgtgcgatgagaactgcgagaaagaggctctgtacaagtggctgctcaaaaaggagggcaaagataaaaacggaatgcctgtcgagcccaagcccgaaccagagaaacataaggattcgctgaatatgtggctctgcccaagaaaggaggtgatagaacagaccaaggccccaaaggccatgacaccttcccggatcgccgactctttccaggtaatcaagaactcacctctctccgagtggctaattcggcctccctacaaagagggcagtcccaaagaggttcccggcacagaggaccgggccggtaagcagaaatattatctgattcatctctatcggagaaatatcacaagtcctcagaccattatggccagtctccagtttgtgataagtctcccagtttgtagtctgaagctgattaaaagaagtgggtacatcgaactcctgtatcgatgcgaggggatggataagagttag

SEQ ID NO: 197699 - DNA, 1845 bp, synthetic construct
  misc_feature 1..1845: note = Description of Artificial Sequence: Synthetic coding sequence
  source 1..1845: mol_type = other DNA
atgaacaccttccaggaccagagcggcagcagcagcaaccgggagccactgctcaggtgcagtgacgcccgtagagatcttgagctggccattggcggggtgctgagggccgagcaacagatcaaggacaatcttcgtgaggtgaaagcacagattcactcgtgcattagtagacatctggagtgtctgcgttcccgcgaagtttggctgtacgagcaggttgacttaatttaccagctcaaggaagaaactctccagcagcaggcacaacagctttatagtctgttaggccagtttaattgcctaacacaccagctcgaatgcacccaaaacaaggacctcgcaaatcaggtgagtgtgtgcctggagagattaggctcactgacgcttaagcccgaggatagtacggtgctgttattcgaggccgacacaattaccctgagacagaccattactacattcgggtccttgaagacaattcagattccagaacaccttatggcacatgcctcatctgcaaatatcggcccattcctcgagaagcggggatgtatcagtatgccagaacagaagtctgcatccggaattgtggccgttcccttcagcgagtggctgctcggcagtaaacccgcctccgggtaccaagccccgtacatccccagtactgacccccaggattggttgacgcaaaagcagacgctcgaaaattctcagaccagcagcagggcatgcaacttttttaataatgtgggcgggaaccttaaaggtttagaaaactggttgctgaagagtgaaaagagctcctatcagaaatgcaatagtcactccacaacgtcatctttttcaatagagatggagaaggtgggtgaccaggaactgccggaccaggacgagatggatctgtccgattggctagttactccccaggagagccataaactgagaaagcccgaaaatggcagtcgggaaacctcggagaagtttaagctcctcttccagtcatataacgtgaatgactggctggtgaagaccgatagctgtactaactgtcaggggaaccagcctaagggagtggagattgagaacctcgggaacttaaagtgtctgaacgaccatttagaagccaaaaagcccttgagcaccccatcaatggtaacagaggattggctggtgcagaaccaccaagatccatgtaaagtggaagaggtttgccgtgctaacgagccatgcacgtcgttcgcggaatgtgtatgcgatgagaattgcgagaaagaagcactgtacaagtggcttttgaaaaaagaggggaaggacaaaaacggcatgcctgttgagccaaagcctgagccggaaaagcacaaggactccctcaacatgtggctctgtccaaggaaggaggtgatcgagcagacaaaggcccctaaagcgatgacgccgagccgcatcgccgactcatttcaggtcattaaaaactcgcctttaagcgagtggctgattcgtccgccatataaggagggctcccctaaggaagtgccaggaaccgaagatcgagctgggaagcagaaatttaagtcccccatgaacaccagttggtgttcgttcaatacagcagactgggtgctgcctggtaagaagatgggaaatctgagtcaactatcgagcggcgaagacaagtggctcttgaggaagaaggcccaggaggttctgctcaattctccactgcaggaagagcacaactttccgcccgatcactacgggcttccagctgtgtgcgatttgttcgcatgtatgcagctgaaagtggacaaggaaaaatggttatatcggaccccactgcagatgtag

SEQ ID NO: 197700 - DNA, 1347 bp, synthetic construct
  misc_feature 1..1347: note = Description of Artificial Sequence: Synthetic coding sequence
  source 1..1347: mol_type = other DNA
atggcccacgccagcagcgccaacatcggccccttcctggagaagagaggatgcatatccatgcccgaacaaaagagtgcttcaggtattgtggcagtacctttctccgaatggctcctgggatcgaaacctgcttccgggtaccaggcgccatacatacccagcactgacccacaggattggctgacacagaaacaaactctggagaactcccaaacctcttcacgggcctgcaatttcttcaacaatgtgggcggcaacctgaaaggtcttgagaattggctcctgaaaagcgagaaatctagttatcagaagtgcaacagccactccactacgtcttctttctctatcgaaatggagaaggtcggggatcaggaactccctgatcaggatgagatggatctgtctgattggctggtcactccccaggagtcccacaagttgaggaagccagaaaacgggagtcgggagacaagcgaaaaatttaagcttctgtttcagagttacaatgtgaatgattggctcgttaagactgactcttgcacaaactgccagggcaatcagcctaagggcgtggagattgagaatttagggaacctgaagtgcttgaacgatcatctggaggctaaaaaacctctgagtaccccaagcatggtaacagaagactggttagtgcagaaccatcaagatccatgcaaagttgaggaagtgtgcagggcaaatgaaccgtgtacctccttcgcagagtgtgtatgcgacgaaaattgcgaaaaggaagcgctctacaagtggctgttgaaaaaggaaggtaaggacaaaaatggcatgcctgtggagcctaaaccagaacccgaaaaacacaaagactcgttgaatatgtggctgtgtcccagaaaggaggtcatcgaacagaccaaggcccccaaagccatgactccctctcgaatcgctgattctttccaagtcatcaaaaacagcccactgtctgaatggctcattcgcccaccttacaaggaaggctctcccaaagaagttcccgggaccgaggatcgcgctggcaagcagaagttcaagtctccgatgaacacctcctggtgttcctttaacactgccgattgggtgctgccaggtaagaagatgggcaatctaagccagctctcaagtggtgaggacaaatggcttctgaggaaaaaagcgcaggaggtgctgttgaacagccctctccaggaggagcacaattttcctcccgaccactatgggctaccggcagtttgcgacctttttgcatgtatgcagttaaaagtggacaaggaaaagtggttgtaccgcacgcccctgcagatgtag

SEQ ID NO: 197701 - DNA, 1545 bp, synthetic construct
  misc_feature 1..1545: note = Description of Artificial Sequence: Synthetic coding sequence
  source 1..1545: mol_type = other DNA
atgaaccggtggaccctgttcatcagcctgaagcggcggcacttcaattcacggctctcgtcaagcacccgcttggggtctctgactctcaaacccgaagacagtacggttttgctgttcgaggcggacacaatcacgctgcgtcaaacaataactacctttgggagcctgaagaccatccagattccagagcacttgatggctcacgccagtagcgcgaacatcggcccttttctggagaagcgggggtgcataagcatgccagagcaaaagagcgcatccggcatcgtcgccgtccccttctccgaatggctgctggggtcaaaacctgcttcaggatatcaggcgccttatataccttcaacagatcctcaggactggctcacacagaagcagactctggaaaatagccagacctcctctcgagcctgcaatttcttcaataacgtggggggtaacctgaaggggctggagaattggcttttgaaaagcgagaagtcatcctaccagaagtgcaatagccacagtacgactagcagtttttctattgaaatggagaaggtcggagaccaggaattgccggaccaggatgagatggacctgagtgactggctggttacacctcaggagtcccataaactgcgaaaacccgaaaacggctcccgagaaacaagtgagaaattcaaactactcttccagagttacaatgtgaatgattggcttgtcaagaccgactcctgtactaattgccagggcaaccagcccaaaggggtggagattgagaaccttggtaatcttaaatgcctgaatgatcacttggaggctaagaaacctctgtcaacgcctagtatggtgaccgaggactggctcgtgcaaaatcatcaggacccctgcaaagtggaagaggtctgtagggcgaatgagccatgcacctcgttcgcagaatgcgtatgtgatgaaaattgcgagaaggaagctctgtataagtggctgctgaagaaagaaggcaaggacaagaacgggatgcccgtcgagccaaagcctgaaccagagaaacacaaggacagcctgaatatgtggttgtgtccacggaaggaggttattgagcagacgaaggcccctaaagccatgacaccctccaggatagctgacagctttcaggtcattaaaaattctccactgagtgaatggctgattcgccccccatacaaggagggcagccccaaggaagtgccaggcaccgaagatcgggctggaaagcaaaaattcaaatctcctatgaacacctcatggtgctctttcaacacagctgattgggtacttcctggcaaaaaaatggggaacctgagtcagctgagctctggagaggacaagtggttacttcgaaagaaagcccaggaggtactgctcaactcacctctccaggaggaacacaacttcccacctgaccactatggactgcctgccgtctgtgacttatttgcctgtatgcagcttaaagtggataaagagaagtggctgtatcgcactcctttgcagatgtag

SEQ ID NO: 197702 - DNA, 795 bp, synthetic construct
  misc_feature 1..795: note = Description of Artificial Sequence: Synthetic coding sequence
  source 1..795: mol_type = other DNA
tgatgcacccccgcctgggccgccgagctggacagcgtgagcaagcagaagaaaaatccaaaaccgacattcaaaaagaagacagaagaaaggacctgtgaagttaagaaggtctcccgtctgggatcactcacacttaaacccgaggactccactgtcttgttgtttgaggccgacacgatcacattgcgccaaacaattactacgtttggcagtctgaaaacaattcagatccccgagcatctgatggcccacgcaagctccgcaaacatcggcccctttttagagaagcgcggctgtataagtatgcccgagcaaaagagtgcttcaggcatcgtggccgtacctttttccgagtggttgctgggttccaagcccgcgagcggctaccaagccccctatatcccatctactgacccccaggactggctcacccagaaacagacgctggagaacagccaaacttcctcccgggcctgtaatttcttcaacaacgtcggcggcaacctcaagggtctggagaactggctactgaagtctgaaaagtcctcttatcagaagtgcaacagccactcaaccacaagctccttttctatcgaaatggaaaaagtaggcgaccaggaactcccggatcaggacgagatggatttgtcggattggctcgtgacccctcaggagagccacaagctgaggaagcctgagaacggctcaagagagacaagcgaaaagtttaaacttctttttcaaagttataatgtgaatgactggttggtcaagactgacagctgcacttag

SEQ ID NO: 197703 - DNA, 1893 bp, synthetic construct
  misc_feature 1..1893: note = Description of Artificial Sequence: Synthetic coding sequence
  source 1..1893: mol_type = other DNA
atgggcgcccagctgaccaccttcgccctggccggcgccgtgcggcgcatgaacactttccaggatcagtccggctcaagctcaaacagggagccactgttgcgctgttctgatgcaagacgcgatctggaactggcgatagggggagttctcagagctgaacagcagatcaaagataatcttcgtgaggtgaaggcacagattcacagctgcatcagcagacatctggaatgcttacgtagtcgggaggtgtggttgtatgaacaagtagaccttatctatcagctgaaggaggagacgctccagcagcaggcccaacagctgtactctctccttgggcagtttaactgtttaacacatcagctagagtgtacccagaacaaagacctggccaaccaggtatcagtgtgtcttgagaggttggggtctttgacactgaaacccgaggattccaccgtactcctgttcgaggctgacacgattaccctcagacagactatcaccacgtttggatcactgaagacgattcagatcccagaacacctgatggcccacgcctcaagcgcgaacatcggaccctttctggaaaaaagagggtgcataagcatgcccgaacagaagagcgcgtcgggcatcgtcgcagttccattcagtgaatggttgcttggctccaagcccgcctccggctatcaggctccatatataccctcgactgaccctcaggattggctcacacaaaagcagaccctggaaaatagtcagacctcaagccgggcttgcaactttttcaacaatgtgggcggcaatctgaaaggtttggagaactggctcctgaaaagcgagaaatcctcataccagaaatgcaatagccattccactactagctctttttcaattgagatggagaaggtgggcgaccaggaactgccagatcaagatgagatggacctgtcggattggttagtgactccccaggaatcccataaactgaggaagccggaaaacggttctcgtgagaccagtgagaagtttaagctgttgttccagtcctacaacgtcaatgactggcttgtcaaaactgattcttgtacaaattgtcaggggaaccaacctaaaggggttgagattgaaaatctcgggaacctcaaatgtctcaatgaccatctcgaggctaagaaacccctctcgaccccctctatggttacagaagactggcttgtgcaaaatcaccaggatccatgcaaggtggaggaagtgtgcagagccaacgaaccttgcacgtctttcgccgaatgcgtctgtgacgagaattgcgaaaaagaggccctctacaagtggcttctgaagaaagaaggcaaagacaagaacgggatgcctgtcgaaccaaaacctgagccggaaaagcacaaggactccctgaacatgtggttgtgccccagaaaagaggtcatagagcagactaaagcacccaaggccatgacaccatctcgaattgctgatagcttccaggttatcaaaaactctcccctgtccgaatggttgatccgccctccttataaagaggggtctccaaaagaggtacctggaactgaagacagggccggtaagcaaaaatttaagagtccaatgaacacgagttggtgttcattcaacaccgccgactgggtattacctggcaagaaaatgggcaatttatcacagcttagctcgggggaggacaagtggcttctccggaaaaaagcccaggaagtcctgctgaattcacccctccaggaggagcataattttcctccagaccactacggtctgcctgcagtgtgcgacctgtttgcttgtatgcagctgaaagtggacaaggagaaatggttgtaccggacccccttgcaaatgtag

SEQ ID NO: 197704 - DNA, 1845 bp, synthetic construct
  misc_feature 1..1845: note = Description of Artificial Sequence: Synthetic coding sequence
  source 1..1845: mol_type = other DNA
atgaacaccttccaggaccagagcggcagcagcagcaaccgggagccattacttcgatgctctgacgcaaggagggatcttgaactggctatcggcggcgtgttgagagcagagcaacagattaaggataatctgcgggaggtaaaggcacagatccacagctgcatctctcggcatctggagtgtctaagaagtagggaagtgtggttgtatgagcaggtagatctgatctaccagctgaaggaagaaaccctccaacagcaggcgcagcagctgtactccctcctggggcaattcaattgcctgacccaccagctagaatgcacgcagaacaaagatctggccaaccaagtatctgtctgtctggagcgcctggggagcttgaccctgaagcctgaggatagcaccgtgctactgttcgaagcagacactattaccttaagacaaacaatcaccacctttggtagcctgaaaaccatccagattcctgagcacttaatggcgcacgcctctagtgcaaatatcggccccttcttggaaaagcggggctgtatatcgatgcctgagcagaaatctgcgagcggcatcgtagccgtccctttttccgaatggttattggggagcaagccagcatcgggatatcaggccccctatattccatcgaccgacccacaagactggctgacccaaaaacagacattagagaactcccagacatcgtcccgggcttgtaacttcttcaacaacgtgggtgggaacctgaaaggcctggaaaattggctgcttaaaagtgaaaagagctcataccaaaaatgcaactcacattccacgacatcttccttttccattgagatggagaaagtgggtgatcaggaattacccgatcaggatgagatggatctgtcagattggctggtgacgcctcaggagtcccacaaactgcgcaaacccgagaacggtagccgggaaaccagtgaaaaattcaaactcctattccagtcctataacgtgaacgactggctggtgaagacggactcttgtactaactgtcagggcaaccagccaaagggagtagaaattgaaaatctagggaacttaaagtgtctcaatgatcatctggaagcaaagaaacccttgagtaccccatctatggttaccgaggactggttggtgcagaaccaccaggatccctgtaaagttgaggaagtgtgtcgtgccaacgagccctgcacctcatttgccgagtgcgtctgtgacgagaactgtgagaaagaagctctgtataaatggctgttgaagaaggaagggaaagataagaatggcatgcccgtggaaccaaagccagaacctgagaagcataaagacagcctcaatatgtggctgtgtcctcggaaagaagtgattgagcagaccaaagctccaaaggcaatgacgcctagtcgcatcgccgattctttccaggttattaaaaattcacctttgtccgagtggctcatcaggccaccgtataaggagggaagtcctaaggaggtccccggcaccgaggatcgtgccggaaagcagaagtttaagtcccccatgaacactagttggtgctcattcaacacggctgactgggtcctccctggaaaaaagatgggcaatttatctcaactgtcgtccggggaggacaagtggctcctgcgaaaaaaggcccaggaagtcttgttgaactcacccctgcaggaggagcacaatttcccaccagatcactatggcttgcccgctgtctgcgatttattcgcttgcatgcagctgaaagtggacaaggagaagtggctgtacagaacacccctgcaaatgtag

SEQ ID NO: 197705 - DNA, 1953 bp, synthetic construct
  misc_feature 1..1953: note = Description of Artificial Sequence: Synthetic coding sequence
  source 1..1953: mol_type = other DNA
atgggcgcccagctgaccaccttcgccctggccggcgccgtgcggcgtatgaatacttttcaggatcagagtggatctagttctaatcgggagcccttattgaggtgctcggacgcccgccgtgatctggaactcgcaataggtggtgtcttacgggccgaacagcagatcaaggacaacctcagggaagtgaaggcccagattcacagctgcatcagccggcatctcgagtgcttgaggagccgcgaagtgtggctttacgagcaggtggatctcatctaccagttgaaagaggaaacactgcagcagcaggcacagcagctatacagtctgctcgggcagttcaactgccttacacatcagctggagtgtacccagaataaagacctggcaaatcaggtgtccgtgtgtttggagaggcttggatcattaacgctgaagccagaagacagcacagttctgctgttcgaggcggacaccatcaccctgcgtcaaacaataacaactttcgggtccctgaaaaccattcaaatcccggaacatcttatggcccacgcatctagtgctaacatcggaccctttttggagaaacgcggttgtattagcatgccagaacagaaaagcgcttctggcatcgtagccgtccccttttccgaatggcttctgggctcgaagcctgcctctggatatcaggcaccctatatccccagcacggatccacaggactggctgacacaaaaacagacactggagaacagtcaaacatcctctcgagcctgcaactttttcaataacgttggcggcaacctgaagggactggagaactggcttctcaaaagtgagaaatcttcatatcagaagtgtaactctcactctaccacatcctcattcagcatagaaatggagaaggtgggcgaccaggagctgcccgaccaagatgagatggatttgagcgactggcttgtgactccacaagaatcccacaaactcaggaaacccgaaaacggaagccgggaaacatctgaaaaattcaagctgttgtttcagtcgtataacgtgaacgactggctggtaaagacagactcatgcactaactgtcagggaaaccagcccaagggggtcgaaatcgaaaacttagggaacctgaaatgcttaaacgaccatctagaagctaaaaaacctctgtcaacgcccagtatggtgactgaggattggctggtgcagaatcaccaggacccatgcaaggtggaggaagtctgtcgagctaatgaaccttgcacttccttcgctgagtgtgtgtgtgacgagaattgtgaaaaagaagcgctgtacaagtggctcctgaaaaaggaaggcaaggataaaaatggcatgccggtggaaccaaagcctgaaccagagaagcataaggactctctgaatatgtggctgtgtccaaggaaagaagttatcgaacaaacaaaagcaccaaaggcaatgacgccttcccggatagctgacagctttcaggtgatcaaaaacagtccgttgtctgaatggcttattagacctccatacaaggagggctccccgaaagaggttccaggaactgaggatcgcgccggcaaacaaaagttcaagtcgccaatgaacacgtcatggtgctcctttaacacagccgactgggtgctgcctggtaaaaagatggggaacctgtctcaactgagcagcggcgaagataagtggctcctgaggaaaaaggctcaggaagttcttcttaatagcccgctgcaggaagagcataactttcctccggatcactatggactgccagcggtatgcgacttgtttgcttgcatgcagctgaaagtcgataaagagaaatggttgtacaggacccccctgcaggcctactttaagatgaattttcaggatgtcaccgtggggaactttcagatcccctgtgggttttag

SEQ ID NO: 197706 - DNA, 6192 bp, synthetic construct
  misc_feature 1..6192: note = Description of Artificial Sequence: Synthetic coding sequence
  source 1..6192: mol_type = other DNA
atggtgctggacgacctgcccaacctggaggacatctacaccagcctctgtagctccacaatggaagacagcgagatggatttcgactccggcttggaggacgacgatacaaagagtgattctattctggaggatagcacgattttcgttgcgttcaagggcaatatcgacgacaaagattttaaatggaaactggacgctattttgaaaaacgtgcctaatctgctgcacatggagtcgagcaaattaaaggtccaaaaggtggagccgtggaatagcgtcagagtgacgtttaatataccacgtgaggcagcagagcggctgcggattctggctcagtcgaataaccagcaattgagggaccttggcattctctcggtgcaaatcgagggagagggggccatcaatctggcactagctcagaaccgtagccaagacgttagaatgaacggacccatgggcgccggaaattctgtccggatggaagccggattcccgatggccagtggacctggcatcataagaatgaataacccagccactgtgatgatcccaccggggggaaacgtctcgagcagcatgatggcaccaggtccaaacccggagttgcaaccaagaacacctagacccgcatcgcagagtgatgcaatggatccactcttgtccggattgcatatccaacagcagtcccatccgagtggtagtctggctcctccgcaccatcctatgcaaccagtgtcggtgaaccggcagatgaaccccgctaatttcccacagctccagcaacagcagcagcagcaacagcagcagcagcaacagcagcagcagcaacaacagcagcagcagcaacagcaactgcaggcaagacctccacagcagcatcagcagcagcaaccacaggggattagaccccagtttaccgcccctactcaggttcctgtcccccctggctggaatcagctcccttccggtgcactgcagcctccccctgcacaggggagcctggggacgatgacagcaaaccaggggtggaaaaaggcaccgctgcccggccccatgcagcagcagctgcaggctagaccttccctcgctaccgtgcagaccccatcacaccctcctcccccctatcccttcggctcacaacaggcctcgcaggctcacaccaatttcccccagatgagtaatcctggacagtttactgcacctcagatgaagtctctccaggggggaccctcaagggtccctactccacttcaacagccccacctgacgaataagagtccagccagcagccctagcagcttccagcaggggagccccgcctcctcccctaccgttaaccagacgcagcagcagatgggcccgagacctccccagaataaccccctaccgcagggctttcagcagcccgtgagtagtcccggcaggaatcccatggttcagcagggtaacgtgcctccaaactttatggtgatgcaacagcaacctccgaatcaaggacctcagtcgctgcacccgggattgggcggaatgcccaagcgcctgccacccgggttctccgctggacaggcaaatccaaattttatgcaaggtcaggttccatctaccaccgccacaaccccgggaaattccggtgcaccccaactgcaagccaaccagaatgttcagcatgccgggggccagggagccgggcctccacagaatcagatgcaggttagccacgggccacccaacatgatgcaaccatctctcatgggcattcacgggaatatgaacaaccagcaggccgggacctccggggtgccacaggtaaatctgtcaaatatgcaaggacagcctcagcagggcccaccatcgcaactcatgggaatgcatcagcaaattgtaccaagccaaggacagatggtccaacaacaaggcaccctgaatcctcaaaatcctatgattctgtctagagcacaacttatgccccagggtcagatgatggtcaatccccctagccagaatttgggtccctcccctcaacgcatgactccaccgaaacagatgctgtctcagcagggaccgcagatgatggctccccacaaccaaatgatgggtcctcaggggcaggttctcctgcagcagaacccaatgatcgagcagatcatgacaaaccagatgcaaggaaacaagcagcagttcaacacgcagaatcaaagcaatgttatgcctggccctgcccagattatgagaggacctacgccaaatatgcagggtaatatggttcagttcaccggacagatgagcggtcagatgttgcctcagcagggacctgttaataattccccctctcaggtcatgggaatccaggggcaggttctgaggcctcctggaccttccccccatatggcgcagcaacacggtgaccccgcaactactgcaaataacgacgtctctctgagccaaatgatgccagatgtgagtatacagcaaacaaacatggttccaccccacgtccaggccatgcaaggcaacagcgcatccgggaatcacttttctggccacggaatgagtttcaatgccccattcagtggggcccctaacggaaaccagatgagctgtggccagaatcctggcttcccggtgaacaaagatgtgaccctcactagtcctctcctggtgaatctgctccagtccgacatctctgctggtcatttcggggtgaacaacaagcaaaacaataccaatgcaaataagccgaaaaagaaaaagccaccacgcaaaaagaagaattcacagcaagatcttaatacaccagatactcgtccagctggcctagaggaggccgatcagcctcccctccccggagagcagggtattaatctggacaatagcggccccaagctgcctgaattctcaaaccggcccccaggctatccttcacagcccgttgaacagagacctctccagcagatgcctcctcagctgatgcagcacgtagcgcctccaccacagcccccacaacagcagccccagccccagctgccacagcagcaacagccccctcccccttcacagccacagtcccagcagcagcaacagcagcaacagcagatgatgatgatgctgatgatgcagcaagaccctaaatccgtgcgtcttccggtttctcagaatgtccacccgcctagaggccccctgaaccccgattcccagcgcatgccaatgcaacagtcaggtagcgtgcctgtgatggtaagtttgcaggggccagcttctgtaccaccgagcccagacaagcagaggatgcctatgccggtgaacacccctctcggctctaactctcgtaaaatggtgtatcaggagtccccccagaacccatccagttcccctttggctgagatggccagtctccccgaggcatcaggctccgaggcgccttctgtgcccgggggacctaataacatgccttcccacgtcgttcttccacaaaaccagttgatgatgacaggtcctaagcctggccctagccccctttctgccacccagggggctacccctcagcaacctcctgtaaatagtttacccagctctcacgggcaccattttccaaacgtggccgcacccacacagacgtccagaccgaaaaccccgaatcgcgcgtcaccacggccttattacccacagacgccaaataataggcctcctagtactgagccttccgaaatatccctcagtcccgagcggctcaatgcgtccatcgccggcttattcccgccacagatcaacatccccttgcccccgcgtcctaacctcaatcgggggttcgatcagcagggcctgaatccgacaaccctgaaggctatcggccaggcacccagcaacttgaccatgaatccttctaattttgccacccctcaaactcacaaactggacagcgtagtggtaaactccgggaagcagtccaacagcggcgcaaccaaaagggcctccccaagtaacagtaggagaagtagccctgggtcctcacggaaaactactccatcccctggccgccagaatagcaaggctcccaagctgactctcgcctctcagacaaatgctgctttgctccagaatgtcgaactcccaagaaatgttctggtcagccctacccctctggcaaatccccctgtacccggaagcttcccaaacaattcaggtctgaacccacaaaacagcacagtaagtgtggccgccgtgggtggagtggtcgaggacaataaagaatccctgaacgtccctcaagattctgattgtcagaactcccagagccgtaaagagcaagttaacatcgaactgaaagctgtgcccgcacaggaggtgaaaatggtggtgcctgaagaccagtcaaaaaaggatggccaacccagtgaccctaataaattgcctagcgtcgaggagaacaagaatttagtttcgcctgccatgcgggaggcacccacatcgctgagccagcttctcgacaatagtggggcacctaatgtgacgatcaaacctcccggcctgacagacctggaagtaaccccccccgtcgtgtcaggagaggacttgaagaaagcaagcgttattcctacactccaggatctgtcctcgtctaaggagccatcgaattctctgaaccttccacattccaatgaactatgctcatcactagtacaccccgaattgtctgaagtgagcagtaatgtcgccccgtctatcccgccagttatgtcgcgcccagtgtccagctcctccataagcaccccgctgcctccaaaccagattactgtctttgtaacttccaatcctatcacaacttctgccaacacgtccgcagcgcttcctacccatctccaatctgctctgatgtccactgttgtcaccatgcccaatgccggatccaaggtgatggtttcagaggggcagtctgctgcccagtcaaacgcccgccctcaatttatcacaccggtgtttatcaatagttcctcaattatccaggttatgaagggcagccagccttccactattccagccgcacccctgacaaccaactccggcttaatgcccccctctgttgcagtggttgggcccctccacatcccccaaaatatcaaattcagtagtgctccagttccgcctaatgctttgagttctagccctgcccctaatattcagactggccgccccttggtgctgagttccagagcaacgcctgttcagctacccagccccccttgtaccagctcaccagtggtaccgtcccatccccctgtccagcaggtaaaggaactaaaccccgacgaggcatcccctcaggtgaatacatcagcagaccagaatacgctcccgtcctcccagagcaccacaatggtctcccccctgttaactaatagtcccggatcctccgggaatagacggtcacccgtgtccagttctaaggggaagggcaaggtcgataagattggacaaattcttctcactaaggcctgcaagaaagtgaccgggtccctggaaaagggtgaagagcagtacggagccgacggggagactgaggggcagggtttagataccactgcccctggcttaatgggaaccgaacaactaagcaccgaattggactcaaaaactccaaccccccctgccccaaccctcctgaagatgacctcgagcccagtgggcccgggcactgcctccgcaggacctagtctgccaggaggagcactgcctactagcgtgcgatcgattgtgactacattagttccttccgaactcatctccgccgtgccaactacgaagagcaaccatgggggaatcgcatctgaaagtcttgccggagggctagtggaagaaaaagtggggtctcatccggagttgctgccttccatcgccccctctcagaacctggtgagcaaggaaacatctactaccgccttgcaagcttccgtagccaggccagaattggaagtgaatgccgcaattgtaagcggccagtcatctgaaccaaaagagatcgtggaaaagagcaaaatccctggccgaaggaactctagaaccgaggagcctaccgttgcatccgaaagtgtggaaaacggtcacagaaagcggtccagtcgacccgcatccgcctcttcatccaccaaagatatcacttctgccgttcagtctaagcgccggaaaagcaagtag

SEQ ID NO: 197707 - DNA, 6192 bp, synthetic construct
  misc_feature 1..6192: note = Description of Artificial Sequence: Synthetic coding sequence
  source 1..6192: mol_type = other DNA
atggtgctggacgacctgcccaacctggaggacatctacaccagcctttgttcatctactatggaggactctgaaatggactttgattcaggcctggaggacgacgacacaaagtctgattcaattctcgaagacagcaccatattcgtggcattcaaaggcaacattgacgataaagactttaaatggaaattggatgcaatcttaaaaaacgtacctaacctactgcatatggagtccagcaagctgaaggtccagaaggtggaaccgtggaactctgttagagtcacttttaacatccctcgagaagccgctgaaagactgagaattctggcccaatccaataaccaacaacttagagacctgggcatcctaagtgtgcaaattgaaggggagggggcaatcaacctcgcactcgcccagaacagatcccaggatgtccgaatgaatgggccaatgggcgcaggaaacagtgtgagaatggaagcagggtttccgatggccagcggaccgggcattattcggatgaataaccctgccaccgttatgatcccacctggaggtaacgtaagcagctcaatgatggcacccggacctaatcccgaattgcagccgcgcacccctaggcctgcttctcagtctgatgctatggacccgctcttatcagggttgcatatccaacagcagtcacatcccagtggctcactcgcccccccacaccatcccatgcagcccgtatcagttaatcgacaaatgaaccctgcaaattttccgcagctacagcaacagcagcagcaacagcagcagcagcagcaacagcaacagcagcagcaacaacagcaacagcaacagcagttgcaggctcgcccacctcagcagcatcagcagcagcagccccagggtattcggccacagtttactgcccctacccaggtgccagtacctcctggctggaatcaacttccctctggagctcttcagcctccgcccgctcaagggtctcttggcaccatgacggctaaccagggttggaagaaagcaccactacctgggccaatgcagcagcaactgcaggcccggccttccctggcaactgtacaaaccccaagccacccacccccaccctatccgtttgggagtcaacaggcttctcaggcacacaccaatttcccacagatgtcaaaccccgggcagttcacagctcctcagatgaaatccctgcaggggggaccctctagggtgcctaccccattgcagcaaccccaccttacaaacaaatcccccgctagttctccttcaagctttcagcagggctcccctgcaagctcccccactgtcaaccagactcagcagcagatggggcctaggccaccccagaacaatcctctgccacagggtttccagcagccagtgagcagccctgggaggaaccctatggttcagcagggtaacgtgcctcccaatttcatggttatgcaacaacagccgccaaatcaaggcccgcagtctctacacccaggattgggtggaatgcctaagagactacctcctggatttagcgcaggccaggcaaatcccaacttcatgcaaggccaggtgccaagcaccacagctaccactcctggaaactccggagcaccccagcttcaagctaaccagaacgttcagcatgcgggcggacaaggtgcaggacccccacagaatcagatgcaggtctcgcatggacctccaaatatgatgcagcccagtctgatgggaatccacggaaacatgaacaaccagcaagctggaacatcaggcgtgccacaggtcaatctctctaatatgcagggccagcctcaacagggaccaccgtctcagcttatgggcatgcaccagcagatcgttccatctcaagggcagatggttcagcagcagggcacactcaacccccagaacccaatgatcctgtcccgggcacagctcatgcctcaggggcagatgatggtgaatcctccgagtcaaaatctaggtccctcgcctcaacgtatgactccgccgaagcagatgttgtcccagcaagggccgcaaatgatggccccgcacaaccagatgatgggacctcaggggcaggtactgctgcagcagaatccaatgatagagcagataatgacgaatcagatgcagggaaataaacagcaattcaatacccagaatcaaagcaatgtgatgccggggcccgcccaaatcatgcgaggacccacccctaatatgcagggcaatatggtgcagttcactggccaaatgtcaggccagatgctgccgcagcagggccccgttaataattcaccttcccaggtcatgggcatccagggacaggtactacgcccaccaggtccctcacctcatatggcgcaacagcatggggaccctgctacgactgccaacaatgacgtgtctttgagccaaatgatgcctgacgtgagcatccagcaaaccaacatggtaccgccacacgtgcaagctatgcagggaaacagtgcctccggcaatcacttctcagggcatggcatgagctttaatgcaccatttagtggtgctcccaatgggaatcagatgtcatgtggtcagaaccccggcttccccgtcaataaggatgtgacactgactagtcctttgctcgtgaacctactccagtccgacatctccgcagggcatttcggtgtaaataataagcagaacaacacaaatgccaacaaaccaaagaagaagaaaccgccgcgcaaaaagaaaaattctcagcaggatctgaataccccagacaccagacctgccgggctggaagaggccgatcagcctcctttgcctggagaacaaggtatcaacttggacaattcaggcccaaaactacctgagttctcaaacagacctcccggctacccaagtcagccagtggagcagcggccccttcagcagatgcccccccaactcatgcaacatgtggcaccgcctcctcagccacctcagcagcagccccagcctcagctgccgcaacaacaacagccaccacccccaagtcagccacagtctcaacagcagcagcagcagcagcagcagatgatgatgatgttaatgatgcagcaggacccaaaaagtgtgaggttgccagtgtctcagaacgtccatccaccccgaggacctttgaatccggattcacagcggatgccgatgcaacagtctgggtcagttcctgtgatggtgtccctccaaggacccgccagcgtccccccatctcctgataagcagaggatgccgatgcccgtcaatacccccctgggtagcaacagtaggaaaatggtgtaccaggaatcaccgcagaacccctcctccagcccactggcagaaatggcttctcttccggaagcttcgggcagcgaggcacctagcgtgcccggcgggcctaataatatgccaagtcacgtagtgctgcctcagaaccagctgatgatgaccggaccaaaaccgggtcctagcccattatcagctacgcagggggcaacccctcagcagccccctgtgaatagccttccatcaagccacggtcatcattttccaaatgtggccgcgcccactcaaacgagtaggcccaagacacctaatcgagccagtcccagaccatactaccctcagacccctaacaacagaccaccctccaccgaaccttctgagatctccctgagccccgaaagactaaacgccagcatagccggactgttcccacctcaaattaacattccactgccccccagaccaaacttgaacagagggttcgatcaacaaggattgaatccgaccactctgaaggccataggacaggcaccgtccaacctgacaatgaaccccagtaactttgcaaccccacagacccataagctggactcggtggttgtcaattctggcaaacagtctaattctggcgctactaagcgggcctcaccgtccaattctcggagatctagccccggatcttctcggaagaccactccctcacctggccggcaaaattcaaaggcacctaaactgactttggccagtcagaccaacgctgcactgctccagaatgtggaacttcctaggaatgtgctcgtctctcccactcccctagctaacccacccgtaccagggtcattcccgaataacagcggactcaatcctcagaacagcacagtgtctgtcgcagccgtggggggggtcgtcgaagataacaaggaatcacttaatgtgcctcaggacagcgactgccagaacagtcagagccggaaagagcaggttaatattgaactgaaggccgtcccggcacaggaggtaaagatggtggtccctgaggatcagagcaaaaaagacggccagccctctgaccccaacaaattacccagcgtagaagaaaataaaaacctggtgagcccagccatgcgcgaagccccaacttctcttagtcaactattggacaactctggggctcccaatgtcacaatcaaacccccgggccttaccgacttggaagttaccccgccggtggtgagcggagaagatctaaaaaaagcctccgttatacctaccctgcaagatttgagtagctcaaaagaaccaagcaactccttaaatcttccacattcgaatgaactttgctctagtttagtccatcctgaactcagcgaagtgtcatctaacgtggccccatccattcccccagtcatgtccaggcctgtttcttcctcgtccataagcacccccctgccgccaaatcagatcacagtgtttgtgacctcaaaccctattactacaagtgcgaatactagcgctgccctaccaactcatctgcagtccgctctcatgagcaccgttgtgactatgcccaatgctggctcaaaagtgatggtgtccgagggccagagtgccgctcaatcaaacgcacggccacaattcatcacaccggtgtttatcaactccagctcaataattcaagtaatgaagggatcccagccttctactatccccgctgccccactgaccaccaactccgggcttatgccccctagcgtggccgttgtggggcccctgcacataccccagaacatcaaattctcgtccgcaccagtgcccccaaatgcactttcaagtagcccggccccaaatattcaaactggccgcccgcttgtcttatcctctagggccacgcccgtacagctcccaagtcctccttgtacttcatcccctgtcgttcctagtcacccccccgtacagcaagtgaaggaactgaatcctgacgaggcatcccctcaagttaacacaagcgctgatcaaaatactcttccttccagtcagagcactacgatggtgagccctctgcttaccaattcaccaggaagtagcggcaacaggaggtctcctgtcagcagttccaaaggaaagggaaaggtggataagatcggtcagattctgttgactaaggcctgcaagaaggtgactggcagcttggaaaaaggagaggagcagtacggcgcagatggggaaacagaaggccaaggcttggacaccaccgcccccggccttatgggtaccgagcagctgagtacagagttggacagcaagacacctactcctccagcgcctaccctcctgaagatgacctcttctcctgtgggccccgggacggcctcggctggcccttcactgcctggaggcgcactcccaacttccgttaggtctatcgtcacgaccttggtgccttcagagcttatctccgctgtccccacaaccaagtcaaatcatggaggaatcgcctccgagtccttggcaggtggcctggtagaagagaaggtgggcagccatcctgaactactgcccagtatcgctcctagccagaacctggtgtccaaggaaactagtacgacagcattacaggctagtgtcgcgaggcccgagttggaagtcaatgccgccatcgtcagcggacagagcagcgaacccaaagaaattgtggaaaaaagtaagattccagggagaagaaatagccgtaccgaagagcccacagtcgcatccgaaagcgttgagaacgggcataggaaaagatcctcacgacctgcctcagcaagctccagtacaaaagacatcaccagtgcagtgcaatcgaagagaagaaagagcaaatag

SEQ ID NO: 197708 - DNA, 1086 bp, synthetic construct
  misc_feature 1..1086: note = Description of Artificial Sequence: Synthetic coding sequence
  source 1..1086: mol_type = other DNA
atggtgctggacgacctgcccaacctggaggacatctacaccagcttatgtagttctacaatggaggacagcgaaatggattttgatagtggtctggaggacgacgatacaaaatccgatagtatcttggaagactcaacaatttttgtggcctttaaagggaatatagatgataaggattttaagtggaagctcgatgcgattttgaaaaatgtgcctaacctcctgcacatggaatcgtcaaagcttaaggtgcagaaagttgaaccttggaatagcgttcgcgtgacatttaacatccctcgcgaagcagcagaaaggttaagaatcctggctcaatccaataaccaacagctgcgagatctggggatcctgtccgttcaaatcgaaggagaaggtgccatcaatctggcacttgcacagaatcgttcacaagacgtgaggatgaatggacctatgggagccggaaattctgttcgcatggaagcaggatttccaatggcttccggtcctgacgcaatggaccccctgttgtccggcctgcacatccaacagcaaagccacccctcggggtccctggctcccccccatcaccccatgcagccagtttccgtgaacagacaaatgaacccagcaaatttccctcagctccagcagcagcaacagcagcaacagcaacagcagcaacaacaacagcaacagcagcaacagcagcaacagcaacaacttcaggcccggcctccgcagcagcaccaacagcagcagccacaaggtattcggccccagttcaccgcccctacacaagtgcccgtgccacccggctggaatcagctcccaagcggagccctccagccccctccagctcagggcagcctcggcacaatgaccgcaaatcagggctggaaaaaagcacctctgcccgggccaatgcagcagcaacttcaggcgcgccctagcctggcaaccgttcagactccatctcaccctccgcccccttacccttttgggagtcagcaggcctcccaggcccacaccaatttcccacagatgagcaatccagggcagttcacggcgccccagatgtag

SEQ ID NO: 197709 - DNA, 549 bp, synthetic construct
  misc_feature 1..549: note = Description of Artificial Sequence: Synthetic coding sequence
  source 1..549: mol_type = other DNA
atggccgaggagcaggtgaaccggagcgccggcctggcccccgactgtgaggccagcgcaactgccgagaccaccgtgagcagtgtggggacttgcgaggccgcaggaaagtctccagagcccaaggattacgactccacatgtgttttttgtcggatcgcagggaggcaagaccccggtaccgagttactgcattgtgagaacgaagatcttatatgcttcaaagacataaagcctgcggcaacgcaccactatctggtcgttcctaaaaagcatatcggtaactgccgcacgttgaggaaggaccaggtggagctagtggagaatatggtcaccgtcggcaaaacaatactcgagcgcaacaattttactgacttcactaacgttcggatgggtttccacatgccccccttctgctcaatctcacacctgcaccttcacgtcctggcgcctgtagaccagctgggatttctttccaagctggtctaccgggtaaatagttactggttcataacagctgaccacctaatcgagaagctccggacatag

SEQ ID NO: 197710 - DNA, 552 bp, synthetic construct
  misc_feature 1..552: note = Description of Artificial Sequence: Synthetic coding sequence
  source 1..552: mol_type = other DNA
atgggcgccgcccacagcgtgtgggaggtggaccacctgtacaccttttttgtgcaatggtccccagacgtttacggtaaggacgcaaaggaacagggctttgtggttgtggagaaggaggagttgaatatgatagataattttttctctgagcccacaacaaaatcctgggagatcatcaccgtggaggaggctaagcgcaggaagagtacctgctcatattacgaagatgaggacgaggaagtgttacccgtgctgcgtccacatagtgcactgcttgaaaatatgcatattgagcagctcgcccggcggctgcccgctcgggtgcagggctacccatggcgcctggcctattctaccctggagcacggtacctcactgaagacactgtaccgaaagtctgcttcactggacagtcctgtgcttctggtcataaaggacatggataatcaaatcttcggtgcctacgcaacacatccattcaaattctctgaccattattacgggaccggcgagacgtttctttatactttcagcccacattttaagtag

SEQ ID NO: 197711 - DNA, 2829 bp, synthetic construct
  misc_feature 1..2829: note = Description of Artificial Sequence: Synthetic coding sequence
  source 1..2829: mol_type = other DNA
atggacaccaaggaggagaagaaggagcggaagcagagctacttcgcacgactgaaaaagaaaaagcaagcaaagcagaacgctgagaccgccagcgctgtggccacgaggactcatactggtaaggaggataacaataccgtggttctagagcccgacaagtgcaacatcgccgtggaggaagagtatatgacagacgagaaaaagaagcggaagagtaaccagctgaaggagatcaggaggactgagttgaagagatactattccattgacgacaaccagaacaaaacacatgacaagaaggaaaagaagatggtcgtccagaagccacacggcaccatggaatatacggcaggtaatcaggatacactgaacagcattgcgctgaagtttaatataactcccaataaactggtggagttgaataaactgttcacacacactatagttcccggccaagtgctttttgtcccagacgccaacagcccctcttctactctgaggctctcttcctcctcccctggtgccaccgtctcccctagcagctcggacgcagagtatgataaactacccgatgctgatctggctcgtaaggccctgaagcctatcgaaagagtcctttcctccaccagcgaagaagatgagcctggggtggttaagtttctgaaaatgaattgcagatacttcacagacggaaagggagtggtgggaggggtaatgatagtgactcccaacaatattatgttcgaccctcacaaatctgatccgctggtgatagaaaatggatgcgaagagtacggactgatctgtcccatggaagaggtggttagtatagccctgtacaatgacatttctcatatgaagattaaagacgccctcccctccgacctaccacaggatctgtgtccactttaccgcccaggggaatgggaggatctggctagcgagaaggatattaaccccttctcgaagttcaaaagcatcaataaggagaaacgtcaacagaatggggaaaagatcatgacgtctgacagccgacccattgtaccactcgaaaagagtaccgggcacactccgactaagcctagcgggtcctccgtgagcgagaagttgaaaaaactagattctagccgagagaccagtcatgggagtcctacagtgactaagctctccaaagagccatctgatacgagtagcgcttttgagtccaccgctaaggagaacttcctaggagaagatgatgatttcgtggatttggaggaattaagttctcagacaggcggtgggatgcacaagaaggacactctcaaggaatgcctctcgctggacccagaggaacgcaaaaaggcggaatctcagatcaacaacagcgccgtggagatgcaggtgcagtcagccctagctttcctgggtacagagaatgacgttgagttaaaaggcgccttggacctggagacttgtgagaagcaggatatcatgcctgaggtggataagcagtcaggctccccagagtctagggtggaaaatacactcaatatccacgaagatttggataaggtcaagctgattgaatactacctcaccaagaataaggaagggccccaggtatccgagaacctgcagaagacagagctcagtgacggaaaatcaatcgaaccgggtgggatagacatcactctctcaagctctctgtctcaggctggagatccaatcacggagggtaacaaggaacctgacaagacttgggttaagaagggcgagcctctccccgtgaaactaaacagcagcactgaggccaatgtcatcaaagaagcacttgactcatcactcgagagtaccctcgataactcctgccaaggtgctcagatggataataagtccgaggtacagctctggctgctgaagcgcatccaagtccccattgaagatatcctgcctagcaaagaggaaaaaagcaaaaccccgccaatgttcctatgcatcaaggtgggaaagcccatgagaaaaagttttgctacccacacggctgccatggttcaacagtatgggaagcgccggaagcagcctgaatattggtttgccgtaccccgtgagagagtggaccatttgtacacgttcttcgtgcagtggtccccagatgtctacggcaaggatgccaaagaacaggggttcgtggtggttgagaaggaggagctgaatatgattgacaactttttctccgaacccaccaccaagtcatgggagataatcaccgtggaggaggccaagcggcgaaaatccacctgctcctactatgaggatgaggatgaagaggtgcttccagtccttcgacctcactctgcattattggaaaacatgcacatcgagcagctggcacggcggttgcctgctcgtgttcagggatatccatggaggctggcttactctacactggagcacggcacaagcctcaagaccttgtacagaaaaagtgcaagtctcgattcccccgtcttgttggtgattaaagatatggataaccagatttttggcgcatatgccactcacccattcaagtttagtgatcactactatggcactggcgaaacattcctgtatacgttctctccgcacttcaaagtgtttaagtggtctggggaaaactcgtactttataaatggtgacatttcctcgttggagttgggaggtggcggcggaagattcggcctttggctcgacgcggatctataccatggccgatccaatagttgcagcacctttaacaatgacatcctgagcaaaaaagaggactttatcgtacaggacctcgaagtttgggctttcgattag

SEQ ID NO: 197712 - DNA, 2829 bp, synthetic construct
  misc_feature 1..2829: note = Description of Artificial Sequence: Synthetic coding sequence
  source 1..2829: mol_type = other DNA
atggacaccaaggaggagaagaaggagcggaagcagagctacttcgcccggctcaagaagaagaagcaggcgaagcagaacgcggagacagcatctgcggtggcgacccgcacacatactggcaaggaagacaacaacaccgtcgtcttggagcctgataaatgtaatatcgcagtagaggaagaatacatgaccgacgagaaaaagaagcgaaagtctaaccagctcaaggaaatcagacgaaccgaacttaagagatactacagtatagacgacaatcagaataaaactcatgacaaaaaggaaaaaaaaatggtcgtacagaaaccacacggcactatggagtacactgctggcaaccaggacaccctgaactccatcgcacttaaattcaacataacccctaacaaactggtggaactgaataagctttttactcacacaattgtacccgggcaagtcctgttcgttccagacgccaatagcccctcctccactctgcgcctgagcagctcatccccaggcgccacagtgtctcctagctctagtgacgcggagtatgacaaactcccagatgccgacctcgcccgaaaagcgctcaagcctatcgagcgggtactatcgagtacctcagaggaagacgagcctggtgtagtgaagttcctgaaaatgaactgtcgctacttcactgatgggaagggagtcgtaggcggagtgatgatagtcacccctaataacattatgttcgatccccacaagtcagacccactcgttatagaaaatggatgtgaagaatacggcctgatctgcccaatggaggaagttgtgtccattgctttgtacaacgacatttctcacatgaaaatcaaagacgcactgccgagcgacctccctcaggatctgtgtccactctacagacccggcgagtgggaggaccttgctagtgagaaggacatcaatcctttcagcaagtttaaatctatcaataaagagaagcgacagcagaatggagagaaaataatgactagcgactcgcggccaatcgtaccccttgaaaaaagcacaggacatacacctacaaagcctagtgggtcctcagtctcagaaaagttaaaaaaactggatagttcccgggagacttcccatgggtcacctactgtgactaagctgtccaaagagccctctgacacatctagcgcctttgagtccacggccaaggaaaattttctgggtgaggacgatgacttcgttgacttagaagagttgtcatcccaaacaggaggcgggatgcataagaaagacactttaaaggagtgtctgtctttggatcccgaagaacgaaagaaagcagagtcccagatcaataatagtgcagttgagatgcaggtccaatccgcccttgctttcctgggcaccgagaatgacgttgaacttaaaggcgcgctcgatttagaaacttgcgagaaacaggacatcatgccagaagtagacaagcaatcaggttcacctgagagtcgagtcgagaacaccctaaatatccatgaagacctcgacaaggtcaaattgattgagtactacctgacaaagaacaaagaaggcccgcaggtatcagagaatctccagaagaccgagctgtccgacggcaagagcatcgagcctggcggaatcgatatcactctgtcttcctccctaagccaagcgggagaccccatcaccgaagggaataaggagccagataaaacctgggtgaaaaagggggagcccctgccagttaaactgaactcttccaccgaagcgaatgtgattaaagaggcgctggattcatctctggaatccacccttgataattcctgtcaaggtgcccagatggataacaaatctgaggttcaattatggttactgaagcgcatccaggtaccgatcgaggacattctgccatctaaagaggaaaagagcaagacccccccaatgttcctttgtatcaaggtgggtaagccaatgagaaaaagcttcgccacgcacaccgcagcgatggtgcagcagtatggaaagaggagaaagcagccggagtactggttcgctgtcccaagagaaagagtggaccatctctataccttttttgtccagtggtctccggatgtgtatgggaaagacgccaaggaacagggattcgtggttgtcgagaaagaggagctgaacatgatcgacaactttttcagcgagccaactacgaagtcttgggagattattactgtggaagaggccaagcgacgtaaatccacttgcagctactacgaggacgaggatgaagaggtactacccgtgctcaggcctcatagtgcccttctcgaaaatatgcacatcgaacagttagctcggcgccttccagctcgtgtgcagggctatccctggcgcttggcttactccacgttggaacacgggacttctcttaagaccctgtacagaaaaagcgcctccctcgattcccccgtcctgctcgtgattaaggacatggacaaccagatcttcggcgcctatgcaacacacccttttaagttttcggatcattactacggcaccggtgaaacatttctgtacaccttttccccacacttcaaggtattcaagtggtcaggggagaactcgtactttataaacggggatataagctctctagaattggggggaggcggtggtcgctttgggttgtggcttgacgcagacctctatcatgggaggtctaatagttgctcgacttttaataacgatattctctccaagaaggaagatttcatcgtgcaggacctagaggtatgggccttcgactag

SEQ ID NO: 197713 - DNA, 1323 bp, synthetic construct
  misc_feature 1..1323: note = Description of Artificial Sequence: Synthetic coding sequence
  source 1..1323: mol_type = other DNA
gacgccgacctggcccggaaggccctgaagcccatcgagcgggtgctctcatctacatccgaagaggatgagccaggcgtggttaaatttctcaagatgaactgcaggtactttactgacggcaagggagtggtcggcggagtgatgatcgtgacacctaacaacatcatgttcgatccacacaaatccgatcccctggtgatcgaaaatggctgcgaggagtatggattgatctgtcctatggaagaagtggtctccattgcgctttacaatgacatcagccacatgaagataaaggatgcactgccaagccctggggaatgggaggacctcgccagtgagaaagacattaatccgttctcaaagttcaagtctatcaacaaggagaagagacagcaaaacggcgagaagattatgacttccgattcccggcccattgtccccctagaaaaaagcacaggtcatacacccaccaagccttctggaagtagtgtttccgagaagttgaagaaattggactcatcccgcgagacgagtcatggctcccctactgtgaccaagctatccaaggagccatctgatacaagtagcgccttcgagagcactgccaaggaaaactttctgggcgaagacgacgattttgttgatctggaggagctatccagccagactggcggcgggatgcataaaaaagataccctaaaagagtgtttgtctctagaccctgaggagcggaaaaaggccgaatcacagatcaacaattccgccgtagagatgcaggtccaatccgcactggccttccttggcaccgaaaatgatgtagagctgaagggggctctggacctggaaacgtgcgagaagcaggacatcatgcccgaagtggacaaacagagcggcagccccgagtcacgcgtggaaaatactctgaatatccatgaggatctggataaggtgaaactaatcgagtactatctcacaaagaataaagaaggcccacaggtaagcgagaatctccaaaagactgaactcagtgacggaaaaagcatcgagcctgggggcattgacataacattgtcgtccagtttgtcccaggccggcgatcctatcacagaaggcaataaggagcccgacaagacatgggtcaagaagggtgaaccactaccggtgaaactaaattctagtacagaggctaatgtaattaaggaggccctagattctagcctggaaagtacactggataactcctgccagggcgcccaaatggacaacaaaagcgaggtacagctctggctactgaagcgtatccaagtgcctatagaatag

SEQ ID NO: 197714 - DNA, 576 bp, synthetic construct
  misc_feature 1..576: note = Description of Artificial Sequence: Synthetic coding sequence
  source 1..576: mol_type = other DNA
atggacaccaaggaggagaagaaggagcggaagcagagctacttcgccagactgaagaagaagaaacaggcaaaacagaacgcggagacagcgagcgctgtggctacacggacgcacactggaaaggaagataataatacagttgtgcttgagccggataaatgcaacatcgccgtcgaagaggagtacatgactgacgagaagaagaagcgtaaaagcaaccaactgaaggagatcaggcgtaccgaattgaagcgatactacagcatcgatgacaaccagaacaagactcacgataagaaggagaagaaaatggtggtgcaaaaaccccacggtaccatggaatataccgccgggaaccaagatacacttaacagtatcgccttaaagtttaatatcacacctaacaaactggttgagttgaataagttatttacgcatacaatagtgcccggtcaggtgctctttgtccctgatgccaattcgcccagctccacactgagactctcaagctctagtcccggcgcaacagtctccccctcgagttcggacgccgagtacgacaagctgccgtag

SEQ ID NO: 197715 - DNA, 354 bp, synthetic construct
  misc_feature 1..354: note = Description of Artificial Sequence: Synthetic coding sequence
  source 1..354: mol_type = other DNA
atggacaccaaggaggagaagaaggagcggaagcagagctacttcgcccgcctgaaaaagaaaaaacaagccaaacagaacgcggagaccgccagcgcagttgcaacacgaactcatactgggaaagaggacaataacaccgttgtcttggagcctgataagtgcaacatagctgtcgaggaggaatatatgaccgacgagaagaaaaagcgaaaatctaaccagctgaaggagatcaggaggactgagcttaaacgctattactcgatcgatgataaccagaacaagacccatgacaaaaaagagaagaagatggttgtccagaaaccacacggaactatggagtacacttag

SEQ ID NO: 197716 - DNA, 273 bp, synthetic construct
  misc_feature 1..273: note = Description of Artificial Sequence: Synthetic coding sequence
  source 1..273: mol_type = other DNA
atggacaccaaggaggagaagaaggagcggaagcagagctacttcgcccggctcaagaaaaagaagcaggctaaacagaacgccgaaaccgcctccgctgtggctaccaggacccacacgggaaaggaagataataataccgtcgtactggagcctgataagtgcaacatcgccgttgaagaggagtacatgacagacgagaaaaagaagcgcaagtcgaatcaactgaaagaaatacgaagaacggaactcaaacgctattatagcatctag

SEQ ID NO: 197717 - DNA, 273 bp, synthetic construct
  misc_feature 1..273: note = Description of Artificial Sequence: Synthetic coding sequence
  source 1..273: mol_type = other DNA
atggacaccaaggaggagaagaaggagcggaagcagagctacttcgccaggttgaaaaaaaaaaagcaggctaagcaaaacgcagagaccgcgtctgctgtagccaccagaacccacaccggtaaggaggacaataatactgttgtgctagaaccggacaagtgtaatatcgccgtcgaagaagaatatatgactgacgaaaaaaagaaacggaaatctaatcaactgaaagagattagacggaccgagttgaagaggtactatagtatctag

SEQ ID NO: 197718 - DNA, 552 bp, synthetic construct
  misc_feature 1..552: note = Description of Artificial Sequence: Synthetic coding sequence
  source 1..552: mol_type = other DNA
atgggcgccgcccacagcgtgtgggaggtggaccacctgtacaccttcttcgtacagtggtcgccagatgtgtacggcaaggacgccaaagagcaagggtttgtggtggtggaaaaggaggaactgaacatgattgacaacttcttttccgaacccactacgaagtcgtgggaaattatcaccgtggaggaggcaaagaggcggaagtcgacttgctcttattatgaggatgaagacgaggaggtacttccggtactgagaccccacagtgccctgttggaaaacatgcacatcgaacagctggctcgccgtctgcccgcccgtgtgcaaggttacccctggcgcctcgcctatagcacactggagcacggtacctccctgaagacgctgtatcgaaaaagtgctagcctcgactctcctgtgctccttgtgatcaaggacatggataatcaaatcttcggcgcgtatgctactcatcccttcaaattttctgaccattactatggaaccggagagaccttcctatacaccttttccccccacttcaagtag

SEQ ID NO: 197719 - DNA, 714 bp, synthetic construct
  misc_feature 1..714: note = Description of Artificial Sequence: Synthetic coding sequence
  source 1..714: mol_type = other DNA
tgagagaagacctgcagcagcctggagcgggagccccacttcagcttactgaccatgcgaggtcagcggctgcctctagatatccagatcttttactgcgcaaggccagatgaggaacctttcgtcaaaataattacagtggaggaggcaaagaggagaaagtcaacctgcagttactacgaggacgaagacgaagaggtgcttcctgtgttgcgcccccactccgccttgttggagaatatgcatatagaacaacttgcccggcgtctcccagccagggtccaaggttacccatggcggttggcatactctacactggagcacggcacgtccctcaagaccttatacaggaaaagcgccagcctcgattcacccgtccttctcgtgattaaggacatggataaccagatctttggggcatacgcaacacacccctttaaattctccgaccactattacggaacaggcgaaacttttctgtacactttcagcccacatttcaaggtgttcaaatggtccggagaaaacagctactttattaacggagacatctctagtctggagctagggggcggtggtggaaggtttgggctgtggctcgatgctgacttgtatcatggtcggagcaactcctgctctacgtttaacaatgatattctaagcaagaaggaggacttcatcgtccaggacctggaagtgtgggcatttgactag

SEQ ID NO: 197720 - DNA, 534 bp, synthetic construct
  misc_feature 1..534: note = Description of Artificial Sequence: Synthetic coding sequence
  source 1..534: mol_type = other DNA
tgagagaagacctgcagcagcctggagcgggagccccacttcagcctattaactatgcggggccagagactccctctggacatccagatcttttactgcgcgagacccgatgaagagcccttcgtcaagatcataactgtggaggaggccaaacgacgaaagtccacatgcagttactatgaggacgaggatgaggaagtgttgcccgtactgcggccacacagtgctctgcttgagaatatgcacattgaacagttagcccgccgactgcccgctcgtgtacaggggtatccctggagactggcttattctacactggaacacgggacaagcctcaaaacactgtacagaaaaagtgccagccttgactcaccggtgttgttggttataaaggacatggacaatcaaatcttcggggcttacgccactcacccattcaaattcagcgatcactattacggcacaggcgagacctttttgtatactttttctcctcactttaagggcacgatctggtttatggcacgctgctag

SEQ ID NO: 197721 - DNA, 573 bp, synthetic construct
  misc_feature 1..573: note = Description of Artificial Sequence: Synthetic coding sequence
  source 1..573: mol_type = other DNA
tgagagaagacctgcagcagcctggagcgggagccccacttcagcctcttgaccatgcgcgggcagcgactgcccctagatattcagatcttctattgcgcccgacctgacgaagagcccttcgtgaagatcattactgtggaagaagccaagcgcagaaaatccacctgcagttactatgaggatgaggacgaagaagttctgccagtcctgagaccccactctgcacttttggaaaatatgcatatcgagcagctggcacgccgtctgcccgcacgtgtgcagggctatccgtggcgcctcgcttattctacactagagcatggcacttcactgaagaccctgtatcgcaagtccgcttctctcgattctccggtgctgcttgtaataaaagatatggacaatcagatctttggagcatatgcaacccaccccttcaagttctcagatcattattatggaacaggagagacttttctttatacgttctccccccacttcaaatggtccggggaaaacagttactttattaacggggatattagttcattggagctgggcggcggcggttag

SEQ ID NO: 197722 - DNA, 273 bp, synthetic construct
  misc_feature 1..273: note = Description of Artificial Sequence: Synthetic coding sequence
  source 1..273: mol_type = other DNA
atggacaccaaggaggagaagaaggagcggaagcagagctacttcgctagactgaagaaaaagaaacaagcaaagcaaaacgctgaaacagccagtgcagttgcaaccagaacgcataccgggaaagaggataataataccgttgttctggaaccggacaaatgtaatatagcggttgaggaagaatacatgactgacgagaagaagaagcggaaatcaaatcaactgaaggagattcgtagaacagagctcaagaggtactattctatttag

SEQ ID NO: 197723 - DNA, 7566 bp, synthetic construct
  misc_feature 1..7566: note = Description of Artificial Sequence: Synthetic coding sequence
  source 1..7566: mol_type = other DNA
atgagcggcagcacccagcccgtggcccagacctggcgggccaccgaacctcgctatcctccacactccctgtcttatcccgttcaaatcgcaaggacccacacagatgttgggttgctcgagtatcagcaccacagtcgcgattacgcgtctcacctgtcacctggatcaatcatacaaccgcagcgccgaagaccgagcctcctgtccgagtttcagccaggaaacgagaggagccaggagttacatcttaggcctgaatctcacagctacctccccgaactcggcaaatctgagatggaattcatcgagagtaagaggccacgactggagttgctgcccgatcccttgctgcgcccaagtccgctcctggctacggggcagccagctggctccgaggatctcactaaagaccgtagcctcaccggtaagctggaacctgtaagccccccctctcccccccataccgaccccgagctcgaacttgtgccccctcgcctttcaaaggaagagctgatccaaaacatggacagggttgacagagagataacgatggtggaacaacagatcagcaagttgaagaaaaaacagcagcagctggaagaggaggccgcgaagcctcccgagccggagaagccagtctcgccgcccccaatagaatctaaacatcgttcactggttcagattatttatgacgagaacaggaagaaggccgaagccgcccatagaatcttggagggcttgggcccccaggttgaactgcccctttataaccagcctagtgatacccgacaatatcatgaaaacataaagatcaaccaggctatgcgcaagaaattgatcctctatttcaagagaagaaaccatgcaagaaaacagtgggagcagaagttctgccagcggtacgaccaactgatggaagcatgggaaaagaaggtggaaagaatcgagaacaatccacgtagaagggccaaagaatcgaaggtacgagagtactatgaaaagcagtttccagaaataagaaagcagagagagctccaggaacggatgcagtctcgggtgggccagcggggatccggcttatcaatgtcagccgctaggtccgagcacgaggtctcggaaatcatcgacgggctatccgaacaggagaacctggagaaacagatgcggcagcttgcagtcatacctcctatgctctacgacgctgatcagcagaggatcaaattcatcaacatgaatgggctcatggctgatccaatgaaggtctacaaggacaggcaggtgatgaatatgtggtcagagcaggaaaaagagacttttagagagaagttcatgcagcacccaaaaaacttcggtctgattgcaagcttcttggaacgcaagacagtggctgaatgtgttctctattattacctcaccaaaaaaaatgagaattataagtccctggtccgtagatcttaccgacggcggggcaagtcgcagcagcagcagcagcagcagcagcagcagcaacaacaacagcagcagcagccaatgccacgatcttcccaggaagaaaaagacgagaaggaaaaggaaaaagaggctgaaaaagaggaggagaagcctgaagttgagaatgacaaagaggatctgttgaaggagaagaccgatgataccagcggggaggataatgatgagaaggaagctgtggccagcaagggcaggaagaccgctaattctcaggggcggaggaagggcagaatcaccagatcgatggcaaatgaagcaaatagcgaggaagccataactccacagcaaagtgcagagctcgcatcaatggagctcaatgaatcttcaagatggacggaagaagaaatggaaacagcaaaaaaggggctgttagagcatgggcggaattggagcgcaatcgcccggatggttgggtccaagacagtctcgcaatgcaaaaacttctacttcaactacaaaaagcgccagaacctggatgagatcctgcagcagcacaagcttaagatggagaaagagcgcaacgcccgacgtaagaagaagaaggcccccgccgccgcgtctgaagaggcagcctttccaccagtggtggaggatgaagagatggaagccagtggagtgagtgggaatgaagaagagatggtggaggaggctgaagcgttacatgcgagcggcaatgaggtcccccggggtgagtgttcaggcccagctactgtgaataacagcagcgacaccgaaagcataccaagcccacacaccgaggccgctaaagacacaggtcagaatgggcccaagcctccagccacccttggggccgacgggcccccacctggccctccaacaccgccacccgaggatatccctgcccctactgaaccaaccccagcaagcgaggctaccggggccccaaccccccctcccgctcccccatcgccttctgcccccccgccggttgtccctaaggaagagaaggaagaggagaccgcagctgcgccgccagttgaagagggcgaagaacaaaagccacctgccgcagaggagctggcggtcgatactgggaaagcggaagagccggtgaagtccgagtgcacggaagaagccgaggaaggtccggcgaaaggcaaggatgccgaagcagccgaggccaccgctgaaggcgctcttaaggccgagaagaaagaggggggctctggaagggccacaactgcaaagagcagcggggcacctcaggattccgacagctcagccacctgttccgctgatgaagtggacgaagctgaaggcggcgacaagaataggttactgtcacctcggccctcgttgcttactccgacgggggacccaagggctaacgcctccccacagaaaccactggatcttaagcagcttaagcagcgtgccgccgccatcccccccatagttaccaaagtgcacgaaccacctcgagaagacgcagctccaacaaaacccgcacctcctgcacctccgcctccacagaatctgcagccggaatctgacgctcctcagcagccagggtcctccccaaggggtaagagtcggagccccgccccacctgcagataaagaggccgaaaagcctgtttttttcccagctttcgcagctgaggctcagaagctacctggcgaccccccttgctggacatctggcctcccatttccagtcccccccagggaggtcattaaggcttccccccacgcaccggatccaagtgcttttagttacgcacctcctgggcatcccttgcctctcggcctgcatgatacagcccggcccgtcttgccccgtccgcccaccatttcaaaccctcctcctttgatctcgtcagcgaagcacccttccgtcttggaacgccagatcggagccatctctcaaggcatgtccgtacagcttcacgtgccttatagcgagcacgcaaaggctccagttgggccagtgacgatgggactccccctacccatggacccaaagaaattggccccatttagcggcgtcaagcaggaacagctttctccgaggggccaagcaggtccacccgagtccttgggggtgcctactgcccaggaggcttcagtcctccggggcacggctttggggagcgtccctggcggaagtattaccaaagggataccatcaactagggtcccaagcgactcggccataacatatcgaggaagcatcacccatggcactcccgcagacgtgctgtacaagggaaccatcactcgcattattggtgaggactcacctagccgtctggaccgcggcagagaagattctctgcccaagggtcatgttatctacgaaggaaaaaaaggccacgtgctttcctacgaggggggcatgtctgtgacacagtgttccaaggaagacggacggagcagctctggaccccctcacgaaacggctgcgcctaaaagaacctacgacatgatggagggtagagtgggaagggcaatatcctcagcttccatcgagggcctgatgggccgcgcaattccccctgagaggcactccccgcatcatctgaaagagcagcaccatattcgtggtagcataacccagggcattccccggagctacgtggaggcccaggaagactacttgaggcgggaggcaaaactcttaaagagagaaggcacacccccacctcctcccccctccagggatctcaccgaagcgtacaaaacacaggcgctggggcccctgaaactgaagcctgcccatgaggggctggttgccacagtcaaagaagcaggacgctctatccatgagatcccaagagaggaactgagacatacacctgagctgccgttggcgccgcggccactcaaagaaggctccatcacccagggaacgcctttgaagtacgatacaggagcctccactactggttctaagaaacatgacgttaggagtctcatcggctcacccggaagaacctttccgcctgtgcaccccttggatgtgatggcagacgccagagctttagagcgggcttgctatgaggagtccctgaagtcaagaccaggcaccgctagctcttccggaggctccatcgcccggggtgcacccgtgatcgttcccgagctgggtaagccacggcagagtccactgacttacgaggatcacggtgccccttttgctgggcatctgccccgcgggagtcccgtgacgaccagggaaccaactcctagattacaggaaggatcgctctcatcttctaaggcttcacaggataggaaacttacatccacacccagagagatcgcgaagagcccgcattcgacagtgcccgagcatcatccacaccccatctctccttacgaacacttgttgcgcggagtgagcggcgtggacctctacagaagccacataccactggcatttgatcccacatcaattccgaggggcatccccttggacgctgctgctgcttattacctcccccgccatctggcaccaaatcctacgtatccacatctatacccaccctacctgatccgagggtacccagatacagctgccctcgagaacagacagactattattaatgattacataacttctcagcagatgcatcacaatgccgcaactgccatggcccagcgagccgatatgcttcgcggactgtctcccagggagagcagcctcgctctcaattatgcggctgggcccaggggaataatcgacctgagtcaagtccctcatctgcctgtcctggtgccacctacgcctggaacccctgcaactgccatggaccggcttgcctatttacccaccgcaccgcagcctttttctagtaggcacagcagcagtccactctccccaggcggtccgactcacctcacgaagccaacaactacgagtagttccgagcgggagagagaccgagaccgggagagggaccgagacagggaacgcgaaaaaagcattcttaccagcacaactacggtcgaacacgctcccatatggcgaccagggaccgaacaatcaagcggatcgtcagggggcggcggtgggtcatctagccggccagccagccatagtcacgcacatcagcactcccctatatcccctcgcacccaggacgcactgcagcagcgtccatcagtcttacataatacaggaatgaaaggaattatcactgccgtagagcctagtacaccaaccgtccttagaagcacaagcacatcctcccctgtcaggccagcagcaacttttccgccagcgacccactgtcctttaggtgggacgctggatggggtctatcctactttgatggaacctgtgttgctccccaaggaagcccctagagtcgctaggccagagcgccctcgcgccgacaccggtcatgccttcctcgccaagcctccagcccggtccggcttagaaccagcttcctctccgtctaaggggagcgagccccgtcccctggtcccacccgtcagcgggcacgcgaccatcgcgcgaactccagccaagaacttagcaccccatcacgcctcgcccgatccacccgccccacctgcctccgcctcggatccacatcgcgaaaagacccaatccaaaccttttagtattcaagaactggaattacgcagtctcggctaccatgggtcctcttacagtccagagggcgtggagccagtaagccccgtatcctctccaagcctcacgcacgacaaggggttacccaagcacctagaggagctcgataagtcgcaccttgagggagaactgaggccaaagcaacccggaccagttaagctgggcggagaagccgcccaccttccccacctgcgcccactaccggaaagtcagcctagcagcagtcccctcttgcagacagccccaggtgtcaaggggcatcagagggtggtgaccttggcgcagcatatcagcgaggttattacccaggactacactcggcaccatccacagcagctgagcgcacctctcccagctccgttatacagcttcccaggagccagttgtcccgtattggatctgaggcgtcccccatcagacttatatttaccacccccagaccacggcgctccagcaaggggcagtcctcactccgagggtggaaagcggtccccagagcctaacaaaacttcggtgttgggtggaggggaggacggtatagaaccagttagcccgccagagggcatgactgagcccggccactcccgcagcgctgtgtacccactattatacagggatggtgagcagacagaaccgagccggatggggtccaagtcccccggaaacacctctcaacccccggcttttttctctaagcttaccgagagcaactcggctatggtgaagtcaaaaaagcaagaaatcaacaagaagctgaacacccataatagaaacgaacctgaatacaatatttcccagccggggaccgagatcttcaatatgcccgccatcacggggactggacttatgacctacaggagccaggctgtccaggagcacgcctctacaaacatgggtctggaggccattattcgaaaagcactgatgggaaagtacgaccagtgggaggaaagcccacctttgagcgccaatgctttcaatcctctaaatgcctccgctagcctacccgcagctatgccaattacagccgccgatggtcggtctgatcatacactcacaagccccggtggcgggggcaaagctaaagtcagcgggagaccatccagccgcaaagccaagtcacccgctccggggctggcttcaggagaccgtccgcccagcgtctctagtgtgcactcagagggagactgtaatcgccggacccccctgacgaatagagtgtgggaggatcgcccttcaagcgcaggatcaaccccgttcccctacaatccactgatcatgcggttacaggcaggagtgatggcctctccccctccccccggtcttcctgcagggagtggccctttggcaggcccacaccatgcctgggacgaggaacccaaacccctcctttgtagccagtacgaaaccctgagcgatagtgaatag

SEQ ID NO: 197724 - DNA, 7380 bp, synthetic construct
  misc_feature 1..7380: note = Description of Artificial Sequence: Synthetic coding sequence
  source 1..7380: mol_type = other DNA
atgagcggcagcacccagcccgtggcccagacctggcgggccaccgagccccggtatccgccacatagtctgagctaccccgtgcagattgccagaacacacaccgatgtgggcctgctcgagtatcagcaccatagtagagattatgcttcccacctttccccaggatctatcattcagccccagcgaaggaggccttctttgctttccgaatttcagcctggaaacgagcggtcccaggaactacatctgagacctgagagtcactcttacctaccagaactgggtaagtcagagatggaatttatcgaatccaaaagacccaggctcgaattacttcccgatcccttgctgcgacccagtccacttcttgcaacgggccagccggctggttcagaagacctaacaaaagacaggagccttacgggtaagttggaacctgttagccccccttctcctccgcataccgacccagaactcgagctggtgcccccaagactgtccaaggaggagcttattcaaaatatggaccgcgtagacagagaaattacgatggttgagcagcagatatctaagttaaaaaagaaacaacagcagctggaagaggaagccgctaagccccccgagcctgagaagcctgtatccccgccacccatcgaatccaagcaccgaagcctagtgcagattatttatgacgagaataggaagaaggccgaagctgcacaccggatcctcgaaggcctggggcctcaagtggaactccccctgtacaaccagcccagcgatacccgccagtaccacgagaatattaaaattaatcaggccatgagaaagaagttgattttatattttaagagaagaaatcatgcccgaaaacagtgggagcagaaattctgtcaacgttatgaccagctgatggaagcctgggagaagaaggtggagcgaattgagaataacccaaggcgccgagcaaaagagagtaaagttcgtgaatactatgagaagcagttcccggagatccgaaagcagcgagagttacaagagcgcatgcagtcccgggttgggcagcgtggttctggcctcagcatgtcagccgccagatcagagcatgaagtgtccgaaatcatagatggactgtccgaacaggagaatctggaaaagcaaatgcggcagttggccgtgataccacccatgctctatgacgcagaccagcagcgcatcaaatttataaatatgaacggactgatggcagatcccatgaaagtctacaaggacagacaggtcatgaacatgtggtcggagcaggaaaaggagacatttcgcgagaagtttatgcagcatccaaagaacttcggactcatcgcctcatttttggaaagaaaaaccgtggctgagtgtgtgctctactactacctgacaaagaagaatgagaattacaagtcactggtgcgccggtcctacagacgccggggaaaaagtcagcagcagcagcaacaacagcagcagcagcaacaacagcagcagcaacagccaatgcctcggtccagtcaggaggaaaaggacgaaaaagaaaaggagaaagaggccgagaaggaagaggaaaaaccagaggtggaaaatgataaagaagaccttctcaaagagaagaccgacgatactagcggagaagacaacgacgaaaaggaggccgtcgcgtctaaaggtcggaagacagctaactctcagggacgaaggaaaggccgaataacccggtctatggcaaatgaagctaacagcgaggaggccattaccccacagcagagcgccgagctcgcttctatggaattgaatgagtcctctagatggacagaggaggaaatggaaacagccaaaaaaggtctgctcgagcatggccgaaactggagtgctattgcaaggatggtgggcagtaaaactgtcagccagtgcaagaacttctactttaattataagaagagacagaatctcgacgaaatactgcagcagcacaagctgaagatggagaaagagagaaatgcaagaaggaaaaagaagaaggccccggccgccgcgtctgaggaggccgccttcccacccgttgtagaggatgaggagatggaggccagcggcgttagcgggaacgaggaggagatggtagaggaagctgaggccacggtcaacaatagctctgacacagaatccattcctagtccccatacggaggccgctaaagacacaggccagaatggcccaaagcccccagccaccctcggggccgacgggccaccccccgggccacccaccccgcccccagaagatattccagcccctacagagccaacccccgcttctgaggccaccggggccccaacacctccccctgccccaccatccccttcggctccaccgccagtggtgcctaaagaggaaaaggaagaggagaccgctgcagcccctccggtggaagagggtgaggagcagaagcctcctgcagccgaggaacttgccgtggacacaggtaaggcagaagagcctgtgaaatcagagtgcaccgaggaagctgaggagggccccgccaaaggcaaggatgcggaagctgccgaggctacggccgagggcgctctcaaggctgaaaagaaggaaggggggagtggaagagcgactaccgccaaaagttctggcgcaccacaggacagcgacagctccgcgacttgcagcgcagacgaggttgacgaggccgagggcggggataagaaccgtctgctttccccacggccaagtctcttgactcctactggcgatcctagggctaacgcgagcccccagaagccactggatttaaagcaactgaaacagcgcgccgctgccatcccacccatccaggttaccaaggtacacgagcccccaagggaggatgcggccccaaccaagcctgccccgcctgcccctcctccgccccagaatttgcaaccggaaagtgatgctccacagcagcctgggagctccccccgggggaagtcaaggagccccgcccccccagcggacaaagaagcagaaaagcccgtcttcttcccggccttcgccgctgaggctcagaagctgcctggtgaccccccctgctggacatcaggcttgcccttcccagtcccaccccgcgaagtcattaaggcgtctccacacgcgcccgaccctagcgctttcagttatgcacccccagggcaccctttgcctctgggcctgcacgacaccgctaggcccgtgctccctcgaccgcctaccataagcaatccccctccactcatctccagtgctaagcacccatctgttctggagaggcagataggggctatatcccagggaatgagcgtccaactgcacgtcccatactccgagcatgctaaagcacccgtcggccctgttacaatggggctgccgctgcctatggaccccaaaaagttggctccattcagcggcgtcaagcaagagcagcttagtccacgtggacaggccggcccacccgaatccctcggggtgcctactgctcaggaagcctccgtgctccggggcaccgctttaggcagtgtgcccggtggatcaataacaaagggtatcccctctactcgcgtgccatctgattctgcaattacttaccggggatccatcacgcatggcaccccagccgatgttttatacaagggcacaatcacccggatcattggagaggactctcctagtcgtctggatcgaggtcgcgaggactctctgccaaaggggcacgtgatctatgaagggaaaaagggccatgtgctatcctatgaggggggcatgagcgtgacccagtgcagcaaggaggacggaaggtcctcctccgggccaccccacgagaccgctgccccaaaacggacttacgacatgatggaaggaagggttggccgtgccatctctagcgccagtattgaggggctgatgggcagggcaattccacccgagcgacactctccacatcatcttaaagagcagcatcatattcggggaagcataacgcagggaatccctaggtcgtacgttgaggctcaggaagattacctcagacgcgaagcaaaattactcaaaagagagggaaccccgccaccaccccctcccagccgtgatttaacagaagcctacaagacccaggctctgggccctctcaaattgaaaccagcccacgaaggtcttgtcgccaccgtgaaggaggccggccgctcgattcatgagatcccaagagaagagttgagacatacaccagaacttcctcttgcacctcggcctttaaaagaaggttctatcactcaggggacccctctgaagtatgacaccggggccagcaccactggctcaaaaaaacacgacgtacgatccctcattggctccccagggagaacctttccgccggtccacccactggacgtgatggcagatgcccgcgctttggagcgtgcctgctacgaagaaagcctcaagtcccggccagggaccgctagttcttcaggagggagtatcgctagaggcgccccagtcattgttcctgaactgggaaagccccgccagagtcccctgacttacgaggaccacggtgcccctttcgctgggcaccttccaaggggcagtccagtgaccacacgggagccaaccccgcggctccaggagggatctttatccagcagcaaggccagccaggaccgtaagctgaccagcacaccgcgcgagattgctaaatccccgcactctacagtccccgagcaccaccctcatccaatctctccgtacgagcatctgttgagaggtgttagtggcgttgatctgtatagatcccacatccccttggcctttgaccccacaagcatccccaggggaatcccactggatgccgcagccgcctactatctccccaggcacctcgctcccaaccccacatacccacacttgtatcccccatatctgattcgtggctaccccgacaccgccgccttggagaatcggcaaacaatcataaacgactatatcacgtcccagcagatgcaccacaatgccgccacagccatggctcaacgcgcggacatgctaaggggactctccccacgagagtccagtctagccttgaactacgccgcaggcccacgcgggatcatagatctgagtcaagtgccgcacctgccggtactggttccacccacaccgggcacaccagcgactgctatggaccgattagcttatctgcccaccgcaccgcagccctttagttcccggcactcgagtagccctctgtcccctggaggccccacacacctgacaaagcccaccactacgagtagttcagaacgggaacgggatagagaccgggagagagatcgcgacagggaaagggagaagtcaatcttaacttcaaccacaacggtcgaacatgcgccaatctggaggcctggaactgaacagtcttccggttcctcgggtggtggaggcggatcaagttctcgccccgcatcacactcgcacgctcaccagcactctcctatcagcccccgcacccaggacgccttgcagcaacgacctagtgtgctgcacaacacggggatgaaaggaatcataactgccgtcgaaccctcaactcctaccgtgctaagaagcactagcacctcatcccctgtcagaccagccgctacctttcctcctgccacacattgcccgcttggggggaccttagatggcgtttatcccaccttaatggagccagtgctactccccaaagaggccccacgcgttgcccgccctgaacggccgagggctgataccggacatgctttcctggcaaaaccaccagcgcggtccggactggagcctgcttcctcccccagcaaaggcagtgagcctaggcctctcgtgcctccagtgtccggacatgctaccatcgctcggacacctgctaaaaatctggctccgcaccacgcctctcccgatccccccgcgccaccagcttcagccagtgatcctcatagagaaaaaacccagtccaagccattctctatccaagagctggaactgaggtcactggggtaccatggctccagttacagtccagaaggagtggagccagtctcacctgtctctagtccttccctgacccacgacaaaggactgccgaagcacttggaggagctggacaaatcacacctggaaggcgagttgcggccaaagcagccaggacctgtcaagctggggggcgaggcggcgcacctgcctcatctgcgtcctctgcctgagtcacagcccagtagttctccccttctacaaacagcgccaggcgtcaagggacatcagcgggtggtcacgctggcacagcatatctcagaagtcatcacgcaagactatacgcgccaccatccccagcagttaagtgccccactgccagcacccctctacagtttccctggcgcgtcgtgtcctgtcctagatcttagacggcccccttccgacctgtacctgcctcctccagatcacggcgcaccagcccgcggctctcctcattccgaaggaggcaagcgctctccagaacccaataaaaccagtgtcctgggggggggagaggacggtattgaaccagtgtcgcccccagaaggaatgacagaacccgggcatagtaggtccgcagtgtatcccctgttgtaccgggacggtgagcaaactgaacctagcaggatgggctctaaaagccccggaaacaccagccagcccccagccttcttctcaaaacttactgaatctaactccgccatggttaagtcaaaaaaacaggagatcaacaaaaaactcaatacgcacaatcggaacgagccagaatacaacatctctcagccaggcactgaaattttcaacatgccggctatcaccggaaccggcctcatgacttatcggtcacaagccgtccaggagcacgcgtcgaccaacatggggctggaagctatcatccgaaaagccctgatgggcggaggggggaaggctaaggtatctggccggccttcctccaggaaagccaagtctcccgctcccgggttagcgtcaggcgatcggcctccttcagtgagcagtgtgcatagcgaaggagactgcaaccggcggacgcccctgacaaatagagtgtgggaggacaggccctcctccgccgggagcaccccgttcccatataacccgctgatcatgaggctccaggcaggcgtgatggcctcacctccaccgcccggcctgcccgccgggtcagggcccctggcaggtcctcatcacgcctgggatgaagaacctaaaccactgctctgctcacagtatgaaacgctgtccgacagtgagtag

SEQ ID NO: 197725 - DNA, 6228 bp, synthetic construct
  misc_feature 1..6228: note = Description of Artificial Sequence: Synthetic coding sequence
  source 1..6228: mol_type = other DNA
atgtggagcgagcaggagaaggagaccttccgggagaagttcatgcagcatcctaaaaacttcggcctaatagcgtcgttcctggagcggaaaaccgtcgcagagtgcgtgctgtattactacctaaccaaaaagaatgagaattacaaatcattggttagaagatcctatcgtcgtagaggcaagtcacagcagcagcaacaacagcagcaacaacagcagcagcagcagcagcaacagcccatgccaaggtcttctcaagaagagaaagatgagaaggagaaggagaaagaggcagaaaaggaagaggaaaagcccgaggtggagaacgacaaagaagatctgttgaaagaaaagacggacgatacatctggagaagacaatgatgaaaaagaagctgtcgcgtccaagggcaggaagaccgcgaactcccagggccgacgcaagggtaggatcaccaggagcatggctaacgaggctaatagcgaagaagcgattaccccccagcagagcgccgagctggctagtatggaactcaatgagtcctctcggtggactgaagaggagatggagacagcaaagaagggactgctggaacacggccgcaattggagtgccattgcacggatggtggggagcaagaccgtgtcccagtgtaagaacttttactttaactacaagaaacgccagaacctcgacgaaattctgcagcaacataagctcaaaatggaaaaagagcgaaacgctagacgtaagaaaaaaaaggcgcccgctgctgccagcgaggaggccgctttccctcctgtagttgaggacgaagaaatggaggcctctggcgtgtctggtaacgaagaagagatggttgaggaggccgaagctaccgtgaacaacagtagcgacaccgaaagcattccatcccctcacaccgaagccgcaaaggatacagggcagaacgggcctaaacctcctgctaccctcggtgctgatgggccacctcctggtccccctacccccccacctgaggatatcccagcacccacagaaccgaccccagcctccgaggctacaggggctcccactcccccccccgcacccccatctccgtcagctcctccccctgtcgtcccaaaggaggaaaaggaggaggaaacagcagccgctccaccagtggaagaaggggaagaacaaaagccaccagccgccgaagagcttgcggtggatactggtaaagctgaggagcctgtgaagtcagagtgcactgaagaggcggaagagggaccagcaaaaggtaaagacgctgaggccgctgaggcaacagctgaaggcgccctcaaggccgaaaagaaagagggaggaagcggaagggcaacaacggcaaagtcttctggtgccccccaggactccgactccagtgcgacctgttccgccgatgaggttgacgaggcagaaggcggtgacaagaaccgactgctgagcccacgcccatctctgctcacacccacgggagaccccagggccaacgcaagcccacaaaagcctttagaccttaaacagctcaaacagagggcggccgcaatcccccctatccaggtcactaaggtgcacgagcctccaagagaggacgctgcgccaactaagcctgccccacctgcccctccaccccctcaaaacttgcaacctgaatctgacgctccccagcagccaggatccagcccccgcggaaagtctcggtcccccgcccctcctgccgacaaagaagcagagaagccagtgttttttccagccttcgccgccgaagcgcaaaagctcccaggggaccctccatgttggacatcaggcttgccctttccagttccgccacgagaagtaatcaaggcttcacctcatgccccggaccccagcgctttttcctatgcgccccctgggcacccactgcccctgggcctccacgatactgcaagaccagtgcttccccgcccccctaccatcagtaaccctccacctctcatcagctccgcaaagcatccaagcgtgctggaaagacagataggggcaatatcccagggcatgagcgtgcaacttcatgtgccctatagtgagcatgccaaagcccccgtggggccagtgacaatggggttgcccctgcctatggaccctaaaaagctggcaccattttccggcgtgaagcaggaacaactgtcaccacggggacaggctggaccccccgagtctctcggggtgcccaccgcccaagaggctagcgtgctgcgcggtactgcactgggaagtgtgccaggaggatctatcaccaaaggcataccatctaccagggtgccatcggattccgccataacctaccgaggaagcatcacccacgggacacctgcagatgtgctatataaaggtacgataacccgaataattggcgaggacagtccttcacggctggatcggggaagggaggactctctgccaaaaggccatgttatatatgaagggaaaaagggtcatgtgctctcatacgaaggtgggatgtccgtcactcaatgttcgaaagaagacggacgtagtagcagcggaccccctcatgagaccgctgcccctaaacgtacttatgatatgatggaaggccgagtgggaagagccatcagctccgccagcatcgaggggttgatggggcgcgcaatccccccggagcgacatagtccacaccatttaaaggagcagcaccatataagaggctccatcacccaggggatccccagatcatatgtcgaggctcaggaagactaccttaggagggaggcaaagcttctcaagagagagggcactccgcctccgcctcccccttctcgggacctaacagaagcctataagactcaagctctgggccccctcaaactgaagccagcacatgagggcctagtcgccaccgtgaaagaggcagggaggtccatccatgaaatccctcgagaagagctgaggcatacgcccgagctcccactagcaccaagaccactgaaagagggaagcattacacagggaaccccattgaaatacgataccggcgctagtacaaccggatccaaaaagcatgatgtccgatcccttattggtagtcctggcagaacgtttccacccgtccatcccctcgacgtgatggctgatgcgcgagctcttgagagggcctgttatgaggagtctcttaagtcacggcctgggacggcctcctcctccggaggctctatcgctcgcggagctccagttatcgtgcctgagctagggaaaccacgtcagagtcccctgacatatgaagatcacggggctccatttgccgggcatctgccaagaggctcccccgtgactactagagaacccaccccccgcctacaagaggggagcctgtcctcttccaaagccagccaggacaggaagcttactagtactccccgggaaatcgcaaagtctccgcacagtacggttccggaacaccatcctcacccaatatctccatacgaacaccttcttagaggggtatcgggcgttgacctctacagatcacacatcccgttggcctttgacccaacttcaattcctcgtggaataccactggatgccgcagccgcctattacttacctcgccacctcgctccgaaccctacttaccctcacctatacccaccatatttaatcaggggctacccggatactgccgccctggagaaccgacagactattatcaacgattacattacgtcccagcaaatgcatcataatgctgctaccgccatggctcagagggccgatatgctccggggactctctccaagggaatcttctctggccctcaactacgccgcaggcccccgcggcattatagatctgtcacaggtcccacatctccctgtgctagttccccccacgcccggaaccccggctacggccatggacaggctcgcgtatctgcccacagcgccacagccgttcagcagcaggcacagctcgagtccactctcaccaggaggtccaacccacctgactaagcctacgactacctcttcttcagaaagggagcgcgaccgcgaccgggagagagaccgggaccgggagagagagaagtccatattgacatcaactactacagtggaacacgccccaatttggcggccgggcactgagcaaagtagcggatcgagcggcggcgggggagggtctagttccaggcctgcttcccacagccacgcccatcagcacagtccgatctcgccccgaacacaagacgccctgcagcaaagaccatccgtgctgcacaatactggaatgaagggcatcatcacagcggtggagccgtccactccaactgtactccgctctacatcaaccagctcccctgtacggccagcagcgacctttccccctgccacacactgtcctctaggcggcactctggatggtgtgtaccccacattgatggaaccagtcttgttacctaaggaagcccctagggtggcccgcccggagcgcccacgggctgacactggccacgccttcttagcaaagccccctgcacgatccggattggagccagctagttctcccagtaagggtagcgaacccaggcccctcgtgcctccagtttcaggccatgcgactattgcgagaactcctgcgaagaatctagcaccgcaccacgcttcaccagaccccccagcgccacctgcaagcgcctcagatccacatcgtgagaaaacacagagcaagcccttctctatccaagaactagaactgcgaagtcttggatatcatggatcctcatatagcccagagggggtggaaccggtcagcccagtctcgagtccttctctgactcatgacaagggtctgcccaaacatctggaggaactcgataagagccacctggaaggcgagctcaggcccaaacagcctggcccagtgaaactaggtggtgaggccgctcaccttcctcatttgagacctctgccagagagtcagccctctagtagccccctgctgcaaactgcccccggggtgaagggacatcagcgcgtcgtcacactcgcacagcacattagcgaagtaattactcaggactatactaggcaccatccgcaacagcttagtgcgccgcttcccgccccactgtattcgtttcccggagcctcttgccctgtcctggatttacggaggcccccctctgacttatatctgccaccacctgaccacggtgcacctgcgagaggttccccacattccgaaggcggaaaacgctctccggagcctaacaagacatcggtgctcggcgggggggaagatggtatcgaaccagtgagcccacccgagggaatgactgagccaggccactcaagaagcgctgtctatccgcttctttatagagacggggagcagaccgagcccagcaggatgggaagcaagagtccaggcaacaccagccagccgcccgctttcttctccaaactcactgaaagtaactctgcaatggtcaaaagcaagaaacaggagattaacaaaaaactgaacacacataataggaatgagccggagtacaatatttctcagcctggcacagaaatcttcaacatgcccgccatcactggaacaggtcttatgacatataggagtcaggcggtgcaggagcacgcctcgaccaatatgggtctcgaagccataatcagaaaagctcttatgggaaagtacgaccagtgggaggagagtccacctttgtctgccaatgcttttaacccattaaacgcatcagcctcccttcccgcggccatgcctatcacggctgccgatggacggagtgatcatactctgacctcgcctggcgggggtggaaaagctaaggtctctgggaggcccagttcaagaaaagctaaaagtcccgctcccgggctggcgtctggagatcggccaccctccgtgtctagtgtgcattccgaaggggattgcaatagacggacgcctctgaccaatagagtgtgggaggaccggcctagtagtgccggttctaccccctttccatataatcccttaataatgcgactacaagcaggcgtcatggccagccctcctccccccgggcttcctgccgggagcgggccgctggctgggccacatcacgcttgggacgaagagcccaagcctctgttgtgtagccagtatgagacactgtccgacagcgaatag

SEQ ID NO: 197726 - DNA, 7377 bp, synthetic construct
  misc_feature 1..7377: note = Description of Artificial Sequence: Synthetic coding sequence
  source 1..7377: mol_type = other DNA
atgagcggcagcacccagcccgtggcccagacctggcgggccaccgagccgagatatccaccacattcactatcatacccagtgcagatcgcccgcacccacactgatgttgggctgttggagtaccagcaccatagccgggactacgcttcacacctatctcccggttcgattattcaacctcagcgaaggcgcccatctctcctgtccgagtttcaaccagggaatgagaggtcccaggagctgcacctgcgccccgaaagtcactcttatctgcctgagctaggtaaatccgaaatggaattcatagaaagcaagcggccgagactggagttactcccggatcctctgttgaggccgtcccctctcctggctacaggccagccagcaggatccgaggacttgacaaaagatagaagtctcacgggcaagctcgagcccgtgtccccaccctccccgccccataccgacccagaacttgagctggtgcccccaagactgtcgaaagaagagcttattcaaaacatggaccgcgtcgatcgtgaaataacgatggtggaacagcaaattagcaagttgaaaaagaaacaacagcagttggaggaagaggctgctaaaccccccgagccagaaaagccggtgagcccccctcctatcgaaagcaagcaccgaagtctggtccaaatcatatatgacgaaaaccgtaaaaaagcagaagctgctcatcgcatcctggaaggattggggcctcaggttgagctccccctgtataaccaaccttccgacacaaggcagtatcatgagaacatcaagatcaaccaggccatgcgcaaaaagctgatcctctatttcaagaggaggaatcacgcacgtaaacaatgggaacaaaaattctgtcagagatacgaccagctgatggaggcctgggagaaaaaggtggaacgaatcgaaaacaatccacgtcgacgagctaaggaatcgaaggttagagagtactatgaaaagcagtttcccgaaatccgcaaacagcgagagttgcaagagcggatgcagagagtcggccaaagggggtccggcttatctatgtcggcagcccggagcgagcatgaagtcagtgaaattatcgatggattgagtgaacaggagaatctggagaagcagatgaggcagcttgctgtgattccaccaatgctgtacgacgcagatcagcagcgaattaaatttattaatatgaatggactgatggctgaccccatgaaagtttataaggacaggcaagttatgaatatgtggagcgagcaggagaaggagaccttccgcgagaagtttatgcagcatcctaaaaattttggcttaatcgcctctttcctcgaaagaaaaaccgtggcagagtgtgtgttatactactatttaacgaagaagaacgaaaactataagtccctcgtgcgccgatcctatcgccgtaggggcaagagccagcagcaacagcagcaacaacagcagcaacagcaacagcagcaacaacagccaatgcccagaagctcccaagaagaaaaggacgagaaggaaaaggagaaagaagcagagaaggaggaggagaagcctgaagttgagaacgacaaggaagatctgctgaaagagaagaccgacgatacatcaggggaggataatgacgagaaggaagcggtggcctcaaaaggcagaaagacggccaactcgcaaggtcgacgcaagggtagaattactcgcagtatggcgaatgaggccaacagcgaggaagctatcaccccccaacaatccgcagagctggcatccatggagcttaatgaatcttcccgatggaccgaggaggaaatggagacagccaagaagggcctcctggagcatggccggaactggtccgccatagctcgcatggtgggaagcaaaactgtctcacagtgtaagaatttctattttaactataaaaaacgacagaatctcgacgagattctccagcagcataagctgaagatggagaaggagcggaacgccagacgcaagaagaagaaggcgccagccgctgcgtctgaggaggccgcttttccccccgtggtggaggacgaggaaatggaagccagcggagtgagcggaaacgaagaggagatggtggaagaagcagaggccactgtcaacaatagctctgacacagaatccattccctcccctcacactgaggccgcaaaggataccggccagaacgggccaaaaccacccgccacgcttggggccgacggccctcctcctgggccacccactccaccaccggaggacatccctgctcctacggaaccgacgcctgcctctgaagcaactggggcccctaccccgccaccggcccctccttcaccctcagcacccccccccgtggtgccgaaagaggagaaagaagaagaaaccgcagccgctccacctgtcgaagagggcgaagagcagaagccacctgctgcggaggagctggcagtggataccggtaaagcagaggaacctgtcaagtctgagtgtaccgaagaagccgaggaagggcccgcaaagggaaaagatgctgaagccgctgaggcaactgccgagggggccctgaaggccgagaaaaaggaggggggtagcggaagggctaccacggctaaatcctctggggcgccccaggacagcgactcctcagctacttgctccgctgatgaggtggatgaggccgaaggcggtgacaagaatcgactgctgagccctcggccttccctacttacccccaccggggatcctcgcgcaaatgcttctcctcagaaaccgttggaccttaagcagctgaaacagcgggccgcggccatcccaccaattcaggtcacaaaggttcacgaaccccccagggaggatgctgcgcctactaagcccgccccaccagcccccccaccgccacagaacttacagccagaaagtgacgcaccccaacagccggggagtagtcctaggggcaagtcccgcagccccgcacctcctgcagacaaggaggcagaaaaaccagtgttttttccggcatttgcagccgaggcacagaagctccccggggatcccccatgctggacttctggtttgcctttccctgtgccgccccgagaagtgattaaggcttctccacacgctccagatccgagcgcattcagctacgctcccccaggccaccccctgcccctgggactgcacgatactgcgcgccctgtgctccctcgacctccaactattagcaacccacctcctctgatctcctctgctaagcacccatccgtgctggagcgccagatcggtgcaatttcccagggaatgagtgtgcagctgcatgtgccttactctgaacacgccaaagcgccagtcggacccgtgactatggggcttccactgccgatggatcccaagaaactagccccattttccggagtcaaacaggagcagctttctcctagaggccaagcgggccctcctgagtctctaggcgtgcctactgcccaggaggcctccgttctgagagggactgccttgggatctgtcccgggtggatcaattaccaaaggaatcccgtccacaagagtgccctcggactctgcaatcacgtaccggggctcaattacccacgggacccccgcggacgtactgtataagggcaccattacaaggattattggggaggactctcctagtcgcctggacagggggagagaggatagcctgcctaagggacatgtaatctatgagggtaaaaaaggtcacgtcctgtcatacgagggcggcatgtcggtgacccagtgcagtaaagaagatgggcgaagtagttcagggccgcctcacgagacagcggcccctaagagaacatacgatatgatggaaggtagggtaggcagagccatttcctcagctagtattgaaggattgatgggacgcgcgataccacccgagagacatagcccccatcacttaaaagaacaacaccatattagagggagcattacccagggtattccacgatcctacgtggaggcccaagaagattacctcaggcgcgaggccaagttgctcaagagagaaggaactccccctccgcctcctccctcccgagatctaactgaggcatataaaacgcaggccttgggacccttgaagcttaaacccgcacacgagggtctggtggccactgtcaaagaagcaggccgcagcattcatgagatcccccgagaagaactaaggcacaccccagagttgcccctggcaccccgtcctctgaaggagggttcgattactcaagggaccccactgaagtatgacacaggcgcctccaccacaggatcaaagaagcacgatgtgcgatcccttatcggtagcccgggacggaccttccctccagtgcaccccctcgacgtcatggctgacgcgcgggcactggaacgagcctgttacgaggagtcactgaaatctaggccagggactgcaagtagctccgggggcagcattgccaggggcgcccccgtgatcgtgcccgaactggggaaaccacggcagtcccccctaacttatgaagatcacggggccccttttgctggccacctgccacggggcagcccagtgaccactcgggagcccactccccggctgcaggagggttcgctttcaagctcaaaagcttcacaggatcgaaaattgactagcacaccgagggagatcgccaaatccccccactcaactgtgcccgaacaccacccacatcctataagcccctacgagcaccttcttagaggtgtgtctggggtggacctatacagaagccacatcccacttgcattcgatccaacctctatccctaggggcatccccctagacgcggcagcagcgtactacttgcccaggcatctcgccccaaaccccacatatcctcacctgtaccccccatatttgatccgcggttaccccgacacagctgccctggagaatcggcaaacgataattaatgattacattaccagccaacagatgcaccataatgctgcaaccgccatggctcagagagctgacatgctgaggggtctttcaccacgggagtcctctttggcattaaactacgctgccggacccagagggatcatagacctgagtcaggtgccccatctgcccgtactcgtgccacctacccccggtacacctgccactgcaatggatcgtctggcttatctgcccactgcccctcagcctttctcgtcccgtcattctagttctcccctatcaccagggggacccacacatctgaccaagcccactacaacttcgtcctccgaaagggagcgggaccgggacagggaacgggacagggatcgagagcgggaaaaaagcatattgacttcaaccacgacagtggaacacgcacctatttggcggccaggaacggagcaatcatcaggcagctcaggtggcggtggcggttcatcatctagacccgccagtcatagccacgctcaccagcacagcccaatctctccaaggactcaagacgccctccaacagcggccatcggtgctgcacaacacagggatgaaggggattatcactgccgtcgaacctagtacccctacagtactgcgctcaacatctacgagctctccggttagacccgctgccacttttcctcccgctacgcactgtcccctgggcggaacactcgatggcgtctaccctacattaatggagccagtgctgctccctaaagaagccccccgcgtcgctcggcccgagcggccacgagcagatacagggcacgcatttctggctaagccccctgcgaggtccgggctggagcctgcctcaagcccctccaaaggttcagaacctagacctctcgttccaccagtctccggacacgccactatcgccagaactcccgccaagaacctggcaccccaccatgcgtcacctgatccccctgccccacccgcctctgcctccgacccccacagggaaaagacccagtctaagccattctccattcaggagttagagctgagaagcttaggataccatggatcctcctattcacctgaaggagtagaaccagtcagcccagtttcgtccccttcgctgacacacgacaaaggcctgccaaagcacctggaagaacttgacaagtcccacctagagggggaactgcggcctaagcaacccgggccagtgaagctgggcggggaagccgcccacctgccacatctgaggccactacccgaatcacagccttcttcaagcccccttcttcagactgctcccggcgtgaagggccaccagcgggtggttaccctcgcccagcatatcagtgaggtaataacacaggattacacccgacatcacccgcaacaactttcggcccctctgcccgctccactgtactcctttccgggcgcctcttgtcccgtgttggatctgaggcgacccccttctgacctgtatctgcctcctccggatcacggggccccggcccgagggagcccccattcagagggcggaaagcgctcacctgagcctaataaaaccagtgttttgggagggggtgaagacggaatcgaacccgtgagcccgcccgagggcatgactgagcccggacattctagatctgccgtgtatcctctgctatatcgtgacggtgaacagacggagccttcacgcatgggatccaagagtcccggaaacacgtctcagccaccagcctttttctctaaactgacagagtccaacagcgccatggtgaaaagcaaaaagcaggaaattaataaaaaattgaatactcataaccgaaatgagccagagtacaacatcagccagcctggaaccgaaatttttaacatgccagccatcaccgggactggattgatgacctacagatcccaggctgtgcaggagcatgccagcacgaatatgggcctcgaggctattatcagaaaggccctgatgggcggtggtggcaaagctaaggtatcagggcgtccttccagtagaaaggcaaaatctccagcaccaggactggcaagcggggacagacctccctctgtcagttcggttcactcagagggcgattgcaacagacgtacccccctcacgaatagagtgtgggaggacagacctagtagtgcaggaagtacaccattcccatataaccccctcattatgcgactccaggctggagttatggccagcccccccccgcccggcctccctgccggcagcggccccttggccggcccacatcacgcatgggacgaggaacctaagcccctgctctgctcccagtacgaaaccctgtccgactccgagtag

SEQ ID NO: 197727 - DNA, 7545 bp, synthetic construct
  misc_feature 1..7545: note = Description of Artificial Sequence: Synthetic coding sequence
  source 1..7545: mol_type = other DNA
atgagcggcagcacccagcccgtggcccagacctggcgggccaccgaacccagatatccccctcacagcctgtcttaccccgtgcagatagccaggacacacactgacgtgggtttgttagagtatcaacatcacagtcgcgactatgcttcgcacctgtcacctggctccattatccagccacagagacggcgcccttccctgctttccgaattccagcccggtaatgagaggagccaagaactccacctgaggccagagagtcactcctacctgcccgagctaggcaagagtgaaatggaatttatcgagtcgaaacggccacggttggaactgctccccgatccactgctccgcccttcaccactccttgcgacgggtcaaccggccgggtccgaggatctcacaaaggacagatccttgactggcaagttggaacctgtgtcacccccatccccaccgcataccgaccctgaactggagctggttccaccgcggctctctaaggaagagcttatccagaatatggacagagtggatagggaaatcacaatggtggagcagcaaatcagcaaactgaaaaaaaaacagcagcagctagaagaggaagcagctaagccgcccgagccggagaagcctgtatcccctcctccgattgagtcaaaacaccgttctctcgtccagattatctacgatgaaaatcgtaaaaaagctgaagccgcacatcggatcctggagggcttgggcccccaggttgagctgccattatacaaccagccatcagatacaaggcagtaccacgagaatatcaagatcaatcaggccatgagaaagaagctaattctgtacttcaagcggcgaaatcacgcacggaagcagtgggagcagaagttctgtcagcggtatgaccagttgatggaggcttgggaaaagaaggttgagagaatcgagaacaatccaagacggcgcgcaaaggaaagtaaagtgcgcgaatattacgagaaacaatttccggagattagaaaacagcgcgaactccaggaaaggatgcagtctagagtcggtcagagaggatctggcttgtctatgagcgctgccaggagtgagcacgaggttagcgaaatcatcgacggactcagtgagcaggagaacctggaaaaacagatgaggcagcttgcggtgatccctcctatgttatacgatgcggaccagcagcgcattaaatttattaatatgaatgggctcatggctgatcctatgaaggtatacaaagacaggcaggtcatgaatatgtggagtgagcaggaaaaggaaacctttagagagaagtttatgcagcaccccaagaacttcggtctcatcgcttccttcctggaacgaaagactgtggccgaatgtgtgctatattactatctgacaaaaaagaatgagaattacaagagcctggtgcggcgtagttatagacgccgaggcaaatcacagcagcagcagcagcagcagcagcagcagcagcagcagcagcagcaacagcccatgccaagatcttcgcaagaggaaaaggatgaaaaggagaaggagaaagaggccgagaaggaggaagagaagcccgaggtggaaaacgacaaggaggatcttctgaaggaaaagaccgatgacaccagtggagaggataatgatgagaaggaggctgtcgccagtaaaggtcggaaaacagctaattcccagggtcgcagaaaagggcgtatcacccgtagcatggccaatgaggctaacagcgaggaagcaatcactccccagcagagtgctgagttggccagcatggagttaaacgagtcaagtcgctggacggaagaggagatggaaactgccaagaagggtctactcgaacatggcagaaactggtctgccattgctagaatggtcgggagcaaaacagtgtcacaatgcaaaaacttttactttaattacaaaaagcgacagaatcttgatgaaatcttgcagcagcacaaacttaagatggaaaaagagaggaacgccagacggaaaaaaaagaaagcacccgctgctgctagtgaggaagcagcctttcctccggtcgtcgaggacgaggagatggaggcttccggagtgagtggcaacgaagaagagatggttgaggaggctgaggccctccacgcaagcggaaacgaggtaccgaggggcgagtgctccggccccgcaacagttaacaattcctccgatactgagagcatcccatcaccacataccgaggccgcaaaagatactggccagaatggccctaagcccccagctaccttgggtgccgacggcccaccaccggggcccccaacccctcccccagaggacatacccgcaccaacagagccaactccagcctcggaagctacaggagctcccacacccccaccagcccccccctctccctccgcacccccgcctgtcgtgccgaaggaagaaaaggaggaagaaacagctgcggccccaccagtcgaagaaggcgaagagcaaaagccccctgccgcagaagagctagccgttgacaccgggaaggctgaggaacctgtgaaaagtgagtgcaccgaggaagcagaggagggccctgcaaagggcaaagatgcagaagccgcagaggctactgccgagggggcactgaaggctgagaagaaagagggagggtctggccgcgccactaccgctaagtcgtctggggctccgcaggacagtgatagctcagccacttgctcagcagacgaagtcgacgaggctgaagggggagacaaaaatagactgctttccccacgcccatccctgctcacccccacgggtgatcctcgagccaatgcctccccacaaaagcctttagatctgaaacaattgaagcagcgagctgcagccatcccgcctattcaagtgactaaggtccatgaacccccccgcgaggacgcagctcctaccaagccagccccccccgcccccccacctccacagaacctgcaacctgagtcagatgctcctcaacagcccggctcaagcccccgtggaaaatcccggagtccggctcccccagccgacaaagaagcgtttgctgcagaagcacagaaactgcccggggaccctccttgctggacttcaggcctgcccttcccagttccccctcgcgaggttattaaagccagcccacacgcccccgatcccagcgcgtttagctacgcccctcctgggcaccccctccctctcggactgcatgacacagctagaccggtgctgccaaggccaccaacaatttcaaatccccccccactgatcagctcagcaaagcacccgtccgttctggagaggcagattggtgcaatttcccagggcatgtctgtacagctacatgtgccctactccgagcatgccaaagctcctgtcggaccagttaccatgggtctgccactccctatggacccaaaaaaacttgctccattcagcggggtgaagcaggaacagctcagcccccgtggccaggcaggcccccctgaaagtctgggtgtcccaactgctcaagaggcttccgtgctgcgcggaacagctttgggctctgttcctggaggcagcatcactaagggaattccatccacacgcgtcccaagcgattccgctatcacataccgtggttcaatcactcacggtacaccagccgacgttctatataagggaacaattactcgcattatcggagaggattccccctccaggctcgacaggggtcgcgaagattctttgcctaaaggacatgtgatatatgagggtaagaaaggccacgtgctgagctacgaagggggcatgtcagtcacgcagtgtagcaaagaagatggccgaagttccagcggcccacctcatgagacagcagccccaaaacgcacgtacgatatgatggaggggagggtcggtcgggcaattagcagcgccagtatcgaggggctgatgggcagagcgatccccccagaacgccactctccccatcacctgaaagagcagcatcatatcaggggatctataactcagggaattccgcgctcttatgtggaggcacaagaggactacctcaggagagaggccaaactcctgaagcgggaaggaacaccgcccccaccacccccctctcgggatcttacggaggcttacaagactcaggctttgggccccctgaagctaaaaccagcgcacgaggggctggtggccacagtgaaggaggcgggtcggtctatacacgaaatccctcgcgaggagctgagacacacaccagaactgccattagctcctcgccctcttaaggaagggagcataacacagggcactccactgaaatacgacaccggggcctccaccactggctccaaaaaacacgacgtgcggagcctgatcggttctcctggcagaacatttccccccgttcacccgctcgacgtcatggcagacgcaagggccttggagagagcctgctatgaagaaagtctcaaatcgcgtcccgggacagcaagttcttcagggggatcaatcgccagaggggcgcccgtcatagtgccagagcttgggaagcctaggcagtccccgctcacatacgaagaccacggcgccccgttcgcgggccacctgccgagaggttcacccgtcaccacacgggaaccaacaccgaggctacaggaggggtccctatctagctccaaggcctcccaggatcggaaactcactagcaccccgcgagagattgctaaatcccctcattctacagtgccagaacatcatcctcaccccatctctccttatgaacacctactcagaggggtcagtggtgtggatctctaccggtcccacataccgttggctttcgatccgacctcaatccctagaggcattcctctggacgctgccgccgcatattacctccctcggcacctcgctccgaaccccacctatccacacctttatcctccctacctgatcagggggtatcccgacaccgccgctttggagaatcgtcaaacgatcataaacgactatattacttcccagcaaatgcaccacaatgccgcgaccgccatggcccagagggccgacatgctacgcgggttgtcgccaagagagtcgtccctagcactgaactacgctgctggacctagaggtatcattgacctctcacaggtgccgcatttgccggtgctcgtgcccccaaccccggggacccccgccaccgccatggaccgactcgcctatctccccaccgccccacagccattctcatctcgacatagctcgagtcccctgtccccaggtggcccaacacaccttaccaagcccacgaccacctcttcctccgaaagagaacgtgatagggaccgtgagcgggatcgagacagggagagagaaaaaagcatcttgaccagcaccacaactgtcgagcacgctccgatttggagaccgggtacagagcagtcctctggttcgagcggcggtggagggggtagtagtagtaggccagccagccactcccacgcacaccagcactcccctatcagccctaggactcaggacgccctgcagcaaaggccaagtgttctgcacaacacgggtatgaaaggtatcataaccgctgtggaaccatccactccaactgtgttgaggtccactagtacaagtagccccgtcaggcccgctgcaacctttcctcctgcaactcactgtccactcggcgggacactggatggggtgtatcccactctcatggaacccgtgctgcttcctaaagaggcgccaagagtggctcgtccggagaggcccagagctgatacggggcatgcgtttctcgctaagcctcccgctcgtagtggacttgaaccagcctccagcccttcaaaaggaagcgagcctcgtcctctggtaccaccagtgtcagggcatgctacgatcgctcgcacaccggccaaaaacttagctccacaccacgcttcacccgatccccctgccccgcctgcgtccgctagcgaccctcacagagagaaaactcagtccaagcctttcagcatacaggagctagaactcagaagtttaggatatcacgggagcagctactccccagagggggtggaacccgtgtccccagttagtagtccttccctgacccacgataaaggactgcccaaacacctggaagaactcgataagtcacacctcgagggggaactgaggcccaaacagccaggacccgtgaagctaggaggcgaagccgctcatctccctcacctgcgacccctgcctgaatcccagccctccagtagccccctgctgcaaacggccccaggggtgaagggacatcaaagagttgtaacactcgctcagcacattagtgaggtgattacacaggattacacaagacaccatcctcaacagttatctgcccctctccccgcccccttatactccttcccaggggcatcttgtccagtgctcgatctgcggcgcccccctagcgatctgtatctgcccccgcctgaccatggagctccagctaggggctccccccattccgaaggaggaaaacgttcgcctgagccaaataagacctcggttttaggcgggggcgaggacggcatcgagccagtgtcccctcccgaggggatgacggaacccggtcatagccggtcagctgtatatcctctgttgtatcgtgacggggagcagaccgaaccctctagaatgggtagtaagagcccagggaatacttcccagcctcctgctttcttttccaagctcaccgagagtaatagtgcaatggtgaagtctaaaaaacaagaaatcaacaaaaaactgaatacccacaacaggaatgagcccgagtataacatctcacagcctggaactgagatctttaacatgccagccattactggcaccggcttgatgacctatcgttcacaggccgtgcaggagcacgctagcaccaacatggggctggaagccataattagaaaagccctaatggggaaatatgatcagtgggaagagtcgcctcctctcagcgctaatgcatttaatcccttgaacgcctcggcctccttgcccgctgccatgcctatcaccgccgcagacggcagaagtgaccatacacttactagccctggaggcggaggcaaagccaaggtttccggacgaccttcttcccgcaaagcaaaaagtccagcccccggacttgcaagcggagatcggcccccatcagtgagtagtgtccattctgaaggcgactgtaatcggaggaccccgctgactaaccgcgtgtgggaagaccgccctagctcggcaggctctactccatttccctacaacccattaatcatgcgattgcaagccggcgtgatggcctcgccacctccccccggactccccgcggggtctggcccacttgccgggccacaccacgcatgggatgaagagcctaaaccccttctctgctcccagtacgagactctgagtgacagcgagtag

SEQ ID NO: 197728 - DNA, 7515 bp, synthetic construct
  misc_feature 1..7515: note = Description of Artificial Sequence: Synthetic coding sequence
  source 1..7515: mol_type = other DNA
atgagcggcagcacccagcccgtggcccagacctggcgggccaccgagccgagatatcccccacacagtctctcataccccgtccagatagcgaggacccatactgatgtggggctccttgagtaccaacaccacagtcgcgactatgctagtcatttatccccagggagtattatacagcctcagaggagacgtcccagccttctgagcgagtttcaaccaggcaacgaacggagccaggaattgcatcttagaccggaatcccactcctacctccctgagcttggtaaaagtgagatggagtttattgagagcaagaggcccagacttgaacttttgccagatccactgttgcgtccatcccccttattggccaccggccagcccgccggcagtgaggatctgacaaaggatcggagcctgacaggaaagctcgagcccgtgagtcctccctccccgccccacactgacccggagctcgaactcgttcctcctcgcctttcgaaagaggagcttatccaaaacatggatcgcgtagacagggagattaccatggtggagcagcagatcagcaagctgaagaagaaacagcaacagctcgaagaggaagccgctaaaccccctgaacccgagaaaccagtcagcccccctcccattgagtccaagcaccggtccctggtgcagattatctacgatgaaaacagaaaaaaggcagaggcggcacataggatcctggagggcctgggaccccaggtggagctgccattatacaaccagccaagcgacacccgacaataccatgagaatatcaaaatcaatcaagcaatgcgaaaaaagctcatcctctatttcaaaaggcgcaatcatgcgcgcaaacagtgggagcagaagttttgccagagatacgaccagcttatggaggcgtgggagaagaaagtagagcgaatcgaaaacaaccccagacgtagggccaaagagagcaaggtccgggaatactacgagaagcagttccctgaaattcgtaagcagagagaactccaggaacggatgcagcgagtcggccagcggggatccgggttgagtatgagtgccgccaggtcggagcacgaagtttccgagatcattgatggtctgagtgaacaggagaatcttgagaaacagatgaggcaattagcggtgatcccacccatgctatatgacgcggaccagcagcgaataaaattcattaacatgaacgggctgatggctgatcccatgaaggtctataaggacagacaggtcatgaacatgtggagtgagcaagaaaaggagacattccgcgagaagttcatgcagcaccctaaaaatttcggactgatcgcatcctttctggaacgtaagacagtggcggaatgcgttctatattattatctaaccaaaaagaacgagaactacaagagcttagtaaggcgatcctatagaaggcgaggaaagagccagcagcaacagcagcaacagcagcagcagcagcagcaacagcagcagcagcccatgcctagatctagccaggaggagaaagacgagaaggagaaagagaaagaggccgagaaggaagaggagaagcctgaagtcgaaaatgataaagaggacctacttaaggagaaaacagatgacaccagcggggaagacaatgatgaaaaagaggctgttgcaagtaagggaaggaagaccgcaaactctcaggggaggagaaagggcaggattacccgatccatggctaatgaggcaaacagcgaggaagccattacacctcagcagtctgcagagctggcctccatggaactgaatgagtcaagtaggtggaccgaagaggaaatggagaccgccaaaaaggggcttctggagcacggcaggaattggagcgccatcgcacggatggttgggtcaaagacagtttcccaatgcaagaacttttattttaattacaaaaagcgccaaaaccttgacgagatcctgcaacagcacaagctcaagatggagaaagagcggaatgcacggcgcaaaaaaaagaaagcccctgccgccgcctcagaagaggcagcgttcccccccgtcgtggaagatgaggaaatggaggcatctggagtctcaggtaatgaagaggagatggtggaagaagctgaagctacggtgaacaactcctccgacactgaatcaatccccagccctcacaccgaggcagcaaaagacaccgggcaaaatgggccgaaaccgcccgcaacattgggcgccgacgggcctccccctggaccacctacaccgccacctgaggatattccagctcccactgagcccactcccgcatcagaggccacaggggctcccaccccaccccccgccccaccatccccatctgcccctcctcccgtggttcccaaagaggagaaagaagaggaaacagctgccgcacctccggtggaggaaggcgaagaacagaagcccccggccgccgaggagctagccgtggataccggcaaagccgaagagcccgttaagtcagagtgcacagaggaggcagaagaaggaccggccaaaggaaaggacgcggaggctgccgaagccacggccgaaggcgccttgaaagcagaaaagaaggaaggcgggtccggccgggcaactactgcaaagtccagtggtgccccgcaagactcagacagctcagctacatgctctgccgacgaagtggacgaggccgagggcggcgacaagaacaggcttctgagcccacggccttcgctgctgactcccaccggcgacccaagagccaatgcgagcccacagaagcccctggatttaaaacagttaaaacagagggccgctgctataccccccatacaggtgactaaagtgcatgaacctccccgcgaagacgctgctcctaccaaacccgctcccccagcaccccctccaccccagaatctgcagcctgagtccgatgctccccagcagcccgggtcaagcccaaggggcaagagccgatcccctgcaccacccgcagataaagaggccgagaaacccgtattctttcccgctttcgccgctgaagcacaaaagctgccaggcgatccaccctgctggaccagtggcctgccatttccagtgcccccacgtgaggtaatcaaagcatctccccacgctcccgacccatctgcattctcatacgcccctcctggacatccgctacctctcggcctgcacgatacagctcgaccagtattaccccggccccctacaatctctaacccccctcccctcattagctccgcaaagcatccatccgtgttggagcggcagatcggagcaatctcacagggtatgagcgtgcaattgcatgtcccttattcagagcacgctaaggcgccggttgggccggtcacaatgggacttcccctgccaatggatccaaagaaattagctcccttctcaggcgtcaaacaggagcagctgtccccacgcggccaagctgggcccccagagagcctgggcgtgcctaccgctcaagaagcgtcagtgctgagggggactgctcttggcagtgtgccggggggcagtatcaccaagggaattccatccactagagtgccttctgattccgctatcacctaccggggatcgatcacacacggaacaccagctgacgtgctctataaaggcactatcacccgcatcataggggaagacagtcccagccgactcgacaggggcagagaggactccctacccaaagggcatgtaatctatgagggcaaaaagggacatgtactgagttacgagggtggcatgagtgtgacccagtgctcaaaggaggacgggagatcaagctccgggcctccgcatgagaccgctgcccctaagcggacctacgacatgatggagggccgggtgggtcgagctatttcgagcgcgagcatagaaggactgatgggtcgcgcaatcccccccgaacggcacagtccccatcacctcaaagaacagcaccacatacggggctccattacccaaggaattccaagaagttacgttgaagctcaagaggactacttacgccgtgaggcgaaactgttgaagcgcgaaggaacccctccccctcccccacccagtagggacctgaccgaggcttataagacacaagccctgggaccactgaaactgaaacccgcccatgaaggacttgtcgcaactgttaaggaagctgggaggagcattcacgagatccccagagaagagctgcggcatacccccgaactacctcttgcccccagacctctgaaggagggcagcataacacaagggactcctctcaagtacgatacgggggcgtctacaaccggtagcaaaaagcatgacgtgcggtccttaatcggtagccctgggcgcacgttcccccccgtgcatcctttggacgttatggcagacgctagagcactggagagagcgtgctatgaggaatcgttgaagtcaaggcccggcactgcctcaagcagtggaggatcaattgctaggggagctcctgtgatcgtgccagagcttggcaagcccagacaatcacctttaacttacgaggatcacggcgcaccttttgccggtcatctgccccgaggctcaccagtgaccacgcgcgagccaactccgaggctccaagagggttctcttagctctagcaaggcctcacaggaccgcaagctaacatctacccctagggagatcgccaagtccccccactcgaccgttccggaacatcatccacacccaataagcccatatgagcatctgttacgcggcgtgtcgggggtcgatttatacagatcccacatcccccttgccttcgatcccacctccatccctcgggggattccactagacgctgccgcagcatattatcttcctagacatctggcaccaaaccctacatacccccatctctacccaccctatctaatccgggggtacccagacaccgctgctctggagaatcgccaaactattatcaacgactatattacctcccagcagatgcatcataacgccgctactgccatggcacaaagagctgacatgttgcgaggattgagccccagagagagctccctggccttgaactacgccgcgggccctcgcggcattatcgacctgtctcaggtgccacacctgccggtgctggtccctcctacgccaggaactcccgccacagctatggacaggctcgcttacctgcctaccgcgcctcagcccttttcgagccggcattctagtagtccccttagtcccggcggacccacacacctcaccaaacccacaactactagctcaagcgagcgtgaacgcgatcgggatagagagagggacagagatagggagcgcgagaaatcaattctgacatcaaccactaccgttgaacatgctcctatctggcgcccgggcaccgaacagtcatctggttctagcggggggggtgggggctccagctcccgaccggcttcccatagccatgcccatcaacacagccccatctccccccggacacaggatgccctgcaacagcgcccatctgtcctgcataacaccgggatgaagggcatcatcaccgccgttgaaccttccactcccaccgtcctgagatctacttcaacaagcagtcctgtaagaccagctgctactttccctcccgccacccattgtcctctgggagggaccctcgatggagtttatcctaccctaatggaacctgtgctgctccctaaggaggctcccagggtcgcaaggccagagcggccacgcgcagatactggccatgcctttttggcaaagcctcccgcgagatctgggttagaaccggcttccagtccttctaagggatccgaacctcgcccactagttccaccagtatctggccacgcaactattgctcggactccagctaaaaacctcgccccgcatcacgcttctcctgaccctcccgctccaccggccagcgcctcagatcctcaccgggagaagactcagtctaaaccattttccatccaggaacttgagctgcggtccctgggttatcatggaagctcctacagcccagagggggttgagcccgtctctcccgtgagctccccaagtctgacgcacgacaaggggctgccaaagcatctggaagagctggataagtcgcacctggagggggaattgcgacccaaacagcctggtcctgtgaaactagggggcgaagctgcacatttgccacatcttaggccgctccccgagtctcaaccatcctcttcccctctgctgcagaccgccccaggcgtgaagggacaccaaagagttgtgacactcgcgcagcatataagcgaagttattacccaggactataccagacaccacccacagcagctctcagctccattgcccgctccactgtactcctttcccggggctagttgccctgtcctagatctgagacgtcctcccagtgatctgtatttgcctcctccagaccatggggcacctgcgcgcggcagtccccactctgaaggagggaaaaggtctcccgaacccaataagacaagcgtgttgggagggggggaggacggcattgagcctgtctctccccccgaaggcatgacagagccaggacatagcaggagcgctgtgtacccccttttgtatcgtgacggtgagcaaactgagcccagtaggatgggaagcaaatcccccggcaatacttctcaaccccccgcatttttcagtaagctgaccgaaagtaatagcgccatggtgaaaagcaaaaagcaggagattaataagaagctaaatacccacaacaggaacgaacctgagtataatatctcacagcctggtactgagattttcaacatgcctgctataacaggtacgggactgatgacatatagatctcaagctgttcaggaacatgccagcactaacatgggcctcgaagccatcattagaaaggcacttatggggaaatacgaccagtgggaagagagccctcccctgtccgcaaatgctttcaaccccctaaatgccagcgccagcctacccgctgctatgccaattactgccgcagatggccggtccgaccatactctgaccagccctggagggggtggcaaggcaaaggttagcggtcggccatcttcaaggaaggcgaagtcccccgctcccggcctagcgtccggcgatcgacctccctcggtgtccagcgtacactccgagggcgattgcaaccggcggactcctctgactaacagagtttgggaggatcgtccatcttccgctggatcaacgcccttcccctacaatcctctaatcatgcgactgcaagctggtgtcatggcctcgcctcccccacccggtctgcccgctgggagcggtcctctggcaggcccgcatcatgcctgggatgaggagccgaaacctttgctgtgttcacagtacgagactcttagcgactccgagtag

SEQ ID NO: 197729 - DNA, 7542 bp, synthetic construct
  misc_feature 1..7542: note = Description of Artificial Sequence: Synthetic coding sequence
  source 1..7542: mol_type = other DNA
atgagcggcagcacccagcccgtggcccagacctggcgggccaccgaaccccgatatcccccccatagcttgtcctacccagtgcagattgccaggacccataccgacgtaggactgctagagtatcagcatcactcccgcgactacgcctcccatttgtcaccaggttctatcatacagccacaaaggagacgccctagcctgctgtcggaatttcaacctggcaacgaaaggtcccaggagctacatttgaggcctgaaagccatagttacctccctgaactggggaagtctgaaatggaattcatcgagagcaaacgccccagacttgagctgcttcctgaccctctgctgcgaccttccccactcttagctactggtcagcccgcagggtctgaggacctaaccaaagaccgaagcttgacaggtaagctggaacccgtctcacctccaagtcccccccacacggatcctgagctggagctggtgccccccaggttatcaaaggaggagctcatacagaatatggacagagttgatcgggaaatcaccatggtagaacagcagatcagtaaacttaagaaaaaacagcagcagctggaggaagaagctgctaagcctccagagccagagaagcccgtgtcccctccccccatcgagagtaaacaccgcagcctggtccagatcatttacgatgaaaaccggaagaaggctgaggccgctcatcgcattttggagggattgggcccacaagtcgagctgcctctttataaccagccctctgacacccggcagtatcacgaaaacattaagataaatcaggcaatgagaaaaaaactgattctgtacttcaagcggcgcaaccacgctcgaaagcaatgggagcagaagttctgtcaaaggtacgatcagttgatggaggcgtgggaaaagaaggtggagcgcattgaaaacaacccaaggaggcgagccaaggagagtaaagtaagggagtattacgaaaagcaatttccagagatccgcaagcagagggaactccaggagagaatgcagagcagggtaggccagcggggaagcggactgtctatgagtgcagcccggtcagagcacgaggtttccgagattatcgatggactttcggagcaggagaatctggagaaacagatgagacagctggccgtgattcctcctatgttgtatgatgcagatcagcaaagaatcaaatttattaacatgaacggactaatggctgacccaatgaaggtgtataaagatcggcaagtaatgaacatgtggtcagagcaggaaaaggagacttttcgagaaaaattcatgcagcacccgaagaacttcggtctcatcgccagcttccttgagcgtaagacagtggccgagtgcgtgctctactactatttaactaagaagaacgagaactataagtccctggtgagacggtcttaccgcaggagaggcaaatcccagcagcagcagcagcaacaacagcagcaacagcagcagcagcagcagcaacccatgcctaggagctctcaggaagagaaggatgagaaggagaaagagaaggaggcagaaaaagaggaagaaaagcccgaagtcgagaacgacaaagaagacctcctgaaagaaaagaccgacgatacatccggtgaggataacgatgagaaggaagccgtggcttctaagggaagaaaaactgccaatagccaaggcaggcgcaaaggcaggattaccagaagtatggcaaatgaggctaactccgaagaggctatcacaccgcagcaatccgccgaactggcctctatggagctaaacgagtcaagcaggtggactgaggaggaaatggagactgccaagaaggggctcctggagcatgggcggaactggtctgctatagctaggatggtcggcagcaaaactgtgtcccagtgcaagaatttctattttaactataaaaaacgtcaaaatcttgacgaaatcttgcaacagcataaactgaagatggagaaagagagaaatgctcggagaaaaaaaaagaaagcccctgctgccgctagcgaggaagctgcttttccgccagttgttgaagacgaagagatggaagcgtcaggggtcagtgggaacgaagaggaaatggtagaggaggccgaagcgcttcacgccagtgggaatgaagtacccagaggcgaatgtagtgggcccgccaccgtcaataatagttctgacaccgagagtatcccttctcctcacactgaagccgcgaaggataccggccaaaatggtcccaagccccctgctacactgggggctgacggacccccaccaggcccccccacacctccacgtcgcactagtagacctacagagcccactcctgcctcggaggcaactggcgcccctacacccccccctgctcctccctctccttctgccccaccccccgttgttcctaaggaggagaaagaggaagagactgccgccgccccgcccgtcgaggaaggggaagaacagaagcctcccgctgctgaagaactcgccgtcgataccggaaaagctgaggagccagtgaaatccgagtgcacagaagaggctgaggaggggcccgcaaagggcaaagatgccgaagcagctgaggccactgcagagggtgccttgaaagcagaaaaaaaggaagggggctcaggacgcgcgaccactgctaagtctagcggtgcgccacaggactcggactcttctgctacgtgttcagccgacgaagtggatgaagccgagggaggggataagaatcgtctgctgagccctcgtccttccctgctgacgccgacaggcgatccgcgggctaatgcctccccacagaagccattggacctcaagcagctgaagcagcgggccgcagcgatcccacccatccaagtaacaaaggtacatgaaccgccgcgcgaggacgcagccccaactaaacccgctccgccagctcctcctccgccacagaacttgcaaccagagtctgacgcaccgcaacaaccaggtagttctccccggggaaagtcccggtctcctgcccctcccgcagacaaggaagcttttgcggccgaagcccagaagctccccggtgacccaccttgttggaccagcggcctgcccttccccgtccctcctagggaggtgataaaagcgagccctcatgcccctgatcccagcgctttcagctacgcgccaccagggcaccctctaccactgggactccacgatacagcccggccggtactgccccgaccccccacaatctcaaatccacctccgctcatctctagcgccaagcatccatccgtgttagagcgacaaattggcgcaatttcgcagggaatgtcagtgcagttgcacgtgccctactccgagcacgccaaagcgcctgtgggaccagtcaccatgggcctgcccctaccaatggatccgaagaaactggcccctttctccggggtgaaacaggagcaactatctcctagagggcaggccgggcctccagagtccttaggcgtacccaccgcgcaagaggcctctgttctgcgtggcacagccctggggagcgttcccgggggttccattaccaaaggaatcccatccactagggtcccttcagattccgcaataacttatcgtggatctatcacccacgggacacctgccgatgtcctgtataagggcactattacgcgaattatcggcgaagattctcctagccggctagatagaggaagagaggacagcctgccgaagggacacgtgatttacgagggaaagaaaggccatgtactgagctacgaagggggaatgtctgtaacacagtgttcaaaggaggacggaaggtctagctccgggccccctcatgagacagctgcccctaaacggacgtacgacatgatggaaggacgtgtgggacgggctatttctagcgcgtcaattgaaggattgatggggcgcgccatccctcccgagagacacagcccccaccatctaaaagaacagcaccacattagaggcagcattactcagggcatccccagatcctacgtggaggcacaagaggattacctacggcgtgaggcaaaactgcttaagagagaggggacgccaccacctcctcctccatctagggatctgacagaggcatataaaacgcaagcactcggaccgctgaagctgaagcctgcacatgagggtctggtagcgaccgttaaggaggcgggccgcagcatacacgaaatcccgcgggaagaactgcggcacactcccgaactgcctcttgctccccgccctctgaaggaaggaagcattacccaggggacacctctaaaatacgataccggcgcctccaccactggctccaaaaaacatgacgttcggagtttaattggcagtcctgggcggacttttccacccgtccatccccttgatgtgatggccgacgcccgggccctcgaaagagcttgctacgaggagtctctgaagtcccggcccggaaccgcaagctcctccggggggtccatagcgagaggagcacccgtcattgttcctgagctaggtaagcctcgtcagtcgcccctgacctacgaagatcatggtgccccctttgcaggacatctgcctcgggggagtccagtcaccactagggagccaacaccaagactgcaggaaggatctctttccagtagtaaggctagtcaggatcgcaagttgacctctacacccagagaaattgctaaatccccccattcaacggttcccgagcaccacccccatcccatctccccctacgagcacctcctgcggggcgtctctggggtcgatctatacagatctcatattcctctggctttcgatccaacgagtatcccccggggcattcctctagacgctgcagccgcctactacctacctcggcatttggctcctaaccccacctatccacatctctacccaccttacctgattcgaggttatcccgacacagcagctctggagaacaggcagacaataatcaacgactatatcacctctcagcagatgcaccacaatgcggcaacagctatggcgcagcgggccgatatgttgagagggctgtcaccacgggaatcatcactcgctttgaattacgctgctggtccacgggggatcatcgacctctcacaggtcccccacctccctgtccttgtcccccccaccccagggacgcctgcaactgctatggatcgcctggcctatctgccaactgctcctcagcccttttcctcaaggcactccagctctcctttatcgcccggaggccctacacatttgacaaagccaaccactactagttcctctgagcgggagagggatagagacagggaacgcgacagggatcgtgagcgggaaaagagcattctcacaagcaccactacagtggagcacgcccctatctggagacccgggaccgagcagtcctctggctctagcggaggcggcggcggaagctcctcgagaccggccagccacagccatgcccatcagcattcacccattagccctcgtacacaggatgctctccagcagcggcccagcgttctgcacaacacaggcatgaaggggatcatcactgccgtggagccgtcgacaccaacagttctgcggtccaccagcacttcttcccccgtccgacctgccgccacttttcccccggccactcattgtccccttggagggaccctcgacggggtgtatcccacgctgatggaaccagtcctgttgccaaaagaggccccgagagtggcccgccccgaaaggccccgcgccgacactggtcacgcattcttagcaaagccccccgctaggagtggtctggagccggcaagctccccttctaaagggagtgagccacgcccccttgtcccgcctgtttctggtcacgctacaattgcacgcaccccagctaaaaaccttgccccacatcacgcctctcccgacccacctgcccctcccgcaagtgcgtcagacccccaccgagaaaagacacagagtaaaccttttagtattcaggagcttgagctccggtcattgggttaccatggctcttcatactcccccgagggggtggagcccgtttcccctgtgtctagtccaagcctgactcacgacaaaggtctacctaaacaccttgaagagctggacaaatcccatcttgaaggggagctgcgccccaagcagccgggacccgtgaagctgggtggcgaggcagctcacctgccacacctcaggcccctacccgaaagccaaccgtcctctagtcctctgcttcagaccgcaccaggcgtgaagggccaccagagagtagtgacactcgctcagcacatctccgaagtgataacacaggactacacacgacaccatccacaacaactgtccgctcccctccccgcgcccctgtacagcttcccaggcgcatcctgcccagttctggacttgaggcggcctccttcagatttatacctcccacctcctgaccacggggctcccgctcgaggctccccccacagcgagggcggaaagcgctcccccgaacctaacaaaacatcggtcttagggggaggcgaggatggcattgaacccgtcagtccacccgagggaatgactgagcccggtcattcacggagcgcagtttatccacttctgtatagggacggcgaacaaactgagccatcgaggatgggctccaagtctcccggcaacactagtcaacccccggcttttttttctaaactgaccgaaagcaactccgccatggtgaagtccaagaaacaggagatcaacaaaaaactcaacacacataatcgcaatgagcctgagtataacatttcacagcccggaaccgaaattttcaatatgcccgcaattaccggcacgggtctgatgacttaccgttcacaggctgtgcaagagcacgcatccactaacatgggactggaagccatcattaggaaagctttaatgggtaagtatgaccagtgggaagagtccccccccctaagcgctaatgcgtttaacccactcaatgccagcgcctctctgcctgcggccatgcccatcaccgcagccgacggccgctcagaccacacactcaccagtccgggaggaggagggaaagccaaagtgtccgggaggccaagctctcgtaaagctaagtctccggcaccggggctagcctccggtgaccggccaccaagcgttagttccgtccatagtgaaggcgactgcaacaggcgcacacctttgacaaaccgagtctgggaggatcgaccaagttccgccggctctacccctttcccttacaacccactgatcatgcgtctgcaggccggcgtcatggcatcacctccccctccaggcctcccggcaggcagcggccccctcgcgggtccccaccacgcctgggacgaagagcctaaaccgctgctttgttcacagtatgagaccctgagcgacagtgagtag

SEQ ID NO: 197730 - DNA, 1821 bp, synthetic construct
  misc_feature 1..1821: note = Description of Artificial Sequence: Synthetic coding sequence
  source 1..1821: mol_type = other DNA
ctgcagagcggcgccacccactgccccctgggcggcaccctggacggagtctatcccacactcatggaacccgtactactgccaaaggaagccccgagggtggccaggcctgagcgccctcgggccgacaccggccacgcttttctggccaaaccacccgcacgttccggccttgaacccgctagcagccctagcaaaggaagcgaacctcggccacttgtgccccctgtttctggacacgcgacgatagctaggactcctgccaagaatctggctcctcatcatgcatcacccgatccacctgccccaccggctagcgccagcgatccacaccgagagaagacacaatccaagcccttcagcattcaggagctggagcttcggagcctcggctaccacgggtcaagctactcccccgagggggtggaacccgtatcaccagtcagcagcccctcccttactcacgacaaagggctgccaaagcatctagaggagcttgacaaaagtcacctggagggtgagctcagacccaaacagccaggaccagttaagcttggcggggaggccgcgcacctcccacatttgcggcccctgcccgagtctcagccatcaagcagccctttgctgcagacagctccgggcgtgaaaggtcaccaacgggtggtaacacttgctcaacatattagcgaggttattacccaagattacactcggcatcatcctcagcaactgtccgcacctttacccgctcccctttactcttttcctggagccagttgtcccgtcctggacttgcgccgccccccgtccgacctgtaccttcctcctccggatcacggtgctcccgctcggggtagtccacactctgagggcggcaaaagatctcccgagcctaataaaacatctgttcttggcggtggggaagatgggatcgagcctgtgtcccctcctgaaggcatgactgaacctggccactccaggtcagctgtgtacccccttttgtaccgggacggagagcagacagaaccctctagaatggggtccaagtctccaggcaacaccagccagccacccgcctttttctcaaaattgaccgagagcaactcagccatggtgaaaagtaagaagcaggaaatcaataagaagctgaatacccataacagaaatgagcccgagtataacatcagccagcctggcaccgagattttcaatatgcctgccatcacggggacaggacttatgacgtacaggagccaggctgtccaagaacacgcgagtacgaatatgggtctcgaagcgatcatacgaaaggccctgatgggcaagtacgatcagtgggaggaaagtccccccctgtctgccaatgcctttaaccccttaaatgccagcgcatctctgcctgcagccatgcccatcacagccgctgacgggagatccgatcacacactgacttctcctggaggaggcgggaaggcaaaagtgtcaggaaggccctccagccgaaaggctaagtcaccggctccaggacttgcaagtggggaccgccctccatcagtgagctctgtacactccgagggcgactgtaataggaggactccattaacaaatcgggtatgggaggacaggcctagttcagctggcagcaccccgttcccttataatccccttatcatgaggctgcaagctggagtcatggcatccccaccaccccctggtctgcctgcaggatcaggacccctggccggaccccaccatgcatgggatgaagaaccaaaacccctgctgtgttctcagtatgagacactatcagacagcgagtag

SEQ ID NO: 197731 - DNA, 726 bp, synthetic construct
  misc_feature 1..726: note = Description of Artificial Sequence: Synthetic coding sequence
  source 1..726: mol_type = other DNA
atgttctacagcggcctgctgaccgagggcggccggaaggagaccgacatgagagaggctgcatctctgcgccaacagagacgaatgaagcaagccgtacaattcatccacaaagactccgccgatctcttgccgctcgacggcctgaagaaactcgggagcagcaaggacatgcagccacataacatactccagcgcagactgatggagacgaatctgagtaagttacgctcgggaccccgagtgccttgggccagtaagactaacaagctcaaccaagctaagagtgaaggcttaaagaagtcggaggaggacgatatgattctggtgtcatgtcagtgcgccggcaaagacgtcaaagcgctggtcgacaccggatgcctgtataatctgatttctctggcctgtgttgaccgactgggactgaaggagcacgtaaagtctcacaaacatgagggtgaaaaattgtcactgccgcgacacctaaaagtggtggggcagatcgagcacctcgtgatcaccctgggcagcctcagactggactgtcctgccgcagtcgtggatgataacgaaaagaatctttcattagggttacaaacgctgcgatcacttaaatgcatcatcaatctcgacaaacatcgtctgatcatgggtaaaacagacaaagaagaaatcccttttgtcgagaccgtgtccctcaacgaggataacacttccgaagcatag

SEQ ID NO: 197732 - DNA, 774 bp, synthetic construct
  misc_feature 1..774: note = Description of Artificial Sequence: Synthetic coding sequence
  source 1..774: mol_type = other DNA
atgagcaccagccagcccggcgcctgcccctgccagggcgccgccagcagaccagcaatcctctatgccctgttatcatcctccctcaaagctgtacccaggccgcggtctcgctgcctctgtcgccagcaccgaccagtccagctatgtgctccccacaggacctgccgcgaagccctggacgtgctcgccaagacagtcgcctttctacggaatcttcccagtttctggcaactgccccctcaagatcagcgcagactattgcaggggtgttgggggccactgttcttgctgggactagcccaggacgcagtgacctttgaggtggccgaggcccccgtgccatccatactgaaaaagatattgctcgaagagccatcgtcaagtggcggcagcggacagctgcccgaccgcccccagccttcactagcagctgtgcagtggttacaatgttgtttagagtccttttggagcttagaactctcaccaaaggagtacgcctgcctcaaggggacaattctgttcaatcccgatgtgcccggattgcaagctgccagccacatcggtcacttgcagcaggaggctcattgggttttatgtgaagtgctcgaaccctggtgtccagcggcccaggggagactcacaagagtgctattgaccgcctccacactgaaaagtatcccaaccagtctgctaggggatttgttttttaggcctattattggggacgtggacatcgccggcttattaggtgatatgcttctgctgcgctag

SEQ ID NO: 197733 - DNA, 1845 bp, synthetic construct
  misc_feature 1..1845: note = Description of Artificial Sequence: Synthetic coding sequence
  source 1..1845: mol_type = other DNA
atgaccaccctggacagcaacaacaacaccggcggcgtgatcacctatatcggttcttctggctcctctccatcacggacatcgcccgagagcctttatagtgacaacagcaacggatcttttcagtcgctaactcagggttgccccacctactttccccctagccccaccggatccctgacgcaggatcccgccagatccttcggatccatcccgcccagtctgtcagacgatggatccccaagcagctcctcatcctcttcgagtagctctagcagcttttataatggctcccccccaggctccttgcaggtggctatggaggactcctccagggtgtccccatctaaatctacatcaaacattacgaagctaaacggcatggtcttgctttgcaaggtgtgtggtgatgttgctagcggcttccactacggagtgcacgcctgcgaaggatgtaaaggattctttaggcggtcaattcaacagaatattcaatacaagagatgcctcaaaaacgagaattgcagcattgtgcggattaacaggaaccgctgccagcagtgtagatttaagaaatgcctttctgttggcatgtctcgcgatgccgtgcgctttggcaggatcccaaaaagagagaagcagagaatgctggccgagatgcagagcgccatgaacctcgctaacaatcagctctcatcacagtgcccactggaaacctccccaacccagcaccccacacctggaccaatgggaccctcgcccccccccgcacctgtgccctctcccttagtggggtttagtcagtttcctcagcagctgacacctccaagaagcccgagtccagagcctactgtagaggatgtgatctctcaggtcgcacgagcccatcgggaaatttttacctacgctcacgataagctaggctcaagccccggtaattttaacgccaatcatgcctccggctcccctcctgctactaccccacaccggtgggaaaatcagggttgccctcccgcccccaatgacaataacacattggccgcccagcggcataatgaagctctaaatggcctgcgtcaagcaccaagttcataccctccaacgtggcctccgggtccggcccaccacagctgccatcaaagcaattcaaacggacataggttatgtccaacacacgtttacgctgcccccgaaggtaaagccccagcgaacagtccccgacaggggaacagtaaaaatgtcctgttagcttgccctatgaacatgtacccccacggaagatcagggcgtaccgttcaggaaatctgggaagatttcagcatgtcttttaccccagcagtcagggaggtcgtggaattcgctaagcatattccaggctttagagatctcagccagcacgaccaggttactctgctgaaagcgggtacattcgaggtcctgatggttcggttcgccagcttgttcaatgttaaggatcagacagtcatgttcctatccaggactacatattctctacaagaactgggagctatggggatgggtgacctgctaagcgcaatgtttgatttcagcgaaaaactgaattccttggccctaaccgaggaggagctcggcctgttcactgcggttgtgctggtgtctgccgatcgtagcgggatggaaaattcagcatctgtggagcagctccaggagaccttgctccgggctctgagggcactggtgctaaaaaataggccgctagagacctcccggtttacaaagttactcctgaaacttccagacctgcggacgcttaataatatgcacagcgagaaactgctgagcttcagggttgatgctcaatag

SEQ ID NO: 197734 - DNA, 1383 bp, synthetic construct
  misc_feature 1..1383: note = Description of Artificial Sequence: Synthetic coding sequence
  source 1..1383: mol_type = other DNA
atgagcagccccaccaccagcagcctggacacccccctgcccggcaatggtccacctcaaccaggagcccccagcagttccccgacagtgaaagaagagggtccagaaccctggccaggtgggcccgatcccgatgtgcccggtaccgacgaggctagttcggcctgctccacagactgggtcatccctgaccccgaggaggaacctgaaaggaaaaggaagaaaggacctgctcccaaaatgttgggccacgaactgtgcagggtgtgtggagataaggcaagcggattccactacaatgtgctttcctgcgaaggatgtaaaggatttttccgacggtccgtggtgcgtggcggagcacgaagatatgcatgtcgcggcggtggaacctgccagatggacgcttttatgcgccggaagtgccaacaatgcagattgagaaagtgcaaggaggcaggcatgcgcgagcagtgcgtactgtctgaggaacagatccgcaagaaaaaaattagaaagcagcagcaagagtctcaatcacagtcgcagagtccggtggggccacagggaagcagctcttcagccagcgggcctggggcttcccccgggggtagcgaagcgggatcacaggggtccggggagggagagggggtgcagctaactgctgcacaggagctgatgatccagcagcttgtcgccgcccagctacagtgcaacaagaggagcttctccgatcagccaaaggtgaccccctggccattgggtgcagatccacagagccgcgacgctagacagcagagatttgcccatttcaccgagctggccataatctccgtgcaggagatcgtggacttcgccaagcaagtgcctggtttcttgcaattaggaagggaggaccagatcgctctcctgaaggctagcacaatcgagataatgttgctcgagaccgcacggcggtataatcatgagacggagtgcatcacttttctaaaggactttacatacagcaaagacgacttccaccgggctggactgcaggttgaattcataaatccaattttcgaatttagcagggctatgcggcgcctcggattagacgacgccgagtacgccctgctcatcgccatcaacatctttagtgctgatcgccctaatgtccaggagcccggaagggtagaggctctgcagcagccatacgttgaggccctgctcagttacactaggatcaagcgaccacaagatcaattaaggttcccaaggatgctgatgaaactagtcagtctgcgtaccctttcatccgtccacagcgagcaagtgtttgcgctgcggctgcaagataagaagcttcctccattgctgagcgagatttgggacgtacatgagtag

SEQ ID NO: 197735 - DNA, 1377 bp, synthetic construct
  misc_feature 1..1377: note = Description of Artificial Sequence: Synthetic coding sequence
  source 1..1377: mol_type = other DNA
atgagcagccccaccaccagcagcctggacacccccctgcccggcaacggccccccacagccaggggcaccctccagctcacccacggtgaaggaggaggggcctgagccatggcccggaggcccagaccccgacgtgccaggaacagacgaggcgtcttctgcttgctctacggattgggtgatcccagatcctgaggaagaacctgaacggaagagaaagaagggtccggctcctaaaatgctgggccatgaactgtgcagggtgtgcggagacaaagcatccggttttcactacaatgtgctgagctgtgaaggttgtaaaggcttcttcaggcgctcggtcgtgcgcggaggtgctcggaggtacgcttgcagaggaggcggaacttgtcaaatggatgcatttatgagacgcaaatgccagcagtgccggctccggaaatgcaaagaggcagggatgcgcgagcagtgtgtgctgtcggaggagcagattcgaaagaaaaaaattcggaagcagcagcaggagtcgcagagccagtctcagagccccgttggacctcaggggtcttccagtagtgcctccggtccaggcgcatcgcccggcggctcggaggcaggctctcagggcagtggcgagggagagggagttcagcttacggctgcccaggagctcatgattcaacaactggtagccgcgcagcttcaatgtaacaagcgatcttttagcgaccagccgaaggtcaccccatggccattgggcgccgaccctcaatctcgggatgctaggcagcagcgctttgcccactttacagagctggcaattatctctgtacaggagattgtggattttgccaaacaggtgccaggcttcttacagcttggtcgagaagatcaaatcgcattgttgaaagcatcgactatcgaaattatgctcctggagaccgctcgtcgctataaccacgaaacagagtgtatcacatttctgaaagattttacttattcgaaagatgattttcacagagccggccttcaggtcgaatttatcaatccaattttcgaattttctcgcgctatgcgacgcctgggactcgacgatgctgaatatgccctgttgatcgccatcaacattttttcagccgatagaccaaatggtgcaggaccacggggtggtgtggctgctgccttgagaggaggcgctgccgttctgcatgctcaccaagaagccgctgatcagctcagatttcccaggatgttaatgaaattggtctctctcagaacactgtcctccgtgcactcagagcaggttttcgccttacgattacaggataagaagttacctcctctgctaagcgagatctgggatgtccatgagtag

SEQ ID NO: 197736 - DNA, 1092 bp, synthetic construct
  misc_feature 1..1092: note = Description of Artificial Sequence: Synthetic coding sequence
  source 1..1092: mol_type = other DNA
atgagcagccccaccaccagcagcctggacacccccctgcccggcaacgggcctccacagccgggtgctcccagcagctcaccaaccgttaaagaggagggtccagaaccatggccaggtggcccggatccggatgtccctggaacggatgaggcctctagcgcctgcagcacagactggggcgttctttctgaggagcagattcggaaaaaaaagattcgaaagcagcagcaggaaagccagtctcagtcccaatccccagtaggacctcaagggtcatcatcctcagcatcgggccctggcgctagccctggcgggagcgaggccggcagccagggtagcggtgagggggagggggtgcaactcacagccgcacaagaattgatgattcaacagttggtcgccgcccaattgcagtgcaataaaaggagttttagtgatcaacctaaagtcacaccctggcctctcggcgccgatcctcagtcaagagacgcaagacagcagaggttcgcacatttcactgaactggctatcatttccgttcaggaaatcgtggattttgccaagcaggtcccaggctttctacagttgggtcgggaggaccaaattgccctgctgaaggctagcacaattgagatcatgttattagaaactgccaggaggtacaaccacgagacagaatgcattacgttcctgaaagattttacttactcaaaggatgattttcatagggccggtctgcaggtggagttcatcaatcctattttcgaatttagtcgtgcaatgagacgtctgggcctcgacgacgccgagtacgccctcctgatagcaatcaatattttcagtgccgaccgacctaatgtacaagagcctgggagggtggaagcgctgcagcagccctacgtggaggccctcttatcatacaccagaatcaagcgtcctcaggatcagttgcgattcccgagaatgcttatgaagctagtctcactccgaactctgtcaagcgtgcactccgaacaagtgttcgccttacggctccaggacaaaaagctgccaccactgcttagcgagatctgggatgtccatgagtag

SEQ ID NO: 197737 - DNA, 576 bp, synthetic construct
  misc_feature 1..576: note = Description of Artificial Sequence: Synthetic coding sequence
  source 1..576: mol_type = other DNA
atgatccagcagctggtggccgcccagctgcagtgcaacaagcggtctttctccgatcaacctaaggtgacacttggccgcgaggatcaaatcgctctgctgaaggcttccacaatagaaattatgttactggaaactgcaagacgctacaatcacgagaccgaatgcattacgttcttgaaggacttcacctacagtaaagatgatttccatagagccggactccaggtcgagttcataaaccccatttttgagttttcccgggccatgagaagactcgggctggacgatgcggaatatgctctgctaatcgccatcaacatcttttccgctgatcgcccgaatgtgcaggagcctgggagagtcgaagcgctgcaacaaccctatgtggaggccctgctgtcgtatactaggattaagagaccccaggatcaactgcgatttcctagaatgctgatgaagctcgtgagtttgaggaccttgagctctgtccactcagagcaggttttcgcgctgcgtctgcaggacaaaaagctcccacccctgctctcagaaatctgggatgttcacgaatag

SEQ ID NO: 197738 - DNA, 1422 bp, synthetic construct
  misc_feature 1..1422: note = Description of Artificial Sequence: Synthetic coding sequence
  source 1..1422: mol_type = other DNA
atgaccgtgacccggacccaccacttcaaggagggcagcctgcgggctcctgcgatcccactgcatagcgccgcagccgaattggcttctaaccatccccgggggccagaggccaatctggaggtgaggcctaaggaatcgtggaatcatgcagattttgtgcactgcgaggatacagagtctgtgcccggcaaaccttcggtcaatgcagatgaggaagtgggagggccgcagatttgtcgggtgtgcggtgacaaagctaccggataccacttcaatgttatgacctgtgaagggtgcaaaggcttttttagaagggcaatgaagcgcaacgctaggcttagatgcccgttcagaaagggggcatgtgagatcaccagaaagactaggaggcaatgtcaggcttgtagacttcggaaatgtctagaatctggaatgaagaaagagatgataatgtctgacgaggcagtcgaggagcggcgcgccctaatcaagcgaaaaaaatccgagcgaacaggaactcagcccctaggcgtgcagggattgacagaagagcagcggatgatgatacgagaactcatggacgcgcagatgaagacctttgacacaactttctctcacttcaagaactttcgactgccgggagttcttagctctgggtgtgaactgcccgagtcccttcaggctccttcgcgtgaggaggccgctaaatggtctcaggtcagaaaggatctgtgttctctgaaagtctctctgcagctcagaggagaggatggctccgtctggaactataaaccacccgcggactcaggaggcaaagaaatcttttctctgctgccacacatggcagatatgagcacgtacatgtttaaaggcatcatttcattcgccaaagtgattagctatttcagagacttacctattgaagatcagatcagtctgctgaaaggtgctgccttcgagctgtgccagctgaggttcaatactgtcttcaatgctgagactggaacttgggagtgtggaagactgagctattgcctagaggatactgccgggggcttccagcagctgcttttggagccaatgctcaagtttcactacatgctgaagaaattgcagcttcatgaagaagagtatgtcctgatgcaggccatctctctgttctctcccgatcggccaggcgtgctccagcatcgcgtggtcgaccagttgcaagagcagttcgctatcaccttaaaatcttacatcgagtgtaacaggccccagccagcccatagattcctgttcctgaaaataatggcaatgctcaccgagctcagaagtataaacgctcagcatacccaacgcttactcaggatacaggatatacaccccttcgctaccccactcatgcaagaactgtttggaatcacaggaagttag

SEQ ID NO: 197739 - DNA, 1305 bp, synthetic construct
  misc_feature 1..1305: note = Description of Artificial Sequence: Synthetic coding sequence
  source 1..1305: mol_type = other DNA
ctggaggtgcggcccaaggagagctggaaccacgccgacttcgtgcactgcgaggacaccgagtccgtgcccggcaagccctccgtaaatgccgacgaagaagtggggggaccccaaatctgtagagtctgcggcgacaaggccaccggctatcatttcaatgtgatgacttgcgaaggatgcaaggggttcttccggcgggccatgaagagaaatgctcgactccgttgtcccttccggaagggtgcctgcgaaattactagaaagacacgccgccagtgtcaggcctgtcgactaagaaagtgcctcgagtccggtatgaaaaaggagatgattatgtccgatgaggccgttgaggagaggcgggctctgataaagaggaagaaatctgagcggacggggactcagccattaggcgtgcaaggcttaactgaggagcaacggatgatgatccgcgagctcatggacgctcagatgaagacctttgataccaccttcagccacttcaaaaattttcggctgcccggagtcctgtcctccggttgcgagctgcccgaatccctccaggccccatcccgggaggaggcagcaaagtggtctcaggtacgtaaggacctgtgtagtctaaaggtgtccctgcagcttcgaggggaggacgggtccgtgtggaactacaagccccctgctgattcaggcgggaaagagattttctccctactgcctcacatggctgacatgtccacttacatgtttaagggaattatctcctttgccaaggttatcagttactttcgggatctgcccatcgaggaccagatcagccttctcaaaggtgcggccttcgagctttgccagctgaggtttaacaccgtcttcaacgccgaaacaggaacctgggaatgtggaaggctgagttattgcctggaggacacagctggcggattccaacagcttctgctggagcctatgcttaaatttcattatatgcttaaaaaactgcaactgcatgaagaagagtacgtcttaatgcaagcgatttccctcttctccccagacagacccggcgtgttacagcacagggtggtggatcagctgcaggagcagttcgccatcacgctcaagagctacatagaatgtaatcgcccacagcctgctcatagatttctgtttctcaagataatggccatgcttaccgagctgcgctcaataaacgctcaacatacccagcggttgctgaggatccaggacattcacccgtttgccacccccctcatgcaggagctgttcgggattaccgggtcatag

SEQ ID NO: 197740 - DNA, 1194 bp, synthetic construct
  misc_feature 1..1194: note = Description of Artificial Sequence: Synthetic coding sequence
  source 1..1194: mol_type = other DNA
ctggaggtgcggcccaaggagagctggaaccacgccgacttcgtgcattgtgaggatacagagtcggtccccggcaagcctagcgttaacgccgacgaggaagtcggaggcccgcagatctgtagagtctgtggagacaaagccaccggctaccacttcaatgttatgacttgcgaggggtgcaaaggcttcttcagaagagccatgaaacgcaatgccagactgcgctgcccttttcggaaaggcgcctgtgagattacacgtaagacgcggcggcagtgccaggcctgcagactcagaaaatgtctggagtcaggcatgaaaaaggagatgattatgtcagacgaggcagtcgaagagagacgggccttgattaagcggaaaaagtctgagagaacaggcacccaacctctaggtgtccaaggcctcacggaagaacaacgaatgatgattagggaattgatggatgcccagatgaaaacctttgatactacatttagccacttcaaaaacttcagggtctctctgcagcttcgcggtgaggacggttccgtgtggaattataagcctcccgctgatagcggaggcaaggagatcttttctctgctgcctcatatggcagatatgagcacttatatgttcaagggaataataagcttcgccaaggtcatctcctacttcagggaccttcctatcgaagatcagataagcctgttgaagggtgcagcttttgaactttgccagctgagatttaatactgtgtttaacgccgagacaggcacatgggagtgcggcagacttagctattgcttagaggatactgccggcgggttccagcagttgctcctcgagcccatgctgaaatttcactacatgctgaaaaaactgcagttgcacgaagaggagtacgttttgatgcaggccattagtttattcagtccggatagacccggggtgctgcagcaccgagtagtggaccaactgcaagagcaattcgccatcactctaaagagttatattgagtgcaaccggccccagccggcacatagattcttgtttctgaagattatggcaatgctgaccgagctgcggagcatcaatgcccagcatactcagcgtctgcttaggatccaggatatacatccatttgccactcccctgatgcaggagctattcgggataaccggttcctag

SEQ ID NO: 197741 - DNA, 1848 bp, synthetic construct
  misc_feature 1..1848: note = Description of Artificial Sequence: Synthetic coding sequence
  source 1..1848: mol_type = other DNA
atgaccagccccagcccccggatccagatcatcagcaccgacagcgccgtcgcctccccgcagcgcattcagggaagcgaaccagcctctggacccttgtctgtgttcacttcccttaataaggaaaagatcgtgacagatcaacagaccggccagaagatacaaattgttacggccgtcgatgctagcgggtctccaaaacagcaatttattcttacctcgccggacggggccgggactggaaaggttattctggccagccctgaaacatcttctgcaaagcagctgatttttacgaccagtgacaatctggtcccaggaagaatccagattgtgaccgacagcgcttctgtggagcgactgctaggcaagactgatgtgcagaggccccaggtggtggagtactgcgtggtgtgcggggataaggcctcaggccgacattatggagctgtcagctgcgagggatgcaagggattttttaaacgatctgtccgtaagaacctgacctacagctgccggagcaaccaagactgcatcatcaacaagcatcaccgcaataggtgtcaattctgtagacttaagaagtgcctcgaaatgggcatgaaaatggagtctgtccagagtgagaggaaaccttttgacgtacaacgagagaagcccagtaactgtgcagcctcgacggagaagatttatattcggaaggaccttcgttcccccctcatcgctacccccactttcgtggcagacaaggacggagcacggcagactggtcttcttgatcccgggatgctggtaaatatccagcaaccgttgattcgggaggacggaaccgtgctgctggccactgattcgaaagctgagacatctcagggcgccctgggcactttggcgaacgtcgtgacctcgctggccaacctgtccgagtctctcaataacggcgataccagtgaaatccagccagaggatcaatcggcttccgaaatcacgagggcctttgacaccctggccaaggcccttaatactactgacagttccagttctccctccctggctgacgggatcgatacctcagggggcggatccattcacgtaattagccgcgaccagtcaactccaatcattgaagtagaaggaccactcctgtcagacactcatgtaacattcaagctgacaatgccaagccccatgccggagtatctgaacgttcactacatctgtgagagcgcttctcggctcctattcctttctatgcattgggctagaagcattcccgcattccaggccctgggacaggattgtaacacatcactggtccgcgcgtgttggaacgaattgttcacgcttggcctcgcacagtgcgcacaggtgatgtcactctcaaccatcttggccgcaattgtcaaccaccttcagaacagtattcaggaagataaactgagcggggaccggatcaagcaggtgatggagcacatttggaagctccaagaattttgcaacagcatggcgaagctggacatcgacgggtacgagtacgcatacctcaaggccattgtgctctttagcccagatcacccaggactgacaagtacatcacaaatcgagaaatttcaggaaaaggcgcagatggagttacaggattacgttcagaagacctattcagaggacacttatcgtctggcccggatcctggtacgactccccgccctacgtttaatgagttccaacataactgaggaactcttctttactggactgatcggtaacgtgtcaattgacagtattatcccatatatcctgaaaatggagacagccgaatacaatggtcagattactggcgcttcactgtag

SEQ ID NO: 197742 - DNA, 1791 bp, synthetic construct
  misc_feature 1..1791: note = Description of Artificial Sequence: Synthetic coding sequence
  source 1..1791: mol_type = other DNA
atgaccagccccagcccccggatccagatcatcagcaccgacagcgcggtggcatctccccaacgcattcaaatcgtgactgaccaacagactggtcagaagattcagatcgttaccgcggtggacgcctcaggtagcccgaaacagcagtttattttgacttcaccggacggagcgggcacaggaaaggttatacttgcttctccggagactagttcagccaagcagctgatcttcactacatctgacaacctcgtgcccggccgtatccaaattgtaacggatagtgcgtctgtcgagagactgcttggtaagaccgacgtgcaacgcccccaggtagtcgaatactgcgtcgtttgcggcgataaagccagcgggcgccattatggcgccgtgtcatgtgagggctgtaaaggattctttaaacggagcgtgaggaagaacctgacctatagctgccgaagcaaccaggactgcatcatcaacaagcatcaccgtaatcgatgccagttttgtcggctcaagaaatgcctggaaatgggcatgaagatggaatcggttcagtcagaacgcaaaccttttgacgtgcagcgagaaaaaccttcaaactgtgccgcatctaccgaaaagatttacatccgaaaagacttgagatcaccgctgatagcgacccccaccttcgtggcggacaaggacggggccagacaaaccggacttctggaccccggaatgcttgtcaacatccagcagcccttgattagagaggatggtaccgtcttgcttgccacagactccaaggctgaaacaagccagggagccctcggaacattagccaacgtcgttacgtccctggcaaacctttccgaatccctgaacaacggtgatacttctgaaatccaacccgaggatcagtcagcttcggagataacccgcgccttcgatacgctagctaaggcactgaacactaccgattcatcctccagcccgtccctggccgatggcatcgatacgtcaggaggtggatcaatacacgtcatcagccgtgatcaaagtactcctattatcgaagtggagggaccactcctttctgatacccatgtgaccttcaagctgacaatgccatcgcctatgcccgaatatttaaatgtgcattacatttgcgagtccgcttcaagattgctctttctgtctatgcactgggctcgcagcatccccgcctttcaggcgcttggtcaggactgtaacacatctttagtccgggcttgctggaatgagctgttcactctgggactggcccaatgtgcacaggtgatgtcactctcaaccattctggccgctattgtcaaccacctccagaatagcatccaggaggacaagctgtctggcgatcggattaaacaggtgatggagcacatttggaaacttcaggaattctgtaacagcatggctaagctcgacatagacgggtatgaatacgcttacctgaaggcgatcgttctctttagtcccgaccacccaggcttgactagtacgtcgcaaatcgagaagttccaggaaaaggcccagatggaactccaggattacgtgcagaaaacttacagcgaggacacatacagactggcaaggattctcgtacgcctgcctgcactccgattgatgagttccaacatcacagaggagctcttcttcactggtctgattggaaatgtgtctatcgattctatcattccatacattctcaaaatggagacagctgagtacaatggccagattacaggggcctccctgtag

SEQ ID NO: 197743 - DNA, 1791 bp, synthetic construct
  misc_feature 1..1791: note = Description of Artificial Sequence: Synthetic coding sequence
  source 1..1791: mol_type = other DNA
atgaccagccccagcccccggatccagatcatcagcaccgacagcgctgtggccagcccacaaagaatccagatcgtgactgaccaacagaccgggcaaaagatccagattgtcacagctgtcgacgcctcgggtagtcctaagcaacagttcattctgactagccctgacggcgcagggacagggaaggtgatactggcttccccggagacatcttcggccaagcagctgatcttcaccacctcggataatctcgtcccaggaagaatccagatcgttaccgattctgcaagcgtggagaggttgcttggaaaaactgacgtgcagagaccacaggtagttgagtattgtgtggtgtgcggtgacaaggcctccgggagacattatggggcggtctcctgtgaaggctgtaaggggttctttaaacgatctgtgcggaagaatctgacatatagctgtcggtctaaccaggactgcatcatcaacaaacaccacaggaacaggtgtcagttctgtagactcaaaaagtgtctggaaatgggaatgaaaatggagtcggtgcaatctgaaagaaagccattcgatgttcagagggagaaaccgagcaattgtgccgccagcaccgagaagatttatatacggaaagatctcaggtcccctctaattgcgacgcccacatttgttgccgataaggacggagcaaggcaaacaggactactggatcctggcatgttggtgaatatccaacagccattgatacgagaggacggaaccgttctgctggctacagacagcaaagccgaaacctcacagggcgcactagggacactggcaaatgtggtgacaagcctggccaatctaagtgagtcactgaataatggggacacctctgaaatccagccagaggatcagtctgcctccgagattactcgggccttcgacaccctagcaaaggcacttaatactactgactcatccagctcaccgtcactggctgatggcattgacacaagtggtggaggctctatccacgtgatcagtagggaccagtctaccccaattatcgaggttgagggacctctgctttcagatacacatgtgaccttcaaactcacaatgccctcccccatgcccgaatatctcaacgtacactatatctgcgagtccgcatcaagacttcttttcctgtcaatgcactgggcccgcagcatccctgcattccaggctcttggccaggactgcaatacaagtctggttcgcgcctgctggaatgagctgttcactctgggcctggcccagtgcgcgcaagtaatgtccctatctaccatcctggctgcgatcgttaaccatttgcagaattccatccaggaggacaagctgagcggcgaccgcatcaaacaagtaatggagcatatttggaaactgcaggagttctgcaatagcatggcaaagctggatattgacggttacgagtatgcctacctcaaagctattgtccttttttctcccgaccatcccggcctaacatcaactagtcagattgagaagtttcaggagaaggcacaaatggagctccaggactatgtacagaagacttattccgaggacacctacagactggcacgtattcttgtcaggttgcccgcacttaggttgatgagctctaatatcaccgaagagctgttttttaccgggctgattgggaacgtctcaatcgattccattattccctacatcctgaagatggagaccgcagagtacaatggccaaatcactggcgcatctctttag

SEQ ID NO: 197744 - DNA, 1791 bp, synthetic construct
  misc_feature 1..1791: note = Description of Artificial Sequence: Synthetic coding sequence
  source 1..1791: mol_type = other DNA
atgaccagccccagcccccggatccagatcatcagcaccgacagcgcggttgcctctccgcagcgcatccagattgtcacagatcaacagacaggtcaaaagatccaaatcgtgacggcagttgacgcctcggggtccccgaaacagcagttcattctgacaagccctgacggtgccggcactggaaaagtgatcctcgcgtctcccgagaccagctctgccaagcagctcatcttcaccacctccgataacctggtgccaggacggatacagattgttaccgatagcgccagcgtggagcgacttctaggtaagaccgatgtgcagcgcccgcaggtggtggagtactgtgtggtatgcggtgataaggcatccggtaggcattacggcgccgtttcctgcgagggctgtaaggggtttttcaaaagaagtgtgcgaaagaatctcacctattcctgtagatctaaccaagattgcataatcaataagcaccatcgcaaccgatgtcagttctgtagacttaagaagtgcctggagatgggaatgaaaatggaatctgtccagagcgaacggaagccattcgatgtccagcgggaaaaacccagtaactgcgctgcaagcacagaaaagatttatattcggaaggatcttagaagccccctgatcgccactccgactttcgtggccgacaaggatggagcccggcaaacagggcttctggacccgggcatgctggtgaacatccagcagcccctgattcgcgaggacggtaccgtccttctcgccacagatagtaaagcagagacttcccagggcgctttaggtacacttgcaaacgtcgttacaagcctggccaacctttctgagtccttaaataatggcgacacgtctgagatccaacccgaggaccagtctgcctcagaaattacgagagccttcgacacacttgcaaaagctctcaacacaaccgattcttcgtcttctcccagccttgccgatggtattgatacttctgggggaggtagcatccatgttatcagcagggaccagtcaactcccatcattgaggttgagggcccactgcttagcgacactcacgttacatttaagttgaccatgcccagcccgatgccagaatacctcaatgtgcattatatttgtgaatccgcgtcccgactgctgttcctttctatgcactgggcgcggtcaatccctgcgtttcaggctttgggacaggactgcaacacttctttggtacgcgcctgctggaatgaactgtttacactgggactggcgcagtgtgcccaagtgatgtcgttatcaactatcctcgcagccatcgtgaaccatcttcagaacagcatccaggaggataaattgtccggagatcggatcaagcaggtcatggagcatatttggaagctgcaggagttctgtaattctatggctaagttggacatcgatggatatgaatacgcttacttaaaggctattgttctgtttagtccagaccatccaggactgacgtctacaagtcaaattgaaaagttccaagaaaaagcgcagatggagctccaggattatgtgcagaaaacttatagcgaggacacatatcgcctggcacgcattttggtgagactacctgctcttcggctaatgtcatccaacatcaccgaggaactgtttttcacagggctgattggaaatgtgtccatcgattcgatcataccatacattttgaagatggagacagctgagtataacgggcagattaccggcgcatccctctag

SEQ ID NO: 197745 - DNA, 111 bp, synthetic construct
  misc_feature 1..111: note = Description of Artificial Sequence: Synthetic coding sequence
  source 1..111: mol_type = other DNA
atgaccagccccagcccccggatccagatcatcagcaccgacagcgcagtcgcctccccacagagaatccagggctcggagccggcctccgggcctctcagcgtgttttag

SEQ ID NO: 197746 - DNA, 618 bp, synthetic construct
  misc_feature 1..618: note = Description of Artificial Sequence: Synthetic coding sequence
  source 1..618: mol_type = other DNA
atgaccagccccagcccccggatccagatcatcagcaccgacagcgccgttgcaagtccacagcgaattcagggcagcgagccagcatccggtccactgagtgtgtttacatctctgaacaaggagaagatagtgacggatcaacagactggccagaaaatccaaattgtgacggcggttgacgcctcagggtctcccaagcagcaatttattttgacttccccagatggggcaggtactgggaaggttatcctggcttccccggagaccagcagcgccaaacagctgattttcaccacatcggataacctggtgcctggaagaatccagatcgtgactgatagtgccagcgtggagcggttgctggggaagactgacgtccaacgacctcaagtggtagaatattgcgtagtgtgcggagataaggcctctgggcggcactacggcgctgtgtcctgcgaggggtgcaaaggcttcttcaagagatccgtgcgcaagaatttgacttatagttgtagaagcaaccaggattgcataatcaataaacatcatagaaatcgctgtcagttctgtcggcttaagaagtgcttggaaatgggcatgaaaatggaatgttag

SEQ ID NO: 197747 - DNA, 1269 bp, synthetic construct
  misc_feature 1..1269: note = Description of Artificial Sequence: Synthetic coding sequence
  source 1..1269: mol_type = other DNA
atgttccgggccggcgccgagggcgccgagaaggagcccagccccagacccgagtgccgtgcggaccccggccccggtttggggttccctcttggttccggcctgccctggccgtcgctcctcgagtctcctggcgggaggattctggacataccatgcaaagtctgcggcgacagaagcagtggcaaacactacggcgtctatgcatgtgatggatgctcagggttcttcaaacgatccataagaaggaacaggacatacgtatgcaaaagtggtaaccaaggagggtgccctgtggacaagacccaccggaaccaatgtagggcctgccgcctgaagaagtgcctggaagttaatatgaacaaggacgcagtacagcatgagcgcggaccccggacttctacaatcagaaagcaggtggccctgtacttccgcgggcataaggaggagaatggggccgcagctcacttccctagcgccgcccttcctgcgccagcattctttaccgctgtgacacagcttgagcctcatgggctcgagctggccgccgtgtccactacaccagagcggcagacgctcgtgtcacttgctcaacccaccccaaagtatcctcacgaagtgaatggaactcctatgtacctgtatgaagtagctactgaatctgtctgtgaatcagcagccagactactgttcatgtctatcaagtgggcaaaaagcgttccagcattctcaaccctgagcctccaggatcagcttatgcttctcgaggacgcatggcgcgagctgtttgtacttggaattgcccagtgggccatcccggttgacgccaacacattgctcgccgttagcggaatgaatggcgacaataccgattcacagaaactgaataagattatttccgagatccaggccctgcaagaggtggttgcccgctttaggcagctcaggctggacgccactgagtttgcttgcctgaagtgcatcgtgacattcaaggctgtgcctacccattccggttccgaacttaggtcattccggaacgccgctgcaatagccgccctgcaggacgaagcacagttgaccctgaatagctacatccatacaaggtatcctacccagccatgtagattcggtaaacttctgctcttgcttccagctttgaggtcaatctccccctctaccatcgaggaggtgttttttaaaaaaaccatagggaatgtccccattacccgacttctgtccgacatgtataagtctagcgatatttag

SEQ ID NO: 197748 - DNA, 1158 bp, synthetic construct
  misc_feature 1..1158: note = Description of Artificial Sequence: Synthetic coding sequence
  source 1..1158: mol_type = other DNA
atgagcaagcccgccggcagcaccagccggatcctggacatcccctgtaaggtatgcggagacagatccagtgggaagcactatggagtttatgcctgtgacggttgcagcggctttttcaaacgcagcattaggcgcaatcggacctacgtttgcaaatctggtaatcaaggcggatgtcctgttgacaagactcatcgcaaccagtgccgagcctgccggcttaagaagtgtcttgaagtgaacatgaataaagacgccgtacagcacgaacggggccccaggacctccactattagaaagcaggtagcactgtatttccggggccacaaggaggagaacggcgccgctgcacactttcctagtgcggcgctgcctgcccccgccttctttactgcagtgacccaactcgagccccacgggctggagctggccgccgtgtccaccacccccgaaagacagacattggtaagcctggcacagccaacacccaagtatccacatgaggttaatggaacaccaatgtatctctatgaggttgctactgagtctgtctgtgaaagtgcagcccgactactgttcatgtcaatcaaatgggccaaatccgtgcctgccttttcaactctttctctccaggaccagctgatgttgctggaggatgcttggagggagctcttcgtgctggggatagcacaatgggcaatccctgtggatgctaacacactgctggctgtctccggtatgaacggtgataacacggattcccagaagctgaacaaaatcatctccgagatacaggcactgcaagaagtggtggcacgatttcgtcaactgcgccttgacgccaccgaattcgcctgcctcaagtgcattgtcacttttaaggcagtgcccacacactccggatcagaactcagaagttttcgcaacgctgcagctattgccgcactccaagacgaggcacagctgaccttgaactcctatatccacacccggtatcctacccagccttgtagatttggcaaactgctgctcctcctacctgctcttagatccattagcccatcaacaatcgaggaggtgttctttaagaaaacaattggtaacgttcctatcactagattgctctccgatatgtacaagtcttccgacatctag

SEQ ID NO: 197749 - DNA, 141 bp, synthetic construct
  misc_feature 1..141: note = Description of Artificial Sequence: Synthetic coding sequence
  source 1..141: mol_type = other DNA
atgaacaaggacgccgtgcagcacgagcggggcccccggaccagcactatccggaagcaggtcgctctgtatttcagaggccacaaggaggagaatggcgccgctgctcattttcccagcgcagccctacccgctccttag

SEQ ID NO: 197750 - DNA, 1272 bp, synthetic construct
  misc_feature 1..1272: note = Description of Artificial Sequence: Synthetic coding sequence
  source 1..1272: mol_type = other DNA
atggccatggtggtgagcagctggcgggacccccaggacgacgtggcaggagggaatccaggaggaccaaatcccgcggcacaggctgctcggggtgggggcgggggggcgggggaacagcagcagcaagctggttccggtgccccgcataccccgcagacaccaggacagcccggagcccctgccactcccggtactgcaggtgataaaggccaggggccccccggaagtggccagagccaacaacatatagaatgtgtggtctgcggagacaaatcctcgggcaaacactacggtcaatttacatgtgaagggtgcaaatctttttttaagcgttcagtgcgtagaaatttgacctatacatgtcgcgccaatcgtaactgcccaatcgaccagcaccatcgcaatcagtgccaatactgccgcctgaagaagtgtctcaaggtcggcatgcgtcgcgaagccgtgcagcgcggacggatgcccccaacccagccgaatccagggcagtatgcacttacaaacggagatcctttaaacggtcattgttacctgtcgggatacatctctctgttgctgcgggccgagccttatcccacatcacggtatgggagccaatgcatgcagccaaacaacattatggggatcgaaaacatttgtgagctcgccgcccggcttctgttttccgccgtcgagtgggctcggaatataccatttttcccagacctgcaaataacagatcaggtatccctgttgcgcctcacttggtctgaactgtttgtcctcaatgctgcccaatgctcgatgccgctgcacgtcgccccactgttagcggctgcagggctgcatgcaagccctatgtctgcagatcgggtcgttgccttcatggatcatattagaatcttccaggagcaggtagagaagctgaaggccctgcacgttgacagcgcagaatactcttgtttaaaggcgattgtgctatttacaagcgacgcatgtggcctgagtgacgccgctcatatagagtcactgcaggaaaaatcccagtgtgccctggaggaatatgtcaggtcacagtatccaaatcaaccctctaggttcgggaagctcttgttgcgcctcccgagcctgcggacagtgtcgtctagcgtgatcgagcagctcttctttgttaggctagtcgggaagacgccaatagaaacacttatccgcgacatgttgctgtccggttcttcctttaactggccttacatgtctattcaatgcagttag

SEQ ID NO: 197751 - DNA, 1245 bp, synthetic construct
  misc_feature 1..1245: note = Description of Artificial Sequence: Synthetic coding sequence
  source 1..1245: mol_type = other DNA
atggccatggtggtgagcacctggcgggacccccaggacgaggtgcccgggtcacaaggttcacaggccagccaggccccccccgtgcccggccctcctcctggcgcacctcacacccctcaaactcccggacagggaggcccagcttccacaccagcacagactgctgctggaggccagggcggccccggtggtcccgggagcgataagcagcaacaacagcaacacatagagtgtgtagtctgtggcgacaaatcctccggtaagcattacggccaatttacctgcgagggctgtaagtctttttttaaaaggagcgtgaggcggaatttgtcctatacttgccgggccaatcgtaactgccctatcgaccagcaccatcgtaatcagtgccaatattgtcgcttgaagaaatgtttgaaagttgggatgcgacgagaagccgtccagcgtggtcggatgcccccaactcagcccactcatggtcaatttgcgttgactaatggcgatccacttaattgtcattcctatctgagcggatacatatctctgctgcttcgcgctgagccatacccaacaagccgttttggatctcaatgtatgcaaccaaataatattatgggtattgaaaacatttgtgagctggctgccagaatgttattcagtgccgtggagtgggcgcgaaatataccattcttccctgacctccaaattacagatcaggtggctctgcttcgtctgacatggtccgaactgttcgtccttaatgccgcgcagtgttctatgcccctccacgtcgcccccctgctggcagctgccggcctgcatgcctcaccaatgagtgctgatcgagttgtggccttcatggaccatatcagaatttttcaagaacaggtggagaaactgaaagcgctgcatgtagattcagcagagtacagctgcctgaaggccattgtgttattcacgtcagacgcctgcgggctatcagacgtggctcacgtagagagcctgcaggagaagtcccagtgcgctctcgaagaatacgtgcgatcacaatatccgaatcagcctacccggtttggcaaacttttactccggttacccagcttaaggacagtttccagtagcgtgatcgagcaactcttcttcgtcaggctcgtgggtaagacacctatcgagaccctaatcagagatatgctcctctccggcagttccttcaactggccttatatggccatccagtag

SEQ ID NO: 197752 - DNA, 786 bp, synthetic construct
  misc_feature 1..786: note = Description of Artificial Sequence: Synthetic coding sequence
  source 1..786: mol_type = other DNA
atgccccccacccagcccacccacggccagttcgccctgaccaacggtgacccgctcaactgtcattcctatctatcaggctatatttccctgcttcttcgggccgagccctaccctacgtcaagattcggctcccagtgcatgcagcccaataatattatgggtatagagaatatttgcgaactggctgcccggatgctgttctcagcggtggaatgggcgaggaatattccattcttccctgacctccaaatcactgatcaagtggcactcctgcggctcacgtggtcggagctgtttgttctgaatgccgcccagtgctccatgcccttgcacgtcgcccctcttttagccgccgcaggcctgcatgcaagccctatgtctgctgatagggtcgtggcctttatggatcacattcgtattttccaagaacaggttgagaagctgaaggccctgcacgttgattctgcagagtattcctgtctcaaagccattgtattgttcacatccgacgcctgcggactatcagacgtggcacatgtggaatctctgcaggaaaagtcccagtgtgccctggaggagtacgttcgaagccagtatcctaatcagcccacacggtttggcaagttactgctacgcctgccgagccttcgcacggtcagcagctctgtcatcgagcagctcttcttcgtaagactcgtgggtaaaacacccattgaaacactcattagggatatgttgctctccgggtcatcattcaactggccgtatatggctattcagtag

SEQ ID NO: 197753 - DNA, 846 bp, synthetic construct
  misc_feature 1..846: note = Description of Artificial Sequence: Synthetic coding sequence
  source 1..846: mol_type = other DNA
atgcaggccgtgtgggacctggagcagggcaagtacggcttcgccgtgcagaggggacgcatgccacccacgcagccaactcatggacagtttgccctgactaacggcgatcctttgaactgtcattcgtacctgagcggctacatttctctgctattgcgcgccgaaccatatcctacttcacgtttcggaagccaatgtatgcagccaaataatatcatgggcattgagaacatatgcgagcttgccgctcgcatgctgttttcagccgtggaatgggctcggaacattcctttcttccctgatctccaaatcacagaccaagtcgctctcctccgcctgacttggagtgaattgttcgtcctcaacgccgctcaatgcagcatgcctctgcacgtcgccccactgctggctgccgccgggctccatgcctcgcccatgtctgcagaccgggttgtggcatttatggaccatatacgcattttccaggagcaagtggagaaactgaaggccttacatgtcgatagtgctgagtacagctgcctaaaagccattgtactgtttacaagcgatgcctgtggcctttcagatgtcgcgcacgtggaatcacttcaggagaaaagtcaatgtgcccttgaggagtacgtgcggagtcagtacccaaaccagccaaccaggtttgggaagttattgctaagacttcctagcctaaggactgtgtcctctagcgtcatcgaacaacttttcttcgtgcgcctggtcggtaagacccctatcgaaacgttgatccgcgatatgttactttctggcagttcctttaattggccatacatggccatacagtag

SEQ ID NO: 197754 - DNA, 786 bp, synthetic construct
  misc_feature 1..786: note = Description of Artificial Sequence: Synthetic coding sequence
  source 1..786: mol_type = other DNA
atgccccccacccagcccacccacggccagttcgccctgaccaacggagatcccctaaactgccactcgtacctgtctgggtacatcagccttcttttgagggccgagccctaccccacctcaaggttcggaagtcagtgcatgcaacccaacaacatcatgggtatcgaaaacatttgcgagttggctgcacggatgctgtttagtgctgtggaatgggcacgtaatattccattttttcctgacctgcaaataacagatcaggtagccctgttgcggctcacctggagcgagttattcgtactcaatgcagcgcagtgtagcatgccgctgcacgttgcacctctgttggcagctgccggattacatgcctcccctatgagcgcagatcgggtagtggcgtttatggaccacattaggatattccaggaacaggtcgagaagctaaaggcactgcacgtcgattccgccgagtattcgtgcttgaaggctattgtgctttttacatcagacgcctgtggtctaagcgatgttgcacacgtggagtcactgcaggagaagagccagtgcgcactggaggaatacgtccgatctcagtatccaaaccagcctacccggttcggtaagttactcctccgccttcctagcctcaggaccgtcagtagtagcgttatcgagcaattgttttttgtgagactggtaggaaaaactcctatagaaactctcattcgcgatatgttgctgagcgggtcctcgttcaactggccttacatggcgatacagtag

SEQ ID NO: 197755 - DNA, 1215 bp, synthetic construct
  misc_feature 1..1215: note = Description of Artificial Sequence: Synthetic coding sequence
  source 1..1215: mol_type = other DNA
atggccatggtgaccggcggctggggcggccccggcggcgacaccaatggagtggacaaggccggtgggtacccaagggcagcagaagacgattccgcaagtccacctggagccgcatccgatgctgagccaggcgatgaagagcgccccggactccaggtggattgcgtggtgtgcggcgataagtcctccggaaaacactacggcgtcttcacttgcgaaggctgcaaatcatttttcaaaagaagcatccggcggaaccttagctatacctgtagatcgaaccgcgactgccagattgatcagcatcaccgcaaccagtgccagtactgcagactcaagaaatgcttcagagtcgggatgcggaaggaggctgtacagcgcggacggattcctcattccctgcctggagctgttgcggcctccagcggttctccccccgggagcgccttggccgcagttgcgagtgggggcgacctcttcccaggtcaacctgtgagtgaactgatcgcccagctgcttcgggctgagccataccccgccgcagctggaagattcggggccgggggcggcgccgctggcgctgtgcttggcatcgacaatgtttgtgagttggccgccaggctgctgtttagcactgtggagtgggcccggcacgccccttttttcccggagctgcctgtggccgatcaggtggcattgcttcgcctatcctggagcgaactatttgtgctcaacgccgcccaggccgccctgcctttacacaccgccccgctactggcagccgctgggctccatgcagcgcctatggctgcggagcgcgccgtggccttcatggaccaagtccgcgctttccaggaacaggtggataagctgggtaggctgcaagtagattctgctgaatatggttgtctgaaggctattgcactgttcacacctgacgcctgcggcctttcagatccagcgcacgtggaatccttacaggagaaagcccaggtcgcgcttactgagtacgtgcgcgcacagtacccgtcacagccccagcgcttcggacgactattgctgcgactaccagctttgcgtgcagtgccggcatcgttgatttcacagttgtttttcatgcgcctggtggggaagactccaattgagacgctcatccgggacatgctgctctccggcagcacattcaactggccttacgggtcaggccagtag

SEQ ID NO: 197756 - DNA, 1134 bp, synthetic construct
  misc_feature 1..1134: note = Description of Artificial Sequence: Synthetic coding sequence
  source 1..1134: mol_type = other DNA
atggccatggtgaccggcggctggggcggccccggcggcgacgccgaaccaggggacgaggaaaggcccgggttacaggtggactgcgtggtctgcggggacaagtcttctgggaaacattacggagtgttcacctgcgagggctgcaagtccttcttcaagcgtagcataaggcgcaatctgtcctatacctgccggagcaaccgcgactgtcaaatcgaccagcatcacagaaaccagtgccagtattgtagactaaagaaatgctttagggtaggcatgaggaaagaggcagtgcagcggggccgaatcccccatagtcttcccggtgccgtcgctgcctctagtggaagccccccaggatcagccctggccgccgtggcctcaggaggagatctgtttccaggtcagccagtttctgagctgattgcacaactcctcagggctgagccgtatcccgccgctgcaggacggttcggcgcaggcggtggagcggctggggcggtattgggcatcgataacgtctgtgagctggccgcccggctgctgttctccactgttgagtgggccagacacgcacctttctttcccgagttaccagttgctgaccaagtggctttgctccggctatcatggagcgagctatttgtcctgaacgccgctcaggcagccctgccactccacacagcaccgctgcttgctgctgccgggctccacgccgcgcccatggccgcagaacgcgcggtggcttttatggaccaggtgagagccttccaagaacaggtggacaagttggggcggctccaggtggatagcgcagaatatgggtgcttaaaagccatcgctctgtttaccccggatgcgtgcggcctgtccgatccagctcacgtggaaagcctgcaagaaaaggctcaggtcgcccttactgaatatgtacgcgctcagtaccctagccagccccagcgttttggcagactgctcctgaggttaccagctctgcgggctgtgcctgcctccctgatcagccagctgtttttcatgcgactcgtgggcaagacacccatcgagacactgatccgggacatgcttcttagcggtagtaccttcaactggccttacggctcaggacagtag

SEQ ID NO: 197757 - DNA, 2121 bp, synthetic construct
  misc_feature 1..2121: note = Description of Artificial Sequence: Synthetic coding sequence
  source 1..2121: mol_type = other DNA
atggagaccaagggctaccacagcctgcccgagggcctggacatggaacgcaggtggggtcaggtgagccaggccgttgagagaagtagtcttggaccaacagagcgaaccgacgagaataattatatggaaattgtgaacgtttcttgtgtgtcaggggccatacccaataactcaactcagggctccagtaaagaaaagcaggagctcttgccatgcctgcagcaggataataatcggccagggatactaacctcagatatcaagacagagctggagagcaaggagctctcagccaccgtggctgaatctatggggttatacatggattctgttcgtgatgctgactacagctacgagcagcagaatcagcagggcagtatgagtcctgcaaaaatataccagaatgttgaacagctggtgaagttctacaaagggaatgggcaccggccttcaaccctgtcctgcgtgaatacgccgctccgaagcttcatgagcgacagtggcagtagcgtgaatggcggggtgatgagggctgtcgttaagtctccaattatgtgtcacgagaagtctcctagcgtctgcagccctctgaacatgacttcctccgtctgtagccctgctggcatcaattccgtgtccagcacaactgccagctttggctccttccccgtacacagtccgatcacccaaggcaccccgctgacctgttcgccaaatgtagagaaccgcggctcccgtagccactctccggcccacgccagtaatgtggggtcccccttgtcctcacccttgtcatcaatgaaatcatccatctcttcccccccatcccattgcagcgtgaagtctcctgtaagcagtcccaacaacgtcacgctccggagctcagtgagcagccccgcaaacatcaataattccaggtgcagcgtgtcctctcccagtaacacaaacaatcgaagtacactcagctctccggccgccagcacagtcggcagcatttgttctcctgtcaacaatgcattcagctacacggcaagtggaacgagcgccgggtcctcaaccctgcgggacgtggtccctagccctgatacacaggaaaaaggcgcgcaggaggtgccattcccaaagactgaagaggtggaaagtgcaatttctaatggtgtcactggtcagctgaatatcgtccagtacattaaaccggaaccagatggggccttctcatctagctgcctgggcggtaacagcaaaattaattctgatagctccttctccgtccccataaaacaggaatcaacaaagcactcgtgcagcggaaccagcttcaaagggaatcctaccgtgaatccattccccttcatggacggttcttatttcagttttatggatgacaaggactactattctctcagtgggattctcggtccccccgtgcctggattcgacgggaactgtgagggctccgggttccccgtaggtattaagcaggagccagacgacgggtcctattaccccgaagccagcatcccaagctctgctatcgtcggagtaaacagcgggggccagtccttccattataggattggggcccaggggacaatttcattgagcagaagcgccagagatcagtcctttcagcatctgtcgagctttcccccggtaaacacgctggtggagagctggaagtctcatggcgacctgtcctcccgcagatctgatggttatcccgtgctggagtacataccagagaatgtctcatcttccaccttgaggtcggtctcaaccgggtcaagccgaccgtccaagatttgtttggtgtgcggcgacgaagcaagcggctgtcactacggggtcgtaacctgcggatcctgcaaggtcttcttcaagcgggcggtggagggtcagcataattatctctgcgctgggaggaatgattgtatcattgataagatcagaagaaagaactgccctgcttgtcggctacagaagtgtctgcaggctgggatgaatctcggggagcgacgatgcatatccctaccttgtatgaactatgcacgcggctgtactaaaagtgccttcagctcattcgactgctcctcacctctgaaaaacacaccgtcttag

SEQ ID NO: 197758 - DNA, 2955 bp, synthetic construct
  misc_feature 1..2955: note = Description of Artificial Sequence: Synthetic coding sequence
  source 1..2955: mol_type = other DNA
atggagaccaagggctaccacagcctgcccgagggcctggacatggagcgcaggtggggacaggtttcgcaggccgtcgaaagatccagtttagggcccaccgaacggactgatgagaacaattatatggaaatagtaaatgtgagttgcgtgtcaggggctatcccaaacaacagcacacagggcagctctaaggaaaagcaggagctcctgccctgcttgcagcaagataacaaccggccgggaattcttacctcagacatcaagaccgaactggaatctaaggagctgtcagcaaccgtggccgagagcatggggttatacatggatagtgtgcgcgacgctgattattcatacgagcaacagaaccagcagggtagcatgagtcccgccaaaatttatcaaaacgtcgagcagctggtcaaattttataaaggcaacggccaccgcccatcaacgctaagctgcgtaaacacaccccttagaagcttcatgtccgactccgggtcaagtgtaaacggaggcgttatgagagcggtagttaagagtcctattatgtgtcatgagaagtccccttccgtttgctctcccctcaatatgacctctagtgtgtgttcacccgccggcatcaattctgtgagctcaacaacggcatcttttggctctttccctgtccactcaccaatcacacagggaacccccctaacgtgctctcccaacgtagagaacagggggtcccgcagccactcccctgcgcacgcttccaatgtcgggtcccctctgagctctcctctgtctagcatgaagtctagcatctctagcccaccctcgcactgctctgtcaagtcaccagtgagctcccctaacaacgttacgttgcgatcatccgtgtcatcacctgccaatatcaacaactctcggtgctctgtaagcagccctagcaacactaacaaccggagtactctctcgtcgccggctgcatccacagtgggatctatctgttctccagttaacaacgcgttctcatacactgcaagcggcacatcagcagggagtagcacactgagagacgttgttccttctccggatacacaggaaaaaggagcccaggaagtcccattccctaaaaccgaagaagtggaaagcgccatctctaacggggtgaccggacagctgaatattgtccaatacataaagccagaaccagatggagccttctcaagctcctgtctcggcggcaacagtaagatcaactctgattcaagcttcagtgtgcccataaagcaggaaagcactaagcattcctgcagcggtacttccttcaaggggaacccgacggtgaaccccttccccttcatggatggctcttatttctcatttatggacgataaggattattacagcttgagtggcatcctgggcccacccgtccctggattcgatgggaactgcgaaggatctggttttccggttggaataaagcaggaaccagacgacggatcttattatcctgaggcttccattcccagctctgctatagtgggggtgaacagtggaggccagagctttcattacaggataggggcccaaggaactatctctctctccaggagtgcgagggatcagtccttccagcatctgtctagcttcccaccagttaatactctggtggaaagctggaaatcacatggcgatctgtctagtaggcgctccgatggttaccccgtgttggagtacattcctgagaatgtgagctcctcgaccctgcggagtgttagcactggatcatctcgccctagtaagatttgtcttgtttgtggggacgaggcttctgggtgccattacggggtggtaacgtgcggaagttgcaaggtgttttttaaacgcgcagtcgaaggccaacataattacctctgtgcaggcaggaacgactgtatcattgacaagatcaggcgtaagaattgccctgcttgtcgattgcaaaagtgccttcaagccggaatgaacctaggtgcccgcaaatccaaaaagctgggaaagctcaagggtattcacgaggagcagcctcaacagcagcaaccaccaccacctccccccccgccgcagtctcctgaggagggcactacttatatcgcgcccgctaaggagcccagcgtcaatactgcattagtgcctcaactcagcacaatctccagggccctaactccttccccagtgatggtgttagagaatatcgaacctgaaattgtttacgccggatatgatagcagcaagcccgacacagcagaaaacctgctgtccactctgaatcggttagctggcaagcagatgattcaggtggtaaagtgggccaaggtgcttccaggctttaagaacttgcccctcgaggaccagatcacacttatacagtacagctggatgtgcctgtcatccttcgcattaagctggcgctcctacaagcacacaaattcccagttcctgtactttgcccctgacctcgtttttaatgaagagaaaatgcaccagagtgccatgtacgaactgtgccagggcatgcaccagataagcctccagtttgtgaggctgcaactgacattcgaagaatacacgataatgaaggtgcttctgctcctcagtaccatccctaaagacgggttgaagtcccaggcagcatttgaggagatgcggaccaactacatcaaagagctccggaagatggtgacaaaatgtcctaataactctgggcagtcctggcagaggttctaccagcttactaagcttctggactctatgcacgacttggtgtcagatctgcttgagttctgcttttatacttttcgagagtctcacgctctcaaggtcgaatttcccgccatgctggtggagatcatctcggaccagctccccaaggtcgagtctgggaatgctaagccactctactttcatagaaagtag

SEQ ID NO: 197759 - DNA, 2967 bp, synthetic construct
  misc_feature 1..2967: note = Description of Artificial Sequence: Synthetic coding sequence
  source 1..2967: mol_type = other DNA
atggagaccaagggctaccacagcctgcccgagggcctggacatggagcggagatggggacaagtgtcgcaggcggtggagaggtctagtcttggaccaactgaaagaacagatgagaacaattatatggagatcgtaaatgtgtcttgtgtttcgggcgcaatccctaataactcaacacagggttccagtaaagaaaaacaggaacttctgccatgtcttcagcaagacaataatcgcccgggaatcctgactagcgacatcaagaccgaactggagtctaaagaattatccgccacagtggcggagtccatgggcctctatatggactcagtgcgagacgccgactactcatatgagcaacagaaccagcaggggtcaatgtctccagcaaagatttaccaaaacgtagaacagctggtaaagttttacaagggcaatgggcatcggccaagcaccctcagctgcgtgaacactccacttcggagcttcatgagtgatagcggcagctcagtgaatggcggcgtgatgagagcggtggtgaaatcccccatcatgtgccatgaaaagagcccatctgtatgttctcctctgaacatgactagctccgtgtgctcaccagcagggattaatagcgtgagttctaccactgcttcattcggttcatttccggttcattctcctatcacccaggggacacctctgacctgctcccccaacgtcgagaaccgtggttcccgcagccattcccccgctcacgctagtaacgttggatctccgctgagcagtccactgtcttcaatgaagagctcgatctcgagcccccctagtcattgttccgtgaaatcaccagtctcatctcccaataatgtgaccctccgctccagcgtgagctcccctgccaatataaacaacagtcggtgcagcgtatcgtcaccctccaatacaaataaccgatctacgctgtcctccccggctgcatctaccgtcgggtccatttgtagcccggtgaataacgctttctcctatactgcttccgggacatcggctggaagttctaccctgcgcgatgtcgtacctagccccgatacacaggagaaaggcgcccaggaagttccttttcctaaaacagaggaggtcgaaagtgcaatctcgaatggcgttactgggcagctgaacatagtgcaatacataaaacctgagcccgatggcgccttctctagcagctgcctcggaggtaacagcaaaattaattcggattcctctttttctgtgccaatcaagcaggagtccacaaaacactcctgtagtggtacaagttttaaggggaatcccacagtgaatccctttcccttcatggatggaagttatttttcttttatggacgacaaagactattactctctgtcggggattcttggtccacccgtccctggctttgacggaaattgtgagggatcaggctttcctgtgggaatcaagcaggagcccgatgacggctcctactatcccgaggcttccattcccagctctgcgatcgttggagtgaacagtggaggccaaagcttccactatagaatcggggcccaaggtacgatctccctttcaagatccgctcgcgaccagagcttccagcacctaagttctttcccccccgtgaacacacttgtggaatcatggaagagccatggtgacctctcatctcgacggtcagacggctatcccgtgctcgagtatattcccgaaaacgtatcctccagtacgctgagatccgtatctacaggaagcagcaggccttcaaagatctgtctggtgtgtggcgacgaagcctcaggctgccactatggagtggttacctgcggaagctgcaaggtgttttttaagagagcggtagagggcaagtgctcttggcagcacaactatctgtgtgctggacgtaatgattgcattattgacaagatcaggagaaagaactgccctgcctgccggctccaaaagtgccttcaggccggaatgaacctgggagcacgcaagtccaagaaacttgggaagttaaaggggattcacgaagaacagccccagcagcagcagccccctccgccgcctccccctccacaaagccccgaggagggcacgacgtacatcgcaccggctaaggaaccttctgtgaatacggccttggtaccacagttgagcacgatctccagagctctgacgcccagccccgttatggtactggaaaatattgagcctgaaatcgtgtacgcaggttatgactcctctaaacctgatacagctgagaacctgctaagcaccctgaatagactggccgggaaacagatgatccaagtggtgaaatgggctaaggttctcccgggctttaaaaacctccctctggaagaccaaatcactctgatacagtattcttggatgtgcctctcttcgttcgcgctgtcatggaggagttataagcacacaaactctcagtttctctactttgcaccagatctcgtcttcaacgaggagaagatgcaccagtctgccatgtatgaactgtgccagggcatgcatcagatttccctgcagtttgtgcgactacagctgactttcgaggaatatacaattatgaaagttttgctactcctctccaccatcccgaaggacggcctgaaatctcaagccgcattcgaagagatgagaacgaactatataaaagagctgagaaagatggtcacgaagtgccctaacaattccggacagagctggcaacgcttctaccagctgacaaagctgctggatagcatgcatgatctggtcagcgacttactcgaattttgcttttacacctttagagaatctcacgccctcaaggttgaatttcccgccatgctggtggagattattagtgaccagctccctaaagtggagtccggaaatgccaaaccactttatttccatcggaagtag

SEQ ID NO: 197760 - DNA, 2955 bp, synthetic construct
  misc_feature 1..2955: note = Description of Artificial Sequence: Synthetic coding sequence
  source 1..2955: mol_type = other DNA
atggagaccaagggctaccacagcctgcccgagggcctggacatggaacggaggtgggggcaagtgtcgcaggccgtggaacgtagctcccttggcccaacagagcgcacagacgagaacaactatatggaaatcgtaaatgtttcttgtgtgagcggggcgatccctaacaacagtacccaaggctctagtaaagaaaagcaggaattgttgccctgcttacagcaggataataaccgcccaggaattctgacatccgatatcaagactgaactggagtccaaggagcttagtgctacagttgcagagtctatgggcctctatatggacagcgtgagagatgctgactactcatatgaacagcaaaaccagcagggtagcatgtcccccgctaagatctatcagaatgtggagcagctcgtgaaattctacaagggtaatggacaccgccccagcacgttgtcctgtgtgaacacaccgctgcgcagttttatgtcggactcaggctcctcagtcaatgggggagttatgcgcgccgtggtgaaatcccctattatgtgccacgagaaatctccttctgtgtgttcacctctcaatatgacaagctctgtttgtagtcctgctgggatcaacagtgtgtccagcaccaccgcatcattcgggtccttccccgtgcacagccctattacccagggcacaccgctgacttgctctcccaatgtcgaaaatcgcggtagtagatctcactcacccgcacacgcatcgaatgtcggatctccactctctagtcccctgagctctatgaagtccagcatttcaagccccccaagccattgttccgttaagtcacccgtaagctccccaaataatgtaacacttaggagtagcgtctcctctccagccaacatcaacaattcgcgctgttcggtaagctcacccagcaataccaataaccgtagcactctgtcaagtcccgccgcttctacggtggggtccatttgctctcctgtgaacaatgctttttcttacacggcatctggcacctccgcgggaagtagcaccctgcgagatgttgtgccgtcaccggacactcaggagaaaggggcccaggaagtcccatttcctaaaacagaggaagttgaatccgctatctcaaatggagtgacagggcagctcaatatagtccagtacataaaacctgaacctgatggcgctttctcttcttcctgtctaggcggcaatagcaaaatcaactcagactctagcttttccgtaccaataaagcaggagtccactaagcattcttgtagcgggacctccttcaaaggtaacccaacagtcaacccattcccattcatggacggtagctacttttccttcatggacgataaggattattattccctctctggaattttaggtcccccagtccctggttttgacgggaattgtgaaggctctggatttccggtgggaattaaacaagaaccagatgacggttcttactatcccgaggctagcataccaagcagcgcaattgtaggtgtcaacagtggcgggcaaagcttccattaccggatcggcgcccagggcaccatctcactgtccagaagtgcacgggaccagtcctttcaacacctgtcatctttccctcccgtgaacacattggtggagtcatggaaatcacacggggacctgagcagccgcagatctgacggttatcccgtgttagagtatattcccgaaaatgtgagctcctcaaccctgcgcagtgtcagtaccggctcatcaagaccgagtaagatctgcctggtgtgcggcgacgaggcctctggatgccactatggcgtggtcacatgtggctcctgtaaggttttcttcaagcgagcagttgagggtcagcacaattacttatgtgctggccggaacgactgtatcattgataagattcggcggaaaaactgtcctgcatgccgcctgcagaagtgccttcaggcaggaatgaatcttggggcccgaaagagcaaaaagctcggcaaactaaaaggtatacatgaagaacagcctcagcagcagcagccccctcccccacctccaccgcctcagtcccccgaagaaggcaccacatacatcgctcccgccaaggaaccttctgtgaatacagctctggtgccgcagctgtcgactatcagcagggcattgactccaagccctgtgatggtattagagaatatagaacctgaaatcgtctacgcaggttatgactcctctaaaccagataccgccgagaacttattgtcaactctgaatcggctggcaggtaaacagatgatccaagtcgtgaagtgggccaaggtacttcccggattcaagaacctgcctctagaagaccaaatcacgcttatacagtacagttggatgtgtctgagtagcttcgctttatcgtggcggagctacaaacacaccaatagtcaattcctgtactttgctcccgacctggtgttcaatgaggaaaagatgcaccagtccgcaatgtatgagttgtgtcaggggatgcatcagatctccctccagttcgtgcgcctccagttaacttttgaggagtacacaatcatgaaggtgctcctcctgctaagcacaattcctaaggacggactcaagtcacaggctgcttttgaggaaatgagaacgaactatattaaggagctgcggaaaatggtcaccaaatgccctaacaattctggacaatcttggcaaagattctaccagctcactaagttactcgattctatgcacgaccttgtctcagatctactggaattttgcttctacacattccgggagtcacacgccctcaaggtggagtttcctgcaatgctggtggaaataatcagtgatcagctgcctaaagtcgaatctggtaacgcaaaacccctgtattttcatcgtaagtag

SEQ ID NO: 197761 - DNA, 2967 bp, synthetic construct
  misc_feature 1..2967: note = Description of Artificial Sequence: Synthetic coding sequence
  source 1..2967: mol_type = other DNA
atggagaccaagggctaccacagcctgcccgagggcctggacatggagagacggtggggtcaggtaagccaggctgtcgaacggagctctctgggcccaacggagagaacggacgaaaacaactacatggaaattgtcaacgtctcctgtgtgagtggggccattcccaacaattccactcaaggctcttcgaaagagaagcaggagctgctaccctgcttacagcaggataacaataggccaggcatactgacatcagacattaaaaccgagctggagagcaaggaactgagcgcaactgttgccgagtctatgggcctctatatggacagcgtacgcgatgctgattattcctacgaacaacagaatcagcagggatctatgagccccgccaagatatatcaaaatgtggagcagctagttaagttctacaagggaaatgggcacagaccgagtacattgtcgtgcgtaaacacgccgctccggtcattcatgagcgactctggtagtagcgtcaacggcggtgtaatgcgcgcggtcgtgaagtctccaattatgtgtcacgagaagtctcctagtgtgtgcagcccactcaatatgacatccagtgtctgcagccctgccggcatcaattcggtgagctccaccacagccagttttggtagttttcccgttcatagccctattacccagggcacccctcttacttgctcccccaatgtggagaatcggggatcccgcagccactcaccagcccacgccagcaatgtaggaagccccctgtcatctcctctatcctctatgaagagttccatctcttctcctccctcacactgctcagtcaagtcacctgtctcatctcctaacaacgtcactcttcgtagctccgtctcaagtccagctaacatcaacaacagcaggtgctccgtgagcagtccatctaacacaaataaccgcagtactcttagttcccccgctgcctcgactgttgggtcaatctgttccccagtgaataatgccttttcctacaccgcctcgggaacctccgctgggtcctcaaccctgagggacgttgtgccttcgcctgatacacaagagaagggtgcacaggaggttccgtttcctaagaccgaagaagtcgaatctgccatatccaatggagttacagggcagttgaacatcgtgcagtacatcaaacctgaacctgacggcgccttttctagttcttgcctggggggaaactcaaagattaacagcgattctagcttcagtgtaccgatcaagcaggaaagcaccaagcacagctgctcaggcacttcatttaagggcaaccctacagtgaatccttttccttttatggatggtagttactttagctttatggatgacaaggattactattctctgtccggaatcctcgggcctcccgtgccgggattcgacgggaattgcgaggggtctggcttccccgtggggatcaagcaggagcctgatgatggaagttattatccagaggcaagcatccctagctcagcaattgtgggagtgaacagcgggggacagtcctttcattatcgaattggcgcgcagggcaccatatcactgtctagatccgctagggaccagtccttccaacacctgtcctcttttccccctgtcaataccctcgttgagtcctggaaatcacacggagacctttccagtaggcggtccgacggctatccagtgttagaatatatacctgagaatgtcagcagctctaccctcagaagcgtgtcaaccgggagctcaagaccttctaagatttgcttagtgtgcggggacgaagcatccggatgccactacggcgtggtgacatgtggaagttgcaaggtgttcttcaaacgagcagttgagggaaagtgtagctggcagcacaactatctttgcgccgggcgaaacgactgcatcattgacaaaatccggagaaagaactgccctgcgtgccggcttcagaaatgcctgcaggccggcatgaaccttggagcacgtaaatctaagaaacttggaaagctgaagggcattcacgaagaacagcctcagcagcaacagcctcctcccccccccccacctccacagtcacccgaagaaggtacaacatacattgccccagccaaggaaccttcggtaaacactgccctcgtgcctcagttgtcgactatttctagggccctcacccctagtccagtcatggtgttggaaaacattgaacccgaaatcgtttacgccgggtacgactcatctaagccagacaccgctgaaaatctcctcagcactctgaacagactagcagggaagcagatgatacaagtggtgaaatgggctaaagtactgcccggatttaaaaatctcccactcgaagaccaaataacgcttatacaatacagttggatgtgcctgagctccttcgctcttagctggcgcagttataaacacacaaattcacagtttctctacttcgccccggatttagtgtttaacgaggaaaagatgcaccagagcgcaatgtacgagctatgtcaagggatgcaccagataagcctgcagttcgtgagactacagctgacttttgaggagtacactatcatgaaggtgttgctactactctccacaatacctaaggacggcctgaagtctcaggcagccttcgaagagatgcgaacaaactacatcaaagagctcaggaagatggtcactaaatgccccaacaactctggacagagttggcagcggttttatcaattaacaaagctactggactcgatgcatgatctggtctcagacctgcttgagttctgtttttacacctttcgcgagagccatgctctgaaggtagaattccccgccatgctagtcgaaatcatttccgaccaacttccgaaagtcgagtcagggaatgctaaacccttgtatttccatcgcaaatag

SEQ ID NO: 197762 - DNA, 2604 bp, synthetic construct
  misc_feature 1..2604: note = Description of Artificial Sequence: Synthetic coding sequence
  source 1..2604: mol_type = other DNA
atggagaccaagggctaccacagcctgcccgagggcctggacatggaacggcggtggggtcaggtgtcccaggcagtggaacggtctagcctcggccccacagaaagaactgacgagaacaactacatggagatcgttaacgtgtcttgcgtatctggggccatcccgaacaattccacacaggggtcatctaaggagaaacaagagctgctgccatgcctgcaacaggataacaaccgccccgggattcttaccagcgacattaaaacagagctggaatctaaggaactgtccgccaccgtggccgagtccatgggcctgtatatggattccgttcgagacgctgattactcctatgaacagcagaatcagcagggcagcatgtccccagccaaaatctaccaaaatgtagagcagctggtgaaattttataaaggtaatgggcatagaccctccacactgagctgcgtaaacacgcccctgcgatccttcatgagtgattccggttcttctgtgaacgggggggtgatgagggcggtggtcaagtcacccattatgtgtcatgagaagtccccctcagtgtgctcgccgctcaatatgacttccagtgtgtgttcaccagccggcataaattctgtttctagtacaacggcaagtttcggctcctttcccgtacattcaccaattacccagggcactccattgacgtgcagccctaacgtcgaaaatcgcggctctcgcagccatagccctgcccacgctagcaacgtggggtcaccactgtcctcacccttgtcttccatgaagtctagtatttccagcccccctagtcattgcagtgtgaagtctccagtcagcagtcctaacaacgtgactctgaggagcagcgtctcgagccctgcaaatatcaacaactctagatgctcggtatcaagtccttcaaacacaaataatcgctctacacttagtagcccagccgctagtaccgtggggagcatctgcagccctgtcaacaacgctttttcctataccgccagtggcacaagtgctggatcttctacgctacgagatgtcgtcccttcacctgacacccaggagaaaggtgcgcaagaggtcccctttcccaaaactgaagaggtggagtccgccatctctaacggtgtgacaggccagctgaacatcgtccaatatattaaacctgagccagacggggcatttagttcatcctgcttgggaggtaattccaaaattaactccgattcgagcttctcagtgccgatcaaacaggagtccacgaaacactcatgttctggaacctcatttaaaggcaatccaaccgtgaacccatttccattcatggacggctcatacttcagtttcatggacgataaagactattactccctgtctgggattctaggtcctcctgtcccagggttcgatggcaattgtgaaggatctgggttccccgtgggcatcaaacaggagcctgacgatggctcttactaccctgaagcgagcattcccagttcagcaattgtgggagtgaactctggcggccaatcctttcactaccgaatcggtgcacaggggaccatatcgctctcccgctccgcgagggatcaaagcttccagcacctctccagctttccacccgtgaataccctcgtcgaaagttggaagtcccacggagatttgtcctcccgccggtccgacggataccctgtgctagagtacattcccgaaaatgtgtcctctagcacactgagatccgtcagtacaggaagtagccgaccatccaaaatctgtctcgtgtgcggtgacgaggccagcggctgccactatggagtggtgacctgcggatcttgtaaggtattctttaaacgagccgttgagggacagcataactacctgtgcgcgggccggaacgattgcattatcgacaaaattcgtcgcaagaactgtccagcctgccggctccagaagtgtcttcaggctggtatgaacctcggcggttttaagaacctgccactggaggaccaaattacactgatccagtactcctggatgtgcttgagcagctttgcactgtcctggagaagctacaaacatacaaactcccaatttctgtactttgccccggacctggtgttcaacgaagaaaagatgcatcaaagcgctatgtatgaactgtgtcagggtatgcaccagatctcacttcaatttgtgcgactgcagttgacctttgaagagtataccattatgaaggtgctgctactgctgtccacaattcctaaggatggactgaagtcacaggcagcctttgaagaaatgaggacgaattatatcaaggaactacgcaaaatggttacaaaatgtcccaacaattctgggcagagctggcagaggttttaccagctaactaagctcctggacagcatgcatgatctcgtgtcggatctcctggagttctgtttctacacttttcgtgagagccatgcactgaaggtcgagttcccagctatgctggtcgagattattagcgaccagctcccaaaggtagaatcgggcaacgcaaagcccctctattttcatcggaaatag

SEQ ID NO: 197763 - DNA, 1920 bp, synthetic construct
  misc_feature 1..1920: note = Description of Artificial Sequence: Synthetic coding sequence
  source 1..1920: mol_type = other DNA
atggagaccaagggctaccacagcctgcccgagggcctggacatggagcgtcgatggggacaggtgagccaggctgtggagagatccagtctggggcccactgaacgaacagatgaaaacaattatatggagatagttaatgtgtcttgcgtctctggagctattccaaacaacagtacccagggcagttccaaagagaaacaggagctcctcccgtgcctgcagcaggacaataaccgccccggtatcctgacctctgatatcaaaaccgagctggaaagcaaagaactgtctgccacagtcgctgagtctatggggctttacatggatagcgttcgggacgcggattacagctatgagcagcagaatcagcagggcagtatgtcgccagcaaagatataccaaaatgttgagcagcttgtgaagttttacaaaggcaatggccacaggccctcaaccctgtcttgcgtcaatacaccgctgcgttcgttcatgagcgactcaggtagttcagtgaatgggggagtgatgagggcggttgtgaagtcccccatcatgtgccatgaaaagagcccctctgtgtgttcccctctgaacatgacaagctccgtctgctctcccgctgggatcaattccgtgtcttctactaccgcttccttcggaagctttccagtgcactcaccaattacgcaagggactccgctgacctgttccccaaatgtggagaatagagggtcccgctcacattcacctgcccacgcctcaaatgtcggatctcctctgtcttcccctttgtctagtatgaagagttcaatttcaagcccaccaagccactgctctgttaaaagccctgttagcagccctaacaatgtgacgctcagaagttctgtgagtagccctgcaaacataaacaattctcgatgctcggtttcgagtccatcaaacaccaataatcgctccaccctgtcatctccagcggccagtacggtcggctctatctgtagtccagtgaacaatgcgttctcctataccgccagcggcacctccgctggttcctccactctcagggatgttgtgccctccccggatacgcaggagaagggcgctcaggaggtcccatttccgaagaccgaggaggtggaatccgccatctccaacggggtgacagggcagctgaatatcgttcagtatattaaaccagaacctgatggcgcgtttagctccagctgccttggaggaaattcgaaaatcaatagcgactctagcttctcagtgcccattaagcaagaatctacgaagcatagctgctccggaacgagcttcaaggggaaccccaccgtaaacccttttccttttatggacggatcttacttctccttcatggacgacaaggactattattccctcagcgggattctcggacccccggtgcctggatttgatgggaactgcgagggttccggctttcctgtgggcataaagcaagagccagatgacgggagctattaccccgaggcctccatcccctcatcagccattgtgggggtgaattctgggggccaatcctttcactacagaatcggcgcccagggtacaattagcctatcaagatcagcccgggaccagagcttccagcatctgagtagcttcccgcctgtgaataccttggtagagagctggaagtcccacggcgacctctcatcgcggcggagcgacggatacccagtcctggagtatattccagaaaatgtgagctcgagtactctgaggtcagtatctactgggtcctcccggcccagcaagaagaacatataccggtttctgctgtgtaacaaccgcaccagaggggttgggcagcagttgcccctcagcccgcgatcctcaaccgtcttctgcattaccggtattcatacgcgctag

SEQ ID NO: 197764 - DNA, 1797 bp, synthetic construct
  misc_feature 1..1797: note = Description of Artificial Sequence: Synthetic coding sequence
  source 1..1797: mol_type = other DNA
atgccctgcatccaggcccagtacggcacccccgcccccagccccggcccccgggatcacttggcttcagatccgctcactccggaattcatcaagcctacaatggacctggcgagccccgaagctgctccagccgccccgacagctctaccgagcttttctacttttatggacggttatacaggggaattcgatacattcttataccaattgcccggaactgtccagccttgttctagtgcctcttcttcagcctcctccacttctagcagctcagcaacttcccctgccagcgcctcttttaaattcgaagacttccaggtgtacggctgttaccctgggccactttccggaccagtcgacgaggccctgtctagctctggatctgattattacgggtccccatgctcagcaccaagtcctagtactccttctttccagcctccccagttgtcaccatgggacggctccttcggccatttttctcccagccagacctatgagggactccgggcatggacagagcagcttcccaaagcttccgggcccccgcaacctcctgcttttttttcatttagtccaccaacaggacccagcccatccctggcacagagccctctgaagttgtttccttcgcaggctacacatcagctcggcgagggagaatcttatagcatgcctaccgcttttcctggcttggcacccacaagccctcacctcgaaggaagcggcatcttagacactccagtgactagtacgaaggccaggtcaggagctcctggcggatccgaaggacgttgcgcagtatgcggagataacgccagctgccaacactatggagtgcgaacctgtgagggatgcaagggtttcttcaagagaaccgtccagaagaacgccaaatatatctgtctcgcaaacaaggattgccccgttgacaaaaggcggcgaaataggtgccagttctgccggtttcagaaatgtttggccgtggggatggtgaaagaagtggtccggaccgacagtctgaaaggtcggagggggaggcttcccagcaaaccaaaacagccccccgacgcctctcccgccaaccttttgaccagcctggtacgcgctcacttggattctggaccttctactgctaaactcgattactcaaagttccaggagcttgttctgccccattttgggaaagaagacgccggcgatgtgcaacaattctacgatctgctgagtggtagcctggaggttatcaggaagtgggcagagaagatcccgggctttgcagagctgagcccagccgatcaggatctgctacttgagtctgcttttctagaactgtttatcctccgactggcctatcggtcgaagcctggagagggcaaactaatcttttgctccggcctggtgctacacagattgcagtgcgctaggggtttcggtgattggatcgacagcatcctggcatttagccggtcattgcattccctcctggtggacgtgccagcgttcgcctgtttgtccgctcttgttctgatcactgataggcatggcctgcaggaaccgcgaagggtggaggaactgcagaatagaatcgcaagctgcctgaaagagcacgttgcagccgttgcgggcgagcctcaacccgcctcatgtctgagtcgcctcctgggaaagctgccggagctgaggaccctgtgtacacagggtttacaaagaattttttatctgaaactcgaagacctcgtaccacctccaccgattatcgacaagattttcatggacacactgccattctag

SEQ ID NO: 197765 - DNA, 1836 bp, synthetic construct
  misc_feature 1..1836: note = Description of Artificial Sequence: Synthetic coding sequence
  source 1..1836: mol_type = other DNA
atgtggctggccaaggcctgctggagcatccagagcgagatgccctgcattcaggctcagtatggaactcccgctccttccccgggccctagggatcacctagcatccgatccgctcacccccgagtttattaaaccgaccatggatctggcaagtccagaggcagcacccgccgccccaaccgcactgccatcttttagcaccttcatggatggatatacaggtgaattcgatacatttctgtatcagctgcctggcactgtgcagccctgttccagcgcctccagttccgcctctagtacgagttcatcctccgccacgtccccagccagcgcttccttcaaattcgaagatttccaagtctacgggtgttatccaggacccttgagcggccctgtggatgaggccctctcatcatccggcagcgactattacggttctccttgtagtgcaccatccccctccaccccttccttccagccaccacagctgagtccctgggatgggagctttggccactttagcccttcgcagacatatgaggggctccgtgcgtggactgagcagctgcctaaggccagtgggcctccccagccccccgccttcttttcgttcagcccacccaccggtccctctccatcattggcgcagtccccgttgaagctattcccaagccaggctacccatcagttgggagagggcgagagttattctatgcctacagcttttcctggccttgcccctacttcccctcaccttgaagggagtggaattctggacacgcctgtgacttccactaaagctcgctctggagcacctggcggatccgaaggtcgctgtgctgtgtgtggggataatgcatcctgccaacattacggtgtacggacctgcgaaggatgtaagggctttttcaagaggactgtccagaaaaacgcgaaatacatttgcttggctaacaaagactgtcccgtcgacaagcggaggcggaaccgttgccagttttgtagattccagaagtgtctagccgttggcatggttaaggaggttgtccgcacagatagcctgaaagggcgaagggggaggctccctagcaaacctaagcagccgcccgacgcgtcaccggccaatctcttgacatcgctcgtgagggcacatctcgactcagggccttcaaccgctaagctggattattccaaatttcaggaactggtgctgccacactttggtaaagaagacgccggagatgttcagcagttttacgacttgctgtctggcagcctagaagtgataaggaagtgggccgagaagattccaggtttcgcagagctgtcccctgccgaccaggacctcctcctggagtctgcatttcttgaactgttcatcctccggctcgcttatcgatccaaacctggtgagggtaagttgatcttctgcagcggactggtgctgcatcgcttgcagtgtgccaggggatttggggattggattgacagcatcttggccttctcgcgctctcttcattccctgctggtagatgtaccagccttcgcatgcctgagtgccctggtactgattacagaccggcacggtctgcaagagccaagaagagtggaggaactccaaaacaggatagcctcttgcctcaaagagcacgtcgctgctgttgctggggaaccccaaccagcaagttgtttaagtcggctgctcggaaaattgccagaactgagaacactttgcacccaagggctccagcgaatattctacctcaagctcgaggacctggtcccgcctcccccgattattgataaaatctttatggatacactgccattttag

SEQ ID NO: 197766 - DNA, 1797 bp, synthetic construct
  misc_feature 1..1797: note = Description of Artificial Sequence: Synthetic coding sequence
  source 1..1797: mol_type = other DNA
atgccctgcatccaggcccagtacggcacccccgcccccagccccggtccacgggaccatcttgcttcagatcctttgacgccggaattcatcaagcctacaatggacttggccagtccagaggcggcaccggcagcacctaccgctcttccaagtttttccacctttatggatggatacactggcgagtttgacacgttcctataccagctaccaggcactgttcagccatgtagctctgccagttcgtctgcctcctctacaagctcctcaagcgccacttctcccgcatctgctagctttaagtttgaagacttccaggtttatggctgctatcccgggcccctatcaggccccgtcgacgaggcacttagtagctcagggtctgattactatggttctccatgctcagctcctagccctagcactccctcttttcaaccaccgcagttgtcaccttgggacgggtcatttggccatttctcacccagtcaaacctacgagggacttcgcgcttggaccgagcagctgcccaaggcaagcggccctccacagccccctgccttttttagcttttctcctcctactggcccgagtccttccctcgctcaatcgccccttaaactgtttccctcccaggctacccaccagctcggcgagggggagagctattccatgccaaccgcttttccagggctggctccaacctcccctcatctcgagggctccgggattttagatacacccgtgacaagtaccaaagctcggagcggtgctcccggagggagtgagggacgatgtgccgtctgtggcgacaacgcttcttgtcagcattacggagtccggacatgcgagggatgtaaagggttttttaagcggacagtccagaaaaacgccaagtatatttgcttagccaataaggattgtccagttgacaagcggcggcggaaccgatgccagttttgtcgattccagaagtgcctggcagtagggatggtgaaggaggttgtcagaaccgatagcctgaaaggtagaagaggcagactcccgtcgaaaccaaaacagccccctgacgcttcaccagctaacctccttacgtcattggtgcgtgctcatctggattcagggccatccactgctaagctggattactctaagttccaggaattagtgctgccccatttcggcaaggaagacgctggagacgtgcagcaattctacgacctcctgtccggaagcctggaggtgattcggaagtgggccgaaaaaattccaggcttcgccgaactgtcccccgcagaccaagatttgctgctggagagcgcttttcttgagttattcatactgcgactggcttaccgatccaagcccggagaaggaaagcttattttctgcagtggcttggtgttgcacaggctgcagtgcgcgcggggattcggcgattggatagatagcatcctagcatttagtcgcagcctccactccttgctggtggacgttcccgccttcgcatgtctttccgccctcgttctaataactgaccgccacgggcttcaagaaccacgccgcgtcgaggagctgcaaaatcgtattgcttcctgcctgaaggagcacgttgctgcagtcgccggggaaccacaaccggcctcatgcctgagtaggctgctcgggaagctgcccgaattgaggaccctgtgtacacagggcctgcagaggatattttacctcaaacttgaggatcttgttcccccaccacctattatcgacaagatatttatggacaccctaccgttttag

SEQ ID NO: 197767 - DNA, 1797 bp, synthetic construct
  misc_feature 1..1797: note = Description of Artificial Sequence: Synthetic coding sequence
  source 1..1797: mol_type = other DNA
atgccctgcatccaggcccagtacggcacccccgcccccagccccgggcctcgggatcacctagcctcagatcccctgacacctgagtttattaagcccactatggacctagctagtcccgaggccgcacctgcggctcccacagcactgcctagcttttcaactttcatggatgggtataccggtgagttcgatacatttctttaccagctgcccggtacagttcagccctgctctagcgcctcatcttctgcctctagtacctcctccagctcggccacaagcccagctagcgcatctttcaagttcgaagactttcaggtttatgggtgttatccaggaccattgtccggacccgttgatgaggccctatcatctagcgggtctgactattacggaagcccctgtagtgccccctcaccaagtacaccctcatttcagcctcctcaactttctccctgggatggatctttcggccacttctcaccctcccagacatacgaaggactccgggcttggacagaacagctgcctaaggccagcggtcccccacaacctcccgcattttttagcttttcgcctcctacaggacctagcccatcgctggcacagagcccactaaaattatttccgtcacaggccactcaccagctgggcgagggcgagtcctacagtatgcccacagcctttcccggattggcccccacatctccccacctagaggggtcaggtattctggatactccagtcacgtcaaccaaagcccggtcaggcgcgccaggcggatcagaaggcagatgcgctgtgtgcggggataacgcatcctgccagcattacggggtaaggacctgtgagggatgtaaggggtttttcaaaagaaccgttcaaaagaatgcgaaatacatatgtctggccaacaaagactgccctgtggataaaagacggaggaatagatgccagttttgccgattccagaagtgtctcgctgttgggatggtgaaagaagtggtgcgcaccgattctctgaagggtaggcgaggacgcctcccatccaagccaaaacagccacctgatgcatctcccgctaacctgttgacaagtctcgtccgagcgcacctggacagcggtccttcgacagccaaactcgactactccaaattccaagagctcgtgttaccacactttggcaaggaggacgccggtgacgtccagcagttctatgatttgctcagtgggtcattagaggtaatcagaaaatgggctgagaaaatcccaggatttgctgaactatcccctgcggaccaggaccttctgctggagagtgcgttcttagagcttttcatactcaggcttgcttatcggagtaaacctggggaaggaaaacttattttctgctcgggcctggtgctgcacaggcttcaatgcgccagaggcttcggcgattggatagactccatattagccttctccagatccttgcactctttgttagtcgacgtacctgcgtttgcttgcctgtctgcattagtactgatcaccgacagacacggtctgcaggagccaagacgggtcgaagagctgcagaaccggattgcatcatgccttaaggagcacgttgcagccgttgcaggagagccacaaccagcttcatgtctatcacgattgttgggcaaactacccgaactcagaactctctgcactcaggggttgcaacgaatcttctacctgaagctggaagatctggtcccccctccgccaatcatcgacaaaatctttatggatacacttccattctag

SEQ ID NO: 197768 - DNA, 1959 bp, synthetic construct
  misc_feature 1..1959: note = Description of Artificial Sequence: Synthetic coding sequence
  source 1..1959: mol_type = other DNA
atgaccagcgcccagtacaagatcaagatcctgatcgagggcctgcaccacggacagaggccggggccggccccccctagacagcccggctctttttgttgggccctcaaagccgacggaattatgtggctcgcaaaggcttgctggtcaatacaatccgaaatgccatgtattcaggcccaatacggcactccagccccatcacccggtccccgtgatcacctggcgtctgatccccttacccccgaattcataaagcccacaatggatctggcttctcctgaagccgcccccgcagccccaaccgctttacccagcttctccacctttatggatggctatacgggcgaattcgatacatttctttatcagctacctggtaccgtgcagccctgtagctcggcctcttcttcagctagttccacctcatcctcctctgccacctcgccagccagtgcctcctttaaatttgaagatttccaggtttacggttgttaccccggtcccctgtccggcccggtggatgaagcgctgagtagcagcggtagtgattactacggttccccttgctcagcgcccagcccctcgaccccttcttttcagccaccccaacttagcccatgggacggcagtttcgggcacttttccccctcgcaaacttatgagggcctccgcgcctggacagagcagctcccaaaagcaagtggcccaccccagccaccagccttttttagtttctccccgcccaccggccctagtccttctcttgctcagtccccactgaagctcttcccctctcaagctacgcatcagttaggagaaggcgagagttattctatgccgacggcctttccaggcctggcccctacttcccctcatctcgaggggtccggcattctggatactccagtgacatcaacaaaggcaagaagcggggcccctggggggtcagaggggcggtgtgccgtctgtggagacaacgccagctgccaacactatggcgtgaggacgtgcgaagggtgtaagggattctttaagcgcacagttcagaaaaacgcaaaatatatttgcctcgccaacaaagactgcccagtcgataaaaggcgccgtaaccgctgtcagttttgtagatttcaaaagtgtctggccgtggggatggtgaaagaagttgttaggacagatagcctcaaggggaggcgagggcggctgccgtccaaaccaaagcagccccctgacgcaagtcccgccaatctgctgaccagcctcgttcgagctcacctcgactcgggcccgtctaccgcaaaattggattatagtaaattccaggaactggtattgcctcacttcggcaaggaggacgccggggacgttcaacaattctacgacttgctgtcgggatccctcgaggtgattagaaagtgggcagagaaaatcccaggctttgctgagctgagccccgcggaccaggatctccttctggagtccgcgtttttagagctcttcattttgagattagcttataggagcaagcctggtgagggaaagctaatcttctgctcaggactcgtgctccatcggctccaatgtgcacgtgggttcggcgattggatagatagcattctggcgttctccagaagcctacattcactactcgtggacgttccggcttttgcttgcctctccgccctggtgctgatcacagaccgtcacgggctgcaagagccccggcgagtcgaagagctccagaataggatagcctcttgtctgaaagagcatgtggctgcagtagctggcgaaccacaacctgcctcgtgccttagccgtttgttgggcaaactgcctgaattgaggaccttatgcacccaaggactccagcgcatattctacctgaagctcgaagatctggtaccaccgcctccaatcattgataaaatatttatggacactcttccattttag

SEQ ID NO: 197769 - DNA, 978 bp, synthetic construct
  misc_feature 1..978: note = Description of Artificial Sequence: Synthetic coding sequence
  source 1..978: mol_type = other DNA
atgccctgcatccaggcccagtacggcacccccgcccccagccccggcccccgggatcatcttgcatcagatccgctgacaccagagtttatcaaaccaactatggacctcgcttcaccagaagcagcccctgccgccccgaccgcccttcccagttttagtaccttcatggatggatacacgggggaatttgacacttttctctaccagttgcccggcacagttcaaccgtgttcatctgcaagcagttcagcctctagcacttccagttccagcgctaccagtcctgcctcggcttccttcaaatttgaagactttcaggtctatggatgctaccctggaccactgagtgggccagtcgacgaagcgctcagctcctctggcagcgactactacggaagcccctgcagcgcaccctcacccagtactcccagtttccagcctcctcaactgtcaccgtgggacgggagctttggacatttcagcccctcccaaacctatgagggattaagagcctggactgagcaactccccaaggcaagcggaccacctcagccacccgcatttttctctttcagtccacccacagggccctccccatctcttgctcagagccccctcaaactcttcccctcgcaagcaactcaccagctcggcgagggcgaatcttactcgatgcctactgcattccctgggctggccccaaccagcccccacctcgaaggttctgggattctcgacaccccagttacatctactaaggcaaggtcgggcgcgcccggagggagtgagggccggtgcgcagtatgtggagacaatgcatcctgtcaacactatggtgttcgcacgtgtgaaggctgcaagggcttcttcaaggtgcctagatccccgagatggggtctgctgctggagatggaacggggttggccccacccaatcggcacatgtggcttgccactggggtccccaccgtcatag

SEQ ID NO: 197770 - DNA, 1836 bp, synthetic construct
  misc_feature 1..1836: note = Description of Artificial Sequence: Synthetic coding sequence
  source 1..1836: mol_type = other DNA
atgtggctggccaaggcctgctggagcatccagagcgagatgccctgcattcaagctcagtatggtacgcccgcaccttctcctggacccagggaccacctggcttccgatccactgactcctgagttcattaagcccaccatggatctcgcctctcccgaggctgcacctgcagcgcctacggcacttccctctttctcaacctttatggatggctacaccggagaatttgatacttttttataccagctgcctggaacagtccaaccttgttcatccgcatccagctccgctagctctacgagcagctcttccgccactagcccggccagcgctagtttcaaatttgaggactttcaagtctacgggtgctatcccggccccctgtctggacccgtcgatgaggctctatctagcagcggatcagactattatggtagcccctgctccgctccctccccatctaccccctcttttcagccccctcagctgtcgccatgggacggcagctttggtcacttcagcccttctcagacttatgaagggcttcgagcttggaccgagcaacttccgaaggcctctggcccacctcagcctccagccttttttagtttctcacctccaaccgggccctctccgtcgttagctcagtccccgctgaagctgttccccagccaagccacccaccagctgggtgagggtgagagctatagcatgcccactgcctttcccggcctcgctccgacaagcccgcacttggaaggttctggcattcttgatacccctgtcacctccaccaaggctcggtccggagcccccggcgggtctgaaggaagatgcgccgtctgcggtgataacgcctcatgccagcattatggagttaggacatgcgaaggttgtaaagggttctttaaaaggactgtgcaaaagaatgcgaagtatatctgcttggctaataaggactgtcccgtcgacaagcgtagaaggaatagatgtcagttctgcaggtttcaaaaatgccttgctgtgggaatggttaaggaggtggtgcggacagacagcctgaagggccgtcggggccggctgccaagcaaaccaaaacagcctcccgatgcctccccagccaacttgttgacatccctggtgcgggcacacctggactcggggccaagcactgcaaaattagactattccaaatttcaagagctggttctgccgcattttggaaaggaagatgcaggagatgtccaacagttttacgatttgcttagcggatcccttgaggtgatccgtaagtgggcggagaaaattcctggcttcgctgagttaagtccggccgaccaagatttactcctcgagagtgctttcctggaactgtttattctgaggctcgcctaccgatcaaaaccaggcgaaggcaagttaatcttttgttctggcctagttttgcatcgactgcagtgcgccagggggttcggtgactggatcgacagcatactggcatttagtaggtctttacattctcttctggtcgacgttcctgccttcgcctgtttgagcgccctggtcctgatcaccgatcgccatgggcttcaggagcctcgccgtgtagaagagcttcagaatcggattgccagctgtctgaaagagcacgtcgccgcagtcgcaggcgaaccacagcccgctagctgtttgagtaggttgctgggcaagctgccggagcttaggacgctatgcacccagggcttacaacgaatcttttatctcaagctggaggacctggtcccacctccgccgatcatagacaaaatcttcatggataccctgcccttttag

SEQ ID NO: 197771 - DNA, 1797 bp, synthetic construct
  misc_feature 1..1797: note = Description of Artificial Sequence: Synthetic coding sequence
  source 1..1797: mol_type = other DNA
atgccctgcgtgcaggcccagtacggcagcagcccccagggcgcctcccctgcctcacagagctactcttaccacagcagcggagagtactccagcgattttttgaccccagaatttgtgaaattcagcatggatttgacgaataccgagataactgccacgactagcctgccatcctttagtacatttatggataactattctaccggctatgatgttaagcctccttgcctgtaccaaatgccgctgtcgggtcagcagtcttccatcaaagtggaagatatacagatgcacaattatcagcagcacagccacctgccaccccaatctgaggagatgatgcctcatagcggctctgtgtactacaaaccctccagcccaccgactcccacgacgcccgggtttcaagtgcaacacagtccaatgtgggatgaccccggaagcctgcacaacttccatcagaactacgtcgctaccacacacatgatcgagcagcggaagacacctgttagtcggctgagcctctttagttttaaacaaagtccccccggcacccccgtgtccagttgtcagatgcggttcgatgggcccctccacgttcccatgaatccagaaccagctggtagtcaccatgtggtggatggccagactttcgcagttcccaaccctattcgtaagcccgcctcgatgggcttccctggactccagatcgggcacgcttcacagctcctcgatacccaggttccttcgccaccgagtcgcgggtctccctcaaacgagggactgtgtgccgtttgcggcgataatgcggcttgtcagcactacggagtgcgaacatgtgaagggtgcaaggggtttttcaaaagaacagtgcagaagaacgctaagtacgtgtgtcttgccaacaagaactgtcctgtggataaacgtaggcggaataggtgtcagtactgccgattccagaagtgtctggctgtcggaatggttaaagaagtggtgaggactgatagcctcaagggacgccgaggcaggttgccttctaaacccaagtcccctcaggagccttcccccccttctccacctgttagcctcattagtgccctggttcgagcccacgtggatagcaatccagctatgacatcattggattactcacggttccaggctaacccagactaccagatgagcggggacgatacgcagcatatccagcaattctatgacctgctgaccggtagcatggagatcattagagggtgggccgagaagattcctggttttgctgaccttcccaaagcagatcaggatctgctttttgagtccgctttcctggaattgttcgtgttgcggttggcatatcgaagcaaccccgtggaaggtaagctgatattctgcaatggtgtggtgctgcacaggctgcaatgcgttcggggatttggcgagtggatcgatagtatcgtggagttcagtagcaaccttcagaatatgaatatcgacatttcagccttctcgtgtattgcagctctcgccatggttacggaaagacatgggctcaaagaaccaaagagagtagaagaactgcagaataagattgttaattgtctaaaagaccatgtcacttttaacaacggcggactgaaccgtccaaattacttaagcaagctcctgggcaagctgccggaactaagaaccctatgcacccaggggctccaaaggatcttttatcttaagcttgaggacctggtcccaccccccgcaataatcgacaagctctttctcgacactcttcccttctag

SEQ ID NO: 197772 - DNA, 1797 bp, synthetic construct
  misc_feature 1..1797: note = Description of Artificial Sequence: Synthetic coding sequence
  source 1..1797: mol_type = other DNA
atgccctgcgtgcaggcccagtacggcagcagcccccagggcgccagtccagcgtctcagtcctacagctaccattcttccggcgagtacagttctgacttcttaacacccgaattcgtcaagtttagcatggaccttactaatacagagataactgcaactacctcgcttccatccttctccacgttcatggataattactcaactggatatgacgtgaagcccccctgcctatatcagatgcccttgtccggacaacagagttcgataaaggtggaggacattcaaatgcataactaccagcagcactcccacttgcctcctcagagtgaagagatgatgcctcattcaggatccgtgtattataagccatcttctccaccaacgccaacgactcctgggtttcaggtccagcacagcccaatgtgggatgatccaggttcactgcacaactttcaccaaaactatgtggcgacaacacatatgatcgagcagcgcaagacccctgttagtcgactgtcgcttttctcctttaaacagtccccacccggaaccccggtatcatcctgccagatgcgttttgacggcccactgcacgtgccaatgaacccggagcccgccgggtcacaccatgtggtggacggccaaaccttcgctgtgcctaacccaatcagaaagcccgcttccatggggttccccgggctccaaataggccacgctagtcaactgctggatacacaggtgccatcgcctccctctcgggggtcaccgtcaaatgaaggattatgcgccgtgtgcggcgacaacgccgcttgccaacactatggggtcaggacctgcgaagggtgcaaggggtttttcaagaggaccgtacagaagaacgctaaatacgtgtgtctggctaataaaaattgtcctgtggataaaaggcggcggaataggtgccagtactgtagatttcaaaaatgcctggctgtgggcatggtgaaggaggtggtcaggacagatagcctgaagggacggcgtggacgcttaccctccaaacctaagtctccccaggagccatcccccccatctcctcctgtttccctgatatccgcgctggtgcgcgcacacgtggactctaatcccgccatgacctccctggactacagtcggtttcaggcgaatccagactatcagatgagcggcgatgacacccagcatattcagcagttttatgatcttctaaccggatctatggagataattcgagggtgggctgagaagattcccggatttgccgatttgccaaaggccgaccaagatttgctgtttgagtcagcctttcttgaacttttcgtcctccggcttgcctaccggtccaatccagttgaaggcaaactcatcttctgcaatggggtcgttctgcaccgccttcagtgtgtccggggcttcggcgaatggatcgactcgatcgttgaatttagcagcaatctccagaacatgaacattgatatttctgccttctcgtgcatcgcggccttggctatggtgactgaacgccacgggctaaaggaacccaagcgggttgaagaactacagaacaagatcgtcaactgcctgaaggatcatgtgactttcaacaatggtggactaaaccgtccaaactacctgtccaaattgctcggcaaattacctgagctccgtacattgtgtacacagggcttgcagcgaatcttctacctaaagctggaagatctagtgcctcctccggcaatcatcgacaagctcttcctggatactttgccattctag

SEQ ID NO: 197773 - DNA, 1179 bp, synthetic construct
  misc_feature 1..1179: note = Description of Artificial Sequence: Synthetic coding sequence
  source 1..1179: mol_type = other DNA
atggacaactacagcaccggctacgacgtgaagcccccctgcctgtaccagatgcctctcagtggtcagcagtcaagtatcaaagtggaagacatccagatgcacaactaccagcaacacagccatctgccaccacagtcagaagagatgatgccccactctggaagcgtctactataaaccatcctcaccacccacacccactacacccggattccaggttcagcatagcccaatgtgggatgatccggggagcttacataactttcaccaaaactatgtagctactacccacatgatagaacagaggaagacgcctgtgtcccgtctttcattgttctcatttaaacagtccccgcctggcacacctgtgagctcctgccagatgcggttcgacggccctctgcacgtcccaatgaatccagagcctgctggttctcaccacgtcgtagatgggcagacttttgcagttcctaatccaatcaggaagcctgcttcaatgggattccctggtttgcagattggacatgccagccaactgttggatacacaggtgcctagtcccccctcgaggggcagcccctccaacgaaggactgtgcgcagtctgcggggacaacgccgcctgccaacattacggcgttaggacctgtgaagggtgcaaaggcttcttcaaacggacagtccaaaagaacgcgaagtatgtttgtctcgcgaataagaattgcccagtggacaaaagacgacgcaaccggtgccagtactgccgcttccaaaagtgccttgcagtcggtatggtcaaggaagtggtccgcactgatagtctcaaagggaggcggggcaggcttccctcaaaaccaaaatcaccccaggagcccagtcctccttctccacctgtgagtttgatctccgcactcgtgcgggcccacgtggattctaatcctgctatgacatctttggactactctcggttccaggccaaccccgactaccaaatgtccggtgacgacactcagcacatacaacagttttatgacttacttactgggtcaatggaaattattcgcggctgggctgagaagatacccggattcgccgaccttccaaaggcagatcaggacctgctgttcgagtctgcctttttagaattatttgtgttgagactcgcctacagaatatag

SEQ ID NO: 197774 - DNA, 1179 bp, synthetic construct
  misc_feature 1..1179: note = Description of Artificial Sequence: Synthetic coding sequence
  source 1..1179: mol_type = other DNA
atggacaactacagcaccggctacgacgtgaagcccccctgcctgtaccaaatgccgttgagcgggcagcagagctcgattaaagtcgaggacattcagatgcataattaccaacagcactctcacttacctccacagtccgaggaaatgatgcctcattccggaagcgtgtactacaaaccaagctccccaccaaccccgacaactccgggtttccaggtgcagcatagccctatgtgggatgaccctgggtccctgcacaattttcatcaaaactacgttgcgacgacccacatgattgaacagcgtaagacacctgtctcccggctgagtctcttcagtttcaagcagtcgccgcctgggactcccgtcagctcctgtcagatgagattcgatggcccactgcacgtcccaatgaacccagaacctgctggtagtcaccacgtggtggacggtcagactttcgcagtcccaaaccctatcagaaagccggcttccatgggcttcccaggcctgcagatcggacatgcaagtcagctactggacacacaggttccaagcccacccagccgaggatcgccgtccaatgaaggcttatgcgcggtctgcggagataacgctgcctgccagcattacggcgttcgaacgtgcgaaggctgcaaaggattcttcaagcggactgttcagaagaatgccaaatatgtctgcctcgcaaataaaaactgtcctgtggacaagagacgaaggaatagatgtcagtattgtaggttccaaaaatgcttagccgtcggaatggtgaaggaggttgtgaggaccgattctttaaaaggcagaaggggtcgactcccttctaagcctaagtcaccacaggagccgtctccacctagtccgccggtgtccttgatcagcgctcttgttagggctcacgtagatagcaatccagcaatgaccagcctggactacagcaggtttcaggccaacccggattaccagatgtccggagacgatacacagcacattcaacagttttatgacctcctgactggatcaatggaaatcattcggggttgggccgagaagatccctggctttgctgacctgccaaaagccgaccaggacttgctgtttgagtcagcctttctggagcttttcgtgctgcgcctggcttaccgcatttag

SEQ ID NO: 197775 - DNA, 777 bp, synthetic construct
  misc_feature 1..777: note = Description of Artificial Sequence: Synthetic coding sequence
  source 1..777: mol_type = other DNA
atgccctgcgtgcaggcccagtacggcagcagcccccagggcgccagcccagcaagccagtcttactcttatcacagctccggggagtacagttccgattttctgactcctgagtttgtaaagttttccatggacctgaccaataccgaaatcactgccactacttcactgccttctttttccacgttcatggacaattactctacagggtatgacgttaagcctccgtgtctatatcagatgccattatccggacagcagagcagcatcaaagtcgaggatatccaaatgcataactatcagcagcacagtcacctcccccctcaaagcgaggagatgatgccacacagtggatctgtttattataagccttcgtcgccgccgactccaaccacgcctgggtttcaagtgcaacactctcctatgtgggatgatccgggctctttacataattttcatcagaactatgtggccacgacacatatgatcgaacaaaggaaaactcctgtgtccaggttgagcctcttcagcttcaagcagagcccccctgggacgccagtatcctcctgccaaatgagattcgatggccctctgcatgtcccgatgaacccggaacctgccgggagtcaccacgtagtcgacggccaaactttcgccgtgcccaacccgatccggaagccagccagtatgggtttccctggcttgcaaatcggtcacgcatcgcaacttctggatacgcaagttccatcccctcctagtaggggcagccctagctag

SEQ ID NO: 197776 - DNA, 1608 bp, synthetic construct
  misc_feature 1..1608: note = Description of Artificial Sequence: Synthetic coding sequence
  source 1..1608: mol_type = other DNA
atggacaactacagcaccggctacgacgtgaagcccccctgcctgtaccagatgccgctgagcggacaacagtcctccattaaggtagaagacatccaaatgcacaactatcagcagcactcgcacctgccaccccagtccgaagaaatgatgccacactcggggagcgtatattacaagccttcctcaccacctacccctaccacccccggatttcaagtccagcactctccaatgtgggatgatcccgggtctctgcataattttcaccagaattacgtagctaccacacatatgatcgaacagcgcaaaactcctgtatcacggctttcactctttagtttcaagcaatcccccccaggaacgccagtgagcagctgtcagatgaggttcgatggacccctgcacgttccaatgaatcccgagcccgcaggttcacaccacgttgttgatggccagactttcgcagtaccgaatccaatacggaagcctgcaagcatggggtttcccggcctgcagatcggacatgcgagtcaacttctggatacccaggtgccaagccccccctctaggggcagcccatccaatgagggtctgtgtgccgtttgtggagataatgccgcctgccaacactatggagtaagaacatgcgaaggctgcaaagggttctttaaacggactgtacaaaagaacgccaaatacgtgtgcctggcaaacaaaaattgtcctgttgacaagcgtagacgaaatcgatgtcagtactgcagatttcaaaagtgcctagcggtcggaatggtgaaagaagtcgtgagaacggattctctgaaggggcggagaggccgcctgccttccaagccaaagtctcctcaggaaccctccccccccagcccccctgtgtcactgatcagcgcactcgttcgggcgcatgtggattccaatcctgccatgaccagtttggattactctcgcttccaggctaaccctgactaccagatgagcggcgacgatactcagcacatccaacaattttatgatctgttgactggttcgatggaaatcatccgcggctgggcagaaaaaatccctggattcgcagacctcccgaaggcagaccaggacttactgtttgaatccgccttcctagaactctttgtcctgagactcgcctacaggtccaatccagtagaaggcaaactaatcttttgcaatggagtcgtgcttcaccgcttgcagtgcgtccgcggctttggcgaatggattgacagtattgtggagttctcctccaacttgcagaacatgaacatcgacatctccgcattcagctgtatagctgctctagccatggtaacagagcgtcacgggctgaaggagccaaagagagtggaggagttacagaacaagatcgtaaattgtctgaaggaccacgtcacctttaacaacggtggccttaatcggcctaactacctatcgaagctgctggggaagttacccgaacttcggaccctctgtacacagggcctccagcgcattttctatttgaagcttgaggatctagtgcctccccccgccatcattgataagctcttcctggacacattacctttctag

SEQ ID NO: 197777 - DNA, 1830 bp, synthetic construct
  misc_feature 1..1830: note = Description of Artificial Sequence: Synthetic coding sequence
  source 1..1830: mol_type = other DNA
atgaacgaggaccggcggggcgagctgctgaccatgccctgcgtgcaagctcagtatggctcatccccccagggagcttcgccggcatctcaatcttactcttatcattccagtggtgagtactcctccgactttctgaccccagagtttgtcaagttctccatggacctgactaatacagagatcacagcaaccacatccctgcccagttttagcacttttatggataactattctactgggtacgacgtgaagcctccatgtttgtaccagatgccactgagcgggcagcagtcaagtatcaaagtggaggacatccagatgcacaactaccagcagcacagccacctgcctccccaatctgaagagatgatgccccactcgggttcagtttactacaagcctagcagcccaccaactccgactacccctgggttccaggtgcagcactctccaatgtgggatgacccaggctccctccacaatttccaccagaactacgtggcaacaacccacatgattgaacaacgcaagacaccagtgtcccggttatccctattctctttcaagcagagccctcccgggacaccggtgagctcttgtcagatgcgattcgatggtccgctccacgttcccatgaacccggagccagcaggatcacaccatgtagtggacggccaaacgttcgccgtgcctaatcccatccgcaagccagcctccatggggtttcctgggttgcaaattggacatgcaagccagctgttagatacacaggtgccttcgcccccctcaaggggcagccccagcaatgagggcttatgcgccgtgtgcggcgacaacgctgcttgccagcattacggggtacgcacgtgcgagggctgtaaggggtttttcaagcggaccgtccagaaaaacgcaaagtatgtgtgcctggcaaacaagaattgtccagtagacaagcgtcgccgaaacagatgtcagtactgtagatttcaaaaatgcctcgcggtggggatggtaaaggaggtggtcaggacagattcgttgaagggacgacgtgggcggttgcctagtaagcccaaatctccccaagagccaagcccccctagcccacctgtgagtctcatatctgcactggtgcgtgcccacgtggattcaaatcccgccatgacctctctcgattatagtcggtttcaggcgaaccctgattatcagatgtccggtgatgacacgcagcacatccagcaattctacgatttacttaccggctccatggaaatcatccgaggatgggccgagaagatccccggatttgccgacctcccaaaagcagaccaggatctcttatttgagtctgcattcctggagctgtttgtgttgaggctggcttaccgcagtaatcctgtcgagggaaagctcattttttgtaacggcgttgtgctccacaggcttcaatgtgtgcgcggatttggtgaatggattgacagcatcgttgagttttccagcaaccttcagaacatgaacatcgacatttctgccttttcttgcattgcagcgctggcgatggtgacggagcggcacggcctgaaggaaccaaagcgcgtggaagaactgcagaacaagattgtaaattgcttgaaggatcacgttacatttaacaatggcggactgaaccgccctaactacctttcaaagttgttgggcaagcttcccgaactccgtacactatgtacgcagggcctccagaggatcttttatctcaagctagaggacctggtgcctcctcccgctataatcgacaagttgttccttgacactctgccattctag

SEQ ID NO: 197778 - DNA, 738 bp, synthetic construct
  misc_feature 1..738: note = Description of Artificial Sequence: Synthetic coding sequence
  source 1..738: mol_type = other DNA
gtggaggaggagggcgacgtgagcaaccggggcgtggagctgctgcagcttgaacccgacgaagatcaggtgcgagccaggatcctaggctgcctgcaggagcccactaaatccagacccgaccagcccgcggcattcgggctgttatgtcgtatggccgaccagaccttcatcagcatcgtggattgggctagaaggtgcatggttttcaaggaactagaagttgctgaccaaatgaccttactccagaactgctggtccgagctgttggtcttcgatcacatttaccgacaagtgcagcacggtaaagaaggctcaatcctcttagttacaggtcaagaagtggagctgacaacggttgcaacacaggccgggtcactcctgcattctcttgtcctgcgtgcccaggagttggtgctccagttgctcgcgcttcagctagaccgacaagagtttgtctgtctgaaatttattatacttttctctctcgacctgaaattcctgaacaaccatattctcgtaaaggacgcacaagaaaaagcgaatgcagctcttttggattatacactgtgccattacccccattgcggcgacaaatttcaacagttactattgtgtctggtcgaagtgcgagcactgtccatgcaggccaaagagtacctttaccacaaacacttggggaatgagatgcctcggaataacctgctgatcgaaatgctgcaagccaagcagacctag

SEQ ID NO: 197779 - DNA, 1386 bp, synthetic construct
  misc_feature 1..1386: note = Description of Artificial Sequence: Synthetic coding sequence
  source 1..1386: mol_type = other DNA
atggactacagctacgacgaggacctggacgagctgtgccccgtgtgcggagataaagtgagcgggtatcactacggactactgacctgtgaatcgtgcaaaggcttcttcaagagaaccgtccagaataacaagcactacacctgcactgagtctcagtcctgcaagatcgataaaactcagaggaaaagatgccctttttgtagattccagaagtgtttaacggtgggaatgaggttggaagcagtcagagctgaccggatgaggggtggaaggaacaaatttggcccgatgtacaagcgcgaccgtgctttaaaacagcaaaagaaagctcagatccgggccaatggatttaaattggaaacaggtcccccaatgggcgtgccccccccccccccccccgctcctgattacgtcctcccaccctcactgcatggtcctgagccaaaggggctcgcagctggaccccctgccggaccactcggagattttggcgcccccgcgctacccatggccgtgccaggtgctcacggtcctctggcgggctatctctatcctgctttcccgggccgcgccataaagagcgaataccccgagccttatgccagccccccacagccaggcttgccctacggttatcctgaaccattttcaggaggccccaatgtgcccgagttgattcttcaattgctccagctcgaacctgacgaagatcaggtgcgcgcacgcatactcggctgtttgcaggagcccacaaagagccgccccgatcaaccggctgcgttcggcttgctgtgccgcatggccgatcagactttcatcagcatcgtggactgggccagaagatgcatggtgttcaaggaattggaagtggctgaccagatgacccttctgcagaactgctggagtgaactgttggtattcgaccatatttaccgacaggtgcagcatggcaaggagggatccatacttctggtgacaggccaggaggtagagctaacaacagtggcaacgcaggctgggagtttgttacactccctggtgcttcgagcccaagagctagttctgcagctcctcgctctccagctggacaggcaggaatttgtatgcctaaagttcatcattctgttcagtctggatttaaagtttctgaacaaccacatcctggtgaaagacgcccaggaaaaggccaacgccgccctgttggattacaccctgtgtcactatccccattgtggagataagtttcaacaacttcttctgtgtctcgttgaggtgcgggctttgtccatgcaggccaaagagtacctctaccataaacatctcggcaacgaaatgccaagaaacaacctgctgatagaaatgctacaagccaaacagacctag

SEQ ID NO: 197780 - DNA, 537 bp, synthetic construct
  misc_feature 1..537: note = Description of Artificial Sequence: Synthetic coding sequence
  source 1..537: mol_type = other DNA
atggactacagctacgacgaggacctggacgagctgtgccccgtgtgcggtgataaagtgtctggataccattatgggctgctgacttgtgaaagttgcaagggctttttcaagagaaccgtccagaacaataagcactatacttgcaccgagtcccagagctgtaaaatcgataaaacccagaggaaacgttgtcccttctgccgcttccagaaatgcctcaccgtcggcatgagattggaggcagtgagagccgaccggatgcgtgggggcagaaacaaattcgggcccatgtacaaacgagatagagctctaaaacagcagaagaaggcccagatacgtgctaacgggtttaagttagagacaggccccccgatgggggtgcctccacctccacctcccgcacccgactatgtgctgccaccctctctgcacgggccggaaccaaaaggtctcgcagctgggccccctgccgggcccttaggggacttcggcgcgcctgcactacctatggccgtgcccggggctcatggttag

SEQ ID NO: 197781 - DNA, 972 bp, synthetic construct
  misc_feature 1..972: note = Description of Artificial Sequence: Synthetic coding sequence
  source 1..972: mol_type = other DNA
gacctggaggagctgtgccccgtgtgcggcgacaaggtgagcggctatcattacggactgttgacctgtgagtcctgcaaaggtttttttaagcggaccgtccagaataacaaacgctacacgtgcatcgagaaccagaactgccagatcgataaaacacaaaggaaaagatgtccgtattgtcggttccagaagtgcctgtccgtggggatgaaactggaggccgtgcgcgccgataggatgcggggtggacgcaacaagtttggtcccatgtacaagcgtgacagagctctgaagcaacagaaaaaagccctgatccgagctaacggcctgaagttggaagccatgtcccaggttattcaggcaatgccctctgatctcacaatatcctctgcgattcagaacattcacagtgccagcaaaggactcccacttaatcatgccgcccttccccccactgattacgacaggagtcccttcgtcacatcacctatctctatgaccatgcccccccacgggtcacttcagggttatcagacttatggacatttcccaagccgggccataaagtccgagtatcccgacccttatacgagctcccccgagagcataatgggttacagttatatggattcctaccagacctcttcccccgcttcaattccgcacctcattctcgagcttctgaagtgcgaacccgatgaaccgcaggttcaggccaagatcatggcctacctgcaacaggagcaggccaatagatcaaagcatgagaagctatcaactttcgggctgatgtgcaaaatggccgatcagacactgttttccatcgtggagtgggcccggtcaagcatttttttccgagagctaaaagggctgacactgtctcccagcctggagtgttcgggctcatggcttatggccacatccacttcttgcattcaggtcatccggctcccccagccgcccgagtag

SEQ ID NO: 197782 - DNA, 1488 bp, synthetic construct
  misc_feature 1..1488: note = Description of Artificial Sequence: Synthetic coding sequence
  source 1..1488: mol_type = other DNA
atgagcagcaacagcgacaccggcgacctgcaggagagcctgaagcatggcctgacccccatagtcagccagttcaagatggtaaactatagctacgatgaagacctggaggagctctgtcctgtctgcggggataaggtcagtggatatcactatggactgcttacgtgtgagtcttgcaagggattcttcaagcggacagttcaaaacaacaaacggtatacctgcatcgagaatcaaaactgccaaatagataagacacagcggaagagatgtccttactgcaggtttcagaaatgtctctccgtggggatgaaactcgaagctgtacgcgctgacagaatgcgagggggaaggaacaagtttggtccaatgtataaaagagacagagctctgaagcagcaaaaaaaagcactgattcgcgccaatggcctgaagcttgaagccatgtctcaggtgattcaagctatgcctagcgatttaacaatctcgagcgctatccagaatattcattcagcgtccaagggcctccctctgaaccacgccgcactccctcctacggattacgataggtccccgttcgtcacttctcccatctcaatgacaatgcctccgcacggctccttgcagggctatcagacctacggacacttccctagtagggccattaagtctgagtaccccgacccctatacttccagcccggagtcgattatgggatacagctacatggactcttaccagacaagttcacctgccagtattccccatctcatattagaacttctaaaatgtgaaccggacgagcctcaagttcaggctaaaattatggcatatctgcagcaggaacaagcgaacaggtcaaagcacgagaagctcagtacctttgggcttatgtgcaagatggctgatcaaactcttttctccatcgtggagtgggccagatcaagcatttttttcagggaattgaaggtggatgatcagatgaaactcctgcagaattgctggagcgagctactgatcttggatcatatttatcgccaagtcgtgcatggaaaagagggcagtatatttttggtcacaggacaacaggtcgactacagcataatagccagtcaggctggcgctacactcaataatttgatgagtcacgcccaagagctggttgccaaactgcgctctctccagttcgaccagagagaatttgtgtgcttaaagtttctggtgctctttagtctggatgtcaaaaatctcgagaattttcagctcgtcgaaggcgtccaagaacaggtgaacgcggcccttctcgattacaccatgtgcaactatccccagcagaccgagaagttcggacagctcctgctccgcctccctgaaatccgtgctatttccatgcaggccgaggaatacctgtattacaagcacctgaatggtgacgtgccctacaacaatctactgattgaaatgctgcacgctaagagagcctag

SEQ ID NO: 197783 - DNA, 1134 bp, synthetic construct
  misc_feature 1..1134: note = Description of Artificial Sequence: Synthetic coding sequence
  source 1..1134: mol_type = other DNA
tgagacctggaggagctgtgccccgtgtgcggcgacaaggtgagcggctaccactacgggctgctcacatgcgagtcgtgtaaagggttttttaagaggactgtgcagaacaacaaacggtatacatgcatcgagaatcaaaattgccaaattgacaagactcagaggaagcggtgcccttactgccggttccagaagtgcctctctgtcggcatgaagctggaggctgtgcgcgccgataggatgagagggggcagaaataagttcggtcccatgtataaaagggatagagctctaaaacaacaaaagaaggcgctgatcagggctaacggtcttaagctggaagctatgtcacaggtgatccaagcgatgccttccgacttaacgattagttccgctatccagaatatccactcagctagcaaaggcctgcccctgaaccacgccgcgctgccacctacagactatgaccgatcacctttcgtcacctcccccatttctatgaccatgccaccccacggatccctgcaagggtatcagacatacggtcatttcccatctcgtgctatcaaatctgaataccccgatccatatacttcctcccccgaaagcattatgggctactcatatatggattcctaccagaccagcagccctgcctccattccccacttgattttggagctgctcaagtgtgagccggacgaaccacaagtgcaagccaagatcatggcatatctgcagcaagagcaggctaatcgctcaaagcatgagaagctgtccaccttcggtctgatgtgcaagatggccgatcagactttgttctctatcgtcgagtgggcccgttcatctatcttctttcgagaactgaagggcctgaccctctccccttcgctcgagtgcagcggcactattctggctcatggcaatctccaccttctacattcgagtgactctccagccagtgcttcaagggtggctgggatcaccggggtgcaccataatactcacttaatttttgtctttttagtcgagatgggattctgccacgtgggccaggcagggctgaaaaccccagatctcagagttatctgcctgccacgcccaccaaaagtgctggggctttgggcttag

SEQ ID NO: 197784 - DNA, 1626 bp, synthetic construct
  misc_feature 1..1626: note = Description of Artificial Sequence: Synthetic coding sequence
  source 1..1626: mol_type = other DNA
atgagcagcaacagcgacaccggcgacctgcaggagagcctgaagcacggccttactcctatcggtgcaggcctccctgatcggcacggatctcccatccccgctagaggcagattagttatgcttccgaaggtagagaccgaagctctagggttagctcggtcacacggagagcaagggcagatgcccgagaacatgcaggtgtcccaatttaagatggttaactacagttacgacgaggatttggaggagctgtgtcccgtgtgcggggacaaagtctctggataccactacggcctgttgacatgcgagtcctgtaaggggttttttaagcgtaccgtccagaataataagcgatatacgtgcatcgaaaatcagaattgtcaaatcgacaaaacccaacgcaagagatgtccttattgtagatttcagaaatgcctgtctgtgggaatgaagttggaggcagttagagcagatcgtatgcggggtgggaggaataaatttggacccatgtacaaaagagacagggcactgaagcagcaaaaaaaagcattgatacgagctaatggactcaagctggaagccatgtcgcaggtgatccaggccatgccctccgatctgacgatctcaagtgcaatccagaatatccattctgcatcaaaagggctacctctaaaccatgcggccctcccccctacagactatgataggtcaccgtttgtgacttccccgatctccatgacgatgccaccacacgggtctttgcaaggctaccagacttacggtcacttcccctcgcgcgcgattaagagtgagtacccagacccgtacacgagcagtccagagtcaattatggggtacagttacatggacagctaccagaccagctcgcccgccagtataccccatttaatcctcgaattgctcaagtgcgagcctgatgaaccacaggttcaggcgaaaattatggcctatctgcaacaagagcaagcgaatagaagcaagcacgagaagctgtccacctttggcttaatgtgtaagatggctgatcaaactctgttcagcattgtggaatgggccagatcatcaattttttttcgtgaactcaaggtggatgaccagatgaagttgctgcaaaactgctggtctgagctattgatcctggatcacatctacagacaagtagtacacggcaaggaaggatcgatattcctggtgacaggacagcaggtagactacagcataatcgccagccaagccggagccacactgaacaatctaatgagccacgctcaggaactcgtggctaaactgcggtctctccaattcgatcagagggaattcgtgtgtctgaagttcttggtgttgttttcccttgatgtcaaaaatctggaaaatttccagctggtggagggtgtgcaggagcaggtgaacgccgctctgttggactacactatgtgcaactaccctcagcagaccgagaaattcggccagctcctgctacgcttgccagagattcgtgctatatcaatgcaggctgaagagtacctgtattacaagcacctgaatggggacgtcccttataataacctacttatcgagatgttgcacgccaagcgggcctag

SEQ ID NO: 197785 - DNA, 216 bp, synthetic construct
  misc_feature 1..216: note = Description of Artificial Sequence: Synthetic coding sequence
  source 1..216: mol_type = other DNA
tgaagcctgaagcacggcctgacccccatcgaccggggcaactgcaggtccgggtgcttcagttttgccgctacactgaggcaacggagcctgttaactagctgcgcaggcctccccgatagacatggtagccccatcccagccaggggaaggctggtaatgctgcctaaagtcgagaccgaagctttagggttggctcgctcacatggcgaatag

SEQ ID NO: 197786 - DNA, 66 bp, synthetic construct
  misc_feature 1..66: note = Description of Artificial Sequence: Synthetic coding sequence
  source 1..66: mol_type = other DNA
atgagcagcaacagcgacaccggcgacctgcaggagagcctgaagcacggtctgacacctatctag

SEQ ID NO: 197787 - DNA, 249 bp, synthetic construct
  misc_feature 1..249: note = Description of Artificial Sequence: Synthetic coding sequence
  source 1..249: mol_type = other DNA
atgagcagcaacagcgacaccggcgacctgcaggagagcctgaagcacggtcttactcccattgataggggaaattgccggagcggatgcttttcatttgctgccactctccgccagaggtcattactaactagctgcgccggcctcccagacagacatggctccccaattcctgcaagggggagactggtgatgctacctaaggtggaaactgaggcgttggggctcgcacgaagccatggcgagtag

SEQ ID NO: 197788 - DNA, 1410 bp, synthetic construct
  misc_feature 1..1410: note = Description of Artificial Sequence: Synthetic coding sequence
  source 1..1410: mol_type = other DNA
atggtgaactacagctacgacgaggacctggaggagctgtgccccgtgtgcggagacaaggtgtctggctatcattatggtctgcttacctgcgagtcttgtaagggtttttttaagcggacagttcagaacaacaaacggtatacctgcattgagaaccagaattgtcagatcgataagacccagaggaagcgctgtccttattgtagattccagaaatgcctcagtgttggcatgaagctggaggccgttcgcgctgataggatgaggggaggccgcaataaatttgggccaatgtacaaaagagatagagccctcaagcaacagaaaaaggctctaatccgggcgaacggcctaaaactagaagccatgagccaagtgattcaagctatgcccagtgacttgacaatcagtagcgcgatccagaacatccattcagcctcaaaaggactgcccctgaatcacgctgctcttccaccaacagattatgacagaagtccttttgtgacctcacccataagtatgacaatgcccccccatgggagcttacagggttaccaaacttacggccacttcccctcacgtgcaatcaaaagtgaataccctgacccttacacgagcagtcccgagtcaataatgggttacagctacatggattcctaccagaccagctctccagcctcgatcccacaccttatcctcgaactgctgaaatgcgaaccagacgaaccacaggttcaggctaaaatcatggcataccttcagcaagaacaggctaatcggtcaaagcatgagaagctctctacctttggactgatgtgtaaaatggccgaccagacgttgttctccatagtggagtgggcgcgatccagcatcttcttcagggagctgaaggttgatgaccagatgaaactgcttcaaaactgttggagcgaactcctgatcctggatcatatatatcgccaggtggtgcatgggaaggagggctctattttcttggtgaccggtcagcaagtagattatagcatcattgctagccaggcaggggccactctgaataatctcatgagccacgcacaggaactcgtagctaaactgcgtagcttacagtttgaccagcgggagtttgtgtgtctcaagttcttggtgctgttctcccttgacgtgaagaatctggagaatttccagctcgttgagggagtccaggagcaggtaaatgctgccctgctggactatactatgtgtaactacccccaacaaacggaaaaattcggccagctcctcctgcggctgccagagatccgagctatctctatgcaggccgaggagtacctttattataaacatctaaatggcgatgtcccatataacaacctcctgatagaaatgctccacgccaagagagcttag

SEQ ID NO: 197789 - DNA, 681 bp, synthetic construct
  misc_feature 1..681: note = Description of Artificial Sequence: Synthetic coding sequence
  source 1..681: mol_type = other DNA
atgctgctgcggctggtgagcaacagctggccccaggtgatcctgcctccacgcccacctaaagtgctggggttacaggctcctagacgagctagaaaaagagccgagggcacagcttcgagcaacgtttttagcatgttcgatcagagtcagatacaagaatttaaggaatctctcgccttgtctcctaggctcgaacggaacggtatgatcagtgcccattgcaatctatgtttgacaggatctagtaactctcccgcgtccgcttctcaggcattcaccattatggatcagaatcgcgatgggttcatcgataaggaggatttgagggacacgttcgccgctctgggcaggatcaatgtgaagaatgaggagctcgaggccatggtaaaagaggccccgggtccgatcaatttcaccgtgtttttaactatgttcggtgagaaactgaagggcaccgacccagaggagacaatacttcatgcttttaaagtctttgacaccgagggtaagggcttcgtgaaagctgatgtgatcaaagagaaacttatgacccaggccgatcggttcagtgaggaggaagtgaagcagatgtttgccgccttcccccctgacgtctgcggcaatctggactacagaaacttgtgttacgtcataacccacggtgaggaaaaggactag

SEQ ID NO: 197790 - DNA, 1569 bp, synthetic construct
  misc_feature 1..1569: note = Description of Artificial Sequence: Synthetic coding sequence
  source 1..1569: mol_type = other DNA
atggaggagcacggcgtgacccagaccgagcacatggccaccatcgaagcccacgcggttgctcaacaggtccagcaagttcatgtggctacctataccgaacatagtatgttaagtgcagatgaagattctccctccagccccgaggacacatcttacgacgatagcgacatcttaaattcgaccgcagctgatgaggttaccgctcacctggctgccgccggtcccgttgggatggccgctgccgcggcggtagccacaggaaaaaagagaaagcgtcctcacgtgttcgagagtaatccttcgatcagaaagaggcagcaaacgaggctgctgcggaagctcagggctacactggacgaatatacaactagagtggggcagcaggcaattgtgctgtgcatttccccttctaagcccaatcccgtgttcaaagtattcggcgcagctcccttggaaaatgttgtcagaaaatataagtccatgattctcgaggacttggagtccgccttagcagagcatgccccggctcctcaggaagttaacagcgagctccccccactgactatcgacggaatacccgtgagcgttgacaaaatgactcaggctcagctgagggcctttattcccgaaatgttgaaatattctacaggtcggggaaagccgggctggggcaaagagtcatgcaaacccatttggtggccagaggatatcccctgggcaaatgttagaagcgatgtgagaacggaagaacaaaagcagagggtcagctggacccaggcactgcggactatcgtcaagaattgctacaagcagcatggtcgcgaagacttgctgtatgctttcgaggatcagcaaacccaaacgcaagctacagcaacacatagcattgcacaccttgttccgagtcagacagttgtgcagacattctctaatccagacgggacggtctccttgatccaggtcgggacgggggcgacagtcgctacgctcgctgatgcctccgagttgccgactaccgtgactgttgctcaggtgaactactctgcagtggcagatggagaagtcgagcagaattgggcgactctgcaaggaggcgaaatgactattcaaacaacccaagcgagcgaagccacccaggcagtggcatccctcgccgaagctgcagtggcagcaagccaggagatgcagcagggcgccactgtaaccatggcactcaactccgaggccgcagcacatgcagtagctaccttggccgaggcgactttacaaggtggaggtcagattgtacttagtggcgagacagctgccgctgtaggggccctaactggagtgcaggacgctaacggacttttcatggctgatagagctggccggaagtggatacttactgacaaggctaccggtttggtgcagattcctgtttcaatgtaccagactgtggttacaagtctagcacagggtaatgggccagtgcaggtggcaatggccccggtgactacaaggatcagtgactctgcggtgaccatggacggtcaagccgtggaggtagtaacattggaacagtag

SEQ ID NO: 197791 - DNA, 1314 bp, synthetic construct
  misc_feature 1..1314: note = Description of Artificial Sequence: Synthetic coding sequence
  source 1..1314: mol_type = other DNA
atggaggagcacggcgtgacccagaccgagcacatggccaccatcgaagcccatgccgtggcccagcaggtccagcaggttcatgtggcaacatacaccgaacactctatgctcagtgctgacgaggacagccctagcagtcccgaggatacaagttatgacgatagcgatatcctgaatagtacagccgccgacgaagtgactgcccatctcgcagctgccgggcctgtggggatggccgcagctgccgctgtggctaccggcaagaagcgtaaacgacctcatgtgtttgagtccaatccttcaattcgtaaaaggcagcagacccgcttgctgaggaaactgcgcgctacattggacgagtatacaactcgcgtcgggcagcaggccattgttctgtgtatcagtccttccaaaccaaatccggtctttaaagtattcggggccgcgcctttggaaaatgtggtgcgtaagtataagagcatgattctcgaagatttagagtcagcccttgctgaacacgctcctgctccccaggaggtgaattccgagctgccaccactgaccatcgacggcatccccgtgtcagtggacaaaatgacacaggctcagctgcgtgccttcattcctgaaatgttaaaatatagtaccggccgcgggaagcctggttggggtaaggagtcttgcaagccaatctggtggcccgaggacataccatgggcaaatgttcgcagtgatgtccgcactgaggaacaaaaacagcgggtagggactggtgctacagtggccactttagccgatgcttctgagcttcctactaccgtgactgtggcccaggtaaactattccgccgttgctgacggcgaagtagagcagaactgggccactctccagggcggggagatgacaatacagacaacccaagcatccgaggccactcaggcggtcgcctccctcgcggaggcagccgtggctgcttcacaggaaatgcagcagggcgcaacagtcactatggcactgaactctgaagccgccgcccacgctgtggctacccttgctgaggccacgctgcaaggcggcggtcaaatcgtgttgagcggcgagactgctgccgccgtgggggccctgacaggtgtgcaggatgctaatgggctcgtgcagatcccggtgtctatgtatcagaccgtggtgacatcacttgcccaggggaacggtcccgtgcaggtcgccatggcgcccgttactacacggatctcagactccgctgttactatggacggccaggctgttgaggtggttaccctcgaacagtag

SEQ ID NO: 197792 - DNA, 1512 bp, synthetic construct
  misc_feature 1..1512: note = Description of Artificial Sequence: Synthetic coding sequence
  source 1..1512: mol_type = other DNA
atggaggagcacggcgtgacccagaccgagcacatggccaccatcgaggcccatgctgtggcgcaacaggtgcagcaggtgcatgtggccacatataccgaacattcgatgctgtccgccgacgaggactctcccagctcacccgaggacacatcctatgatgactcagacattcttaattctacggccgcagatgaagtgacagctcatctggccgctgcaggtccagtgggaatggccgcagctgcagcagttgctacaggcaagaaacgtaagagaccccacgtgttcgagagtaacccatctataaggaaacgtcagcagacccgattgcttagaaagctccgcgccacactcgacgagtacactaccagagtcggccagcaggcgatagtcctgtgtatctcgcctagcaagcccaacccagtgtttaaggtgttcggagcggcccctctggagaacgtggtcaggaaatacaagagcatgattttggaagatctcgagtccgctctcgccgagcacgccccagctccacaagaggtgaacagcgagctgccccccctgactatcgatggtattccagtttctgtggataagatgactcaagcacagctcagggccttcattcctgagatgcttaaatactctacaggcaggggtaaacccggctggggcaaagaaagttgcaagccaatttggtggcccgaggacattccctgggccaatgtgaggtctgacgtccgcaccgaggagcagaagcaacgggtatcctggacacaagccctgaggaccatcgtgaagaattgctacaagcagcacggccgagaggatcttctttatgctttcgaagatcagcagacacagacccaggcaactgcaacacatagtatagcacacttggtcccgtcccagacggttgtgcagacctttagcaacccggacggaacagtctccctcattcaggtgggcaccggcgccactgtcgctacattagccgatgcttcggaactccccacgaccgtcactgtggcccaggtcaactactccgctgtggccgatggtgaagtggaacagaattgggcgaccttacaggggggggagatgaccattcagacaacccaagcttctgaagcgactcaagctgtggcttccctagcggaagccgccgtcgcggcatcacaggagatgcagcaaggtgcaacagtgacgatggccctgaacagtgaggctgcagcacacgcagttgcaaccctggctgaggctaccctgcagggcggaggacagattgtgttgagtggggagactgcagcagccgtgggggctcttaccggtgtgcaagatgctaacggactggtacagatacctgtaagcatgtaccagactgtggtcacaagcctggcacaaggtaatggtcctgtccaggtggctatggcacccgttacaactagaatcagtgacagcgcagtgacaatggatggccaggcagtcgaagtcgttactctcgaacagtag

SEQ ID NO: 197793 - DNA, 1569 bp, synthetic construct
  misc_feature 1..1569: note = Description of Artificial Sequence: Synthetic coding sequence
  source 1..1569: mol_type = other DNA
atggaggagcacggcgtgacccagaccgagcacatggccaccatcgaagcgcatgccgtagcgcagcaggtgcagcaggtgcacgtagcaacttatacggagcatagcatgttatcagcagatgaggacagccctagctccccagaagacacttcatacgacgattccgacattcttaatagcacagctgccgatgaggttacagcccacctcgcggctgccggaccggtcgggatggctgccgcagccgccgtggctaccggaaaaaagcgcaagcgcccacacgtgttcgaatccaatccttcaatccgcaagcgacaacagactcgactcctgcgcaaactgagagcaacccttgatgagtacaccacgcgtgtcggccaacaggctattgtgctctgcatctcacccagtaagcccaacccagttttcaaagtgttcggggccgcacccttggagaacgtggtgaggaagtataaaagcatgatattagaggatctcgaatctgccctcgcggagcatgcccccgcacctcaggaagtgaactctgaactgcctccactcaccattgacggcatcccggtgagtgtggacaaaatgacacaggcgcagctgagggcattcattccagagatgttaaaatactctaccgggcgaggaaagccggggtgggggaaggagagctgcaaacctatctggtggcccgaggatatcccatgggccaatgtacggtccgacgtgcgcacagaagagcaaaaacagagagtgtcatggacgcaggctctccgtacgattgtgaagaactgctataaacagcacggtcgggaggatctgttgtacgcattcgaggaccagcaaactcagacacaggccaccgcaactcatagcatcgcacacctcgtgccaagccaaaccgtcgtgcagacattctccaaccccgacggcaccgtgtccctcatccaggtgggcaccggggccaccgtggccaccttggctgatgcttccgaactccccacgacagttacggtggcccaagtcaattacagcgccgtggccgacggagaagtggagcaaaattgggctacgctccaagggggcgagatgacaatacagaccacacaggccagtgaggctactcaggccgtggcctccctagccgaagcggcggtcgccgcttctcaggagatgcagcagggggcaacagtgaccatggcattgaacagcgaagctgccgcacacgctgttgcgacactggcagaggccactctgcagggggggggccagatagtgctgtcaggtgaaaccgcagccgctgtgggagcactgacaggggtgcaggacgccaatggcctgtttatggcagaccgagcaggcaggaagtggatacttactgataaggccactggcctggttcagattcctgttagtatgtaccagaccgtagtgaccagtctggctcagggcaatgggccagtgcaggtggctatggcgcctgtgaccactagaattagtgacagcgctgtcactatggacggccaggccgttgaggtggttaccctagagcagtag

SEQ ID NO: 197794 - DNA, 1512 bp, synthetic construct
  misc_feature 1..1512: note = Description of Artificial Sequence: Synthetic coding sequence
  source 1..1512: mol_type = other DNA
atggaggagcacggcgtgacccagaccgagcacatggccaccatcgaggcccacgcagtcgcacagcaggtccagcaggtgcacgtcgctacctacactgaacactctatgctttctgccgatgaggacagtcccagctcaccagaggacacaagctatgatgattccgatatcctgaactcaactgcagccgatgaggtaaccgcacacctcgccgctgcaggcccagtgggaatggcagcagccgccgccgtggccaccgggaagaaaagaaagagaccccatgtcttcgagtctaacccaagtattaggaagcggcagcaaacccggctgctacggaagttgcgtgcaaccctggacgaatacaccactcgcgtggggcagcaggcaatcgtactctgcatttccccgagtaaaccgaatccagtgttcaaggtgttcggtgctgcacccttggagaatgttgtgcgaaagtataaaagcatgatcttagaggatttggagtcagccctagctgaacatgctccagctccacaagaagtgaactctgagctgccccccctcactattgacggcattcctgtgagtgtggacaagatgacacaggctcaattacgagcatttatccctgaaatgttaaagtatagcacggggcgcggaaagcccggttggggtaaagaatcatgtaagccgatctggtggcccgaagacataccttgggcaaatgttcgctccgacgttaggactgaggagcagaagcaaagggtgtcttggactcaagcattaaggaccattgtaaaaaattgttataaacagcacggtcgagaagatctgttatacgcatttgaagaccaacagactcagacgcaggcaaccgccacacactccatcgctcacttggtgccgtcccagactgtagtgcagaccttctccaaccctgacggaaccgtctccctcattcaggttggcacgggcgccactgtggccactctggccgacgcctctgagcttccaaccacagtcaccgtggcacaagtaaactactccgctgtggccgacggggaagtggaacaaaattgggctacacttcaaggcggcgagatgacgatccaaaccacccaggccagtgaggccacacaggccgttgctagtctggcagaggcggcagttgcagcgagccaagagatgcagcaaggcgccaccgtcacaatggcactgaattccgaagctgctgcacatgccgtagctaccctagccgaggccactttgcaggggggcggccaaatcgtgcttagcggagagacagccgccgcagtgggagcactgacaggagtccaggacgccaatggactggtccagatacctgtgagcatgtaccaaacggtggtcacatcccttgctcaggggaacggccccgtacaggtggcaatggctcccgtaactactcgcatcagcgattcagccgtgacaatggacggacaggccgtcgaggtggttactctggagcagtag

SEQ ID NO: 197795 - DNA, 633 bp, synthetic construct
  misc_feature 1..633: note = Description of Artificial Sequence: Synthetic coding sequence
  source 1..633: mol_type = other DNA
atggaggagcacggcgtgacccagaccgagcacatggccaccatcgaggcccatgctgtagcgcagcaggtgcagcaggtccacgtcgctacttacactgagcactccatgctgagtgccgatgaggatagcccgtcgtctcccgaggacacgtcctatgatgactcagacatccttaactctaccgccgccgatgaggtgactgcccatttagctgcagccggccccgtggggatggccgcagctgccgccgttgccacgggcaaaaagcgtaagaggcctcatgtattcgagtctaatcctagcattagaaaaaggcaacagacgaggcttctgcgaaagctgcgcgctacgctagacgaatacacaactagagtgggacagcaggccatcgtgctctgcataagcccaagtaaaccaaatccagtgttcaaagtattcggcgctgcccctcttgaaaacgtcgtgcgcaagtataagtcaatgatcctggaggacctggagtcagccctggctgagcatgctcctgctccacaggaggtgaattcagagttacctcctttaactatcgatgggatccccgtgagcgtagacaagatgactcaggctcagctcagagcctttataccatag

SEQ ID NO: 197796 - DNA, 1029 bp, synthetic construct
  misc_feature 1..1029: note = Description of Artificial Sequence: Synthetic coding sequence
  source 1..1029: mol_type = other DNA
atgatcctggaggacctggagagcgccctggccgagcacgcccccgcccctcaggaggtgaactctgagctgcctccactgactatcgatggcattcctgtcagtgtggacaagatgacccaagcacaacttcgcgcttttataccagagatgctgaaatactcgacaggccgaggtaagcccgggtggggtaaggagtcttgtaagcctatttggtggccagaggatataccttgggccaacgtgaggagcgacgtcagaacagaggagcagaagcaacgcgtttcatggacacaggcactcaggactattgttaagaattgttataaacagcacggaagagaagacctgctgtatgcctttgaggatcagcagacgcaaacacaggccacagcaacccactccatagcccacttggtccctagccaaacggtggtgcaaaccttctccaatccagacggtacagtgagtctgatccaggttgggaccggtgcaactgtagccaccctcgcggacgctagcgagttacccaccaccgtgaccgtggcacaggtcaactattccgccgtggcagacggagaagtggaacagaactgggctactttgcaaggcggtgagatgacaatccagaccactcaggcctctgaagcaacgcaggctgtcgcctcactggccgaggccgccgtggccgcgagccaggagatgcagcaaggtgcaactgtcaccatggccctcaactccgaagccgctgctcacgccgtggccacgctggctgaagcaacactgcagggcggcggtcaaatagtcctttcaggggagaccgccgctgccgtgggggcactgaccggagttcaagatgccaacgggctggttcaaatccctgtctctatgtatcagacggtcgtcacgtcgctggctcagggcaatgggcccgtccaggtggccatggcacctgtgactacgcgcatttctgatagtgcagtaaccatggacgggcaggcggttgaggtagtgaccctagaacagtag

SEQ ID NO: 197797 - DNA, 1860 bp, synthetic construct
  misc_feature 1..1860: note = Description of Artificial Sequence: Synthetic coding sequence
  source 1..1860: mol_type = other DNA
atggccgacgagggcaagagctacagcgagcacgacgacgagcgggtcaactttcctcagcgaaaaaagaaaggccggggaccatttcgctggaaatatggggagggaaaccggcgctctggtagaggtggcagtgggattcgctccagccgactcgaggaggacgacggcgacgtggcaatgagcgacgctcaggatgggcctcgggtaagatataacccatacacaacacggcctaacagaaggggagacacctggcacgatcgggatcgaatccatgtgacagtcagacgggatagagctccgccggaaagaggcggggcgggtaccagccaggatggaacgagtaagaattggtttaaaattacaattccatatggccgcaagtatgacaaagcatggctgctgtcaatgattcagagtaagtgtagcgtgccttttacacccatagagtttcactacgaaaatacccgcgcccagtttttcgtggaagacgcatctacagcgtcagctctaaaagcagtgaattacaaaatcctggatagagagaatcggcgcatatccatcattattaacagctctgctccccctcatactattctgaacgagttgaagcctgaacaggtcgagcagcttaagctcataatgtctaagcgctatgatggaagccagcaagccctcgatttaaagggactccgaagtgacccagaccttgtggctcagaatatcgatgttgttctgaatcgccgatcttgcatggccgctacccttcgcatcattgaagaaaatattccggaattactgagtctgaatctctcaaacaaccgtctgtatcgtttggacgatatgagtagcatcgttcaaaaggcccctaacctcaagatacttaacctgtcgggaaatgaactaaaatccgaacgcgaattggataagatcaaaggtctgaagcttgaagaactttggttggatggcaattccctgtgcgacacgttccgcgatcagtccacgtacatctccgccatacgcgaacggttcccgaaacttctgaggctagatggccatgagctgccacctcccatagcttttgacgtggaagccccaacaacgctgccgccctgcaaagggagttactttggaaccgaaaacttgaagtctctggtgctccacttccttcagcagtactatgcaatctatgactctggagatcgccagggactcttagatgcataccatgacggagcttgctgctctctgtctatcccattcataccccagaatcctgcacgcagcagtctcgcagagtattttaaggattccaggaatgtgaagaagctgaaagaccccaccctccggttccggctattaaagcatacacgccttaacgttgttgccttcctcaatgaactccccaaaacccaacacgacgtgaactcatttgtcgtggacatctctgcccagacatcgacgctgttgtgcttttccgtgaacggggtgttcaaggaagtagatggtaaaagccgtgactcactgcgggcatttactagaacctttatcgctgttcccgcctcgaactcaggtctgtgcatcgttaatgacgaattatttgtccgcaatgcttcctctgaggaaatccagcgtgcttttgcgatgccggccccaaccccctccagttcacccgtcccgaccctttcccctgaacagcaggagatgctgcaggctttttccacacagtcgggaatgaacctagagtggtctcagaaatgtcttcaggataacaactgggactatactcgaagtgcccaagcatttacacatctgaaggcaaaaggagagattccagaggtcgcattcatgaaatag

SEQ ID NO: 197798 - DNA, 1071 bp, synthetic construct
  misc_feature 1..1071: note = Description of Artificial Sequence: Synthetic coding sequence
  source 1..1071: mol_type = other DNA
atggccgacgagggcaagagctacagcgagcacgacgacgagcgggtcaactttccacaacgcaaaaaaaagggacggggtccattccggtggaagtacggcgaaggaaatcggcgttcagggagagggggctctggcatcaggtcgagcagactggaagaggacgacggtgatgttgccatgagcgatgcacaggatggaccccgtgtgcgatacaatccttacacgacgcgccctaacagacggggtgacacttggcatgatagagacaggatccatgtgactgtgagacgcgacagagcaccccctgagagaggtggcgctggaacctctcaggacgggacatctaagaattggtttaaaataactatcccgtacggccgtaagtatgacaaagcctggctcctgtcaatgatccagagcaaatgctccgtgcctttcactccaatcgagttccattacgagaacactagagcacagttctttgtggaggatgcctctacagccagcgccctcaaggccgtcaactataaaatccttgatcgagaaaatcgtcgtattagtatcattattaattcttccgctcctccacacacgatcctgaacgaactgaaaccggagcaagtcgaacagctgaaactgattatgagtaaaaggtatgatggcagccaacaagccctggacctgaagggtctgcggtccgaccctgatctggtagcccagaatattgatgtcgtgctgaaccgtaggagctgcatggcagccactctccgaatcattgaagagaacatccccgagctgttgagccttaacttgtctaataatcgcctgtatcgcctggatgatatgtcctctatcgtgcaaaaagcccccaacttgaaaatcctcaatttatcgggcaatgaactcaaatccgaaagagagctggataagattaaaggcctcaaactggaagaactctggctggacgggaacagcttgtgcgacactttcagagatcagagcacatatatccggagcgtcgtggcttgcgtttcacctccaggtgacctccaccccctgggaggttag

SEQ ID NO: 197799 - DNA, 1071 bp, synthetic construct
  misc_feature 1..1071: note = Description of Artificial Sequence: Synthetic coding sequence
  source 1..1071: mol_type = other DNA
atggccgacgagggcaagagctacagcgagcacgacgacgagcgggtgaattttccacagcggaaaaagaagggaaggggcccatttcggtggaaatacggggagggcaacagacggtcgggacggggcgggtcgggtatccgcagcagcagactagaggaggacgatggcgacgtggcgatgagcgatgctcaggacggaccccgagttcgttacaatccttatactactaggcctaatcggcggggtgatacttggcatgaccgggatcgcatccacgttaccgtgcgcagggacagggctcctcccgaaagaggcggcgcaggtacttcacaggatgggacatctaagaactggttcaaaattacaataccgtatggtcgaaaatatgataaagcttggctgctgagcatgattcagtctaaatgcagcgtgcccttcacgccaatcgagttccactatgagaacaccagagcccaattttttgtggaagatgcaagtacagcctccgctctgaaagcagtgaactataagattttggaccgtgaaaataggagaatcagtatcatcattaactccagcgctcccccacatacgattctcaatgagttgaaaccagaacaggtggagcaactcaagctgataatgtctaaaagatacgatggcagccagcaagccctcgacttaaagggcctgagatctgacccagatctggtagctcagaatattgacgttgttctgaaccggagatcctgcatggccgcgaccttgaggatcatagaggagaacatccccgagctgttgtccctcaatttgtctaataaccgcctgtacaggcttgatgacatgtcatcaatcgtgcagaaggccccaaatctcaagatcctgaacctttctgggaacgagcttaagagtgaacgggagttggacaagatcaaaggtctcaaactggaggaactgtggctagatgggaacagcctgtgtgacactttccgggaccagtccacgtacatccgctcggtggtggcctgcgtttccccgcctggcgatcttcatccgctcggggggtag

SEQ ID NO: 197800 - DNA, 1860 bp, synthetic construct
  misc_feature 1..1860: note = Description of Artificial Sequence: Synthetic coding sequence
  source 1..1860: mol_type = other DNA
atggccgacgagggcaagagctacagcgagcacgacgacgagcgggtaaactttccccagcggaagaagaagggacgcggtccattccgatggaaatatggggaggggaacaggaggtcaggtcgcggtggatcaggaattagatctagccgtctcgaggaagatgatggcgacgtggcaatgagcgatgcccaagacggcccgagggtgcgctataacccatacaccactcgcccaaatcgcaggggcgacacatggcatgaccgggataggattcatgttaccgtgcgccgggatagggcaccgcctgagcggggtggggctggaacctcccaggacggaacaagcaagaactggttcaaaatcaccattccttacggtagaaagtatgataaggcttggctcctcagtatgatccaatccaagtgcagcgtgcctttcactcctatcgaatttcattatgaaaacaccagagcccagttcttcgtggaggacgcgtcaactgccagcgcattaaaagcggtgaactacaaaattctggaccgtgaaaacagacgtatatccataattattaactcaagtgccccaccccataccatcttaaacgagcttaagccggagcaggtggaacagctgaagctaatcatgtctaaacgctacgatggaagccagcaggccctcgacctgaagggactgcgtagcgaccccgacctagtggcccagaatattgatgtcgtgctgaaccgcagaagttgcatggcggcaaccttacgtatcatagaagagaacatccccgagctactaagcttaaacctgagcaataaccggctgtaccgtctcgatgacatgtctagtattgtacaaaaggcgcctaatctaaagatactgaatttgtccggtaatgagttaaagagcgaaagagagctcgataagatcaagggcctgaagctcgaagaactctggctggacggaaattccttgtgcgacacttttagagatcagagcacgtacatttctgccattagagaaagattccccaagctgctgcggctcgacggacatgaactgcctcctcctatcgcctttgatgttgaggcacccacaaccttgccaccatgcaagggcagttactttggtactgagaacttgaagagcttggttttgcattttctgcaacagtattatgccatatacgacagtggcgataggcaagggcttttagacgcttaccacgacggggcatgttgctctttatccatccctttcatacctcagaatccagctaggtccagcctggccgagtacttcaaggactcgcggaacgtgaaaaagctgaaggaccctacgctccggttccgtttattaaagcatactagactgaacgtggtcgcatttctgaacgagttgcccaaaactcaacacgatgtgaacagcttcgtggtggacattagcgcacaaacctccactctgctgtgcttcagcgtaaacggtgttttcaaagaagtggacggcaaatctagagacagtctgcgcgcgtttactagaaccttcatcgctgtgcccgcgtccaatagtggcctgtgtatcgtgaacgacgagctcttcgttaggaatgcgagctctgaggagatacaacgggctttcgccatgcccgcccccaccccttcttcaagtcccgtaccgactctgtcgccagagcagcaggagatgctgcaagcctttagcacccagagcgggatgaacctagagtggtctcagaaatgtctccaggataacaattgggactataccagaagtgcacaagctttcacacacctcaaggccaagggggaaattcctgaagtcgccttcatgaaatag

SEQ ID NO: 197801 - DNA, 1881 bp, synthetic construct
  misc_feature 1..1881: note = Description of Artificial Sequence: Synthetic coding sequence
  source 1..1881: mol_type = other DNA
atgtgcagcaccctgaagaagtgcggcacctaccggaccgaggtggctgaatgccacgaccacgggtcaacatttcaaggcaggaagaagggcgggagcagcttcagagacaacttcgacaagcgatcctgtcattacgagcacgggggttatgagagacccccctcccactgccaagagaacgacggttcagtggaaatgcgtgacgtccataaggatcagcagctgagacacacaccttactctatcagatgtgaaagaagaatgaaatggcactcagaggacgaaatccgaataaccacatggcgtaatcgcaaacctcccgaaagaaagatgagccagaatactcaggatgggtacaccagaaactggtttaaagtcacaatcccctacggtatcaagtatgataaggcttggttgatgaactccattcagagtcactgcagtgatagattcacccccgtggacttccattacgtgaggaatagagcttgtttctttgtgcaggacgctagcgcggcttctgccctgaaggacgtttcctacaagatatacgacgacgaaaaccagaaaatttgcatctttgtgaatcattccacagcgccgtattcagtgaagaataaactgaaaccgggacaaatggaaatgctgaagctgactatgaataagcgttacaatgtgtcacagcaggccctcgatttgcagaacctgagatttgacccagacttaatgggcagggatatagacatcattttgaacaggagaaactgcatggccgccacattgaagattattgaaagaaattttcccgaactgctgtctcttaacctctgcaataacaagctatatcagctggatggattaagtgacatcacggagaaggctcctaaggtgaaaactctcaacctatccaagaacaagctggagagcgcttgggagctgggcaaagtgaagggcttaaagctggaagaactgtggttggaaggcaaccctctgtgttctactttctccgatcagagcgcctacgtgagcgctattagagactgtttcccgaagctcttgagactggatgggagggagctgagcgcccctgtcatcgtggatattgatagctcggagaccatgaaaccatgtaaagaaaatttcacaggcagcgaaaccctgaaacatctggtattacagtttctgcagcagtactacagcatatatgattcaggcgatcgacaggggctgctcggcgcttatcatgatgaggcgtgcttcagtctggccatcccatttgaccccaaggactccgcccccagctctctctgtaaatacttcgaagactcacggaacatgaaaacactaaaggacccctacctgaaaggagagctcctgcgtcgtactaaacgggacatagtcgattcgctcagcgccctgcccaaaacacagcacgatctttcgtctatcctcgtcgacgtttggtgccagaccgagcggatgctgtgcttttctgtgaatggagtgtttaaggaggtcgaaggtcagagtcaaggcagcgttctagcctttaccaggaccttcatcgcaacaccaggatccagttcctccctctgcattgtcaacgatgagctctttgtgcgagatgctagcccccaggagacgcaatctgcattttccattcccgtgtcaactctctcaagtagttccgagcctagcctgagccaagaacaacaggaaatggtccaggccttctctgcccagtccgggatgaagctggagtggagccaaaaatgcctgcaggacaacgaatggaattataccagagctgggcaggcgtttaccatgctgcagacagaaggtaagattcctgccgaagcatttaaacaaatctcctag

SEQ ID NO: 197802 - DNA, 1881 bp, synthetic construct
  misc_feature 1..1881: note = Description of Artificial Sequence: Synthetic coding sequence
  source 1..1881: mol_type = other DNA
atgtgcagcaccctgaagaagtgcggcacctaccggaccgaggtggccgagtgccatgaccacgggtcgacgttccaagggagaaagaagggaggttcgtccttcagggacaacttcgacaaacgatcttgtcattatgaacatggagggtatgagcggcccccatcccattgtcaggagaatgacggctctgtggaaatgcgagacgtgcataaagaccagcagttgcgacataccccctattccattcgttgtgagcgcaggatgaagtggcattctgaagacgaaatccgtataacaacttggagaaacagaaaacccccagagcgaaagatgagccaaaatacacaggacggttacacaaggaattggttcaaagtcaccatcccgtatggtatcaagtacgataaagcctggctgatgaactctatccagtctcattgcagcgatcgttttactccagtcgacttccactacgttcgaaatcgcgcgtgcttttttgtacaggacgcctccgcggcatctgccttaaaggacgtctcctacaagatctacgatgacgaaaatcagaagatctgtatttttgtgaaccactccaccgctccttatagtgtcaagaataagcttaaacccggtcaaatggagatgttgaagctcacgatgaataagcgctacaatgtgagccagcaggcactggacctgcagaacctgaggtttgaccctgacctcatggggcgggacatcgacataattctaaaccgaaggaattgtatggccgcgaccctgaagattatcgagagaaacttccccgagctactaagtctgaacctctgtaataataagctttaccaattggatggcctaagcgacataaccgagaaggcacccaaagtcaagactctgaacttatccaaaaacaaactggagtctgcctgggagctgggcaaggttaaaggattaaaactggaggagttatggctggaggggaatccactgtgcagcacatttagcgaccaaagtgcatatgtttcggcaattcgcgactgctttcccaagctcctacggctggatggtcgtgagctcagcgcccccgttatcgtggatatcgacagtagtgagacgatgaaaccgtgtaaggaaaatttcacgggctctgaaacattgaagcacttagtgctacagttcctgcagcagtactacagcatctacgattctggggatcgacaggggctccttggcgcttatcacgacgaggcatgttttagcctcgcaattccctttgaccctaaagacagcgcgccatcaagtctgtgtaagtacttcgaggatagtcgcaacatgaaaacgcttaaagacccttacctgaagggagagttgctccgtaggaccaagcgcgatattgtggatagcctttccgctttaccaaagacccagcacgatttatcttccatcctggtcgatgtgtggtgccagactgaacggatgctatgcttttcagtgaacggtgtcttcaaggaagtagaggggcagtcccaggggagcgtgcttgcgtttacccggacatttatcgccacaccgggctcctcatcatccttatgtatagtcaacgatgagctcttcgtgagggatgctagcccacaggagactcagtctgcattcagtatccctgtgtccacattgtcaagttcatctgaaccatctctgagccaggaacagcaggaaatggtgcaagctttctcagcacagagcggaatgaaactggagtggtcacagaaatgtctccaggataatgagtggaattacacaagggctggccaggcatttacaatgttacagactgaaggcaagattcccgccgaggctttcaagcaaatcagctag

SEQ ID NO: 197803 - DNA, 1881 bp, synthetic construct
  misc_feature 1..1881: note = Description of Artificial Sequence: Synthetic coding sequence
  source 1..1881: mol_type = other DNA
atgtgcagcaccctgaagaagtgcggcacctaccggaccgaggtggccgagtgccacgaccatgggtctacgtttcaagggcggaaaaaaggaggatccagtttccgtgataatttcgacaagcgctcatgtcactacgagcacggaggctatgaaaggcccccatcgcattgccaggagaatgacgggtcagtcgaaatgagagacgtccacaaagatcagcaactccgacacacaccctattctattaggtgtgagcggagaatgaagtggcacagcgaagatgaaatccgtatcaccacctggcgtaacagaaagccaccggagcgaaagatgtcccagaacacacaggacggctatactaggaattggttcaaagtcacaatcccctatggtatcaagtacgataaggcctggctgatgaactcaatccaaagccactgctctgatcgctttactcccgtcgattttcattacgtccgcaaccgggcctgcttctttgttcaggatgctagcgctgccagtgctctgaaggacgtgtcttacaagatctacgatgatgagaaccaaaaaatttgcattttcgtcaatcacagcacagccccttattctgtgaagaacaagctcaaaccaggccaaatggaaatgctaaaattaacaatgaacaagcgctacaacgtgagtcagcaagccctggacctgcagaacctgcggtttgacccagatctgatgggtcgcgacattgatatcattctcaatcgaaggaattgcatggcagctacactgaagatcatcgaacgcaacttccctgagctgctgagcttgaacctctgtaataataagctgtatcagctggacggcttgtcggatataaccgaaaaggctcccaaggtcaaaaccctcaacctgagcaagaacaaactggagtccgcctgggaactgggtaaagtgaaggggcttaaactggaggaactgtggctggagggcaaccctctctgctcaacatttagtgaccagtcagcttacgtgagcgcgatcagagactgctttcccaaactgctgcgcctcgatggccgtgaactgtccgctccagtgatcgtcgacattgatagctccgaaacgatgaaaccgtgtaaagagaattttactggcagtgaaacactgaagcatctcgtgttgcagttcttacaacaatattattctatttacgattcaggcgatcgtcaaggcctccttggagcttatcacgacgaggcttgcttctccctagctatcccattcgatcccaaagatagtgcccctagcagtctgtgtaaatacttcgaagatagtcgcaacatgaaaacactgaaagacccctatctgaagggcgaactgttgcgacggactaaaagagatatcgtggactccctgagtgccctccccaagacccagcatgatctcagcagcatactcgtggacgtttggtgtcagactgagcggatgttgtgtttctctgtaaacggagttttcaaggaagtagagggacagtctcaaggctcggttctcgcatttacccgcaccttcatcgccacacccggatcttcttccagcctgtgcatagtcaatgatgagctcttcgtgcgcgatgcctccccccaagagacacagagcgctttcagcatcccagtgtctactctctcttctagttccgagccatctctgtcccaggaacagcaggagatggtgcaggctttctccgcccagagtggaatgaagcttgagtggtcccagaaatgtttgcaagataacgagtggaattatactcgcgcaggccaggctttcactatgctccagacagagggcaagatcccagccgaagcgtttaagcaaatttcctag

SEQ ID NO: 197804 - DNA, 1230 bp, synthetic construct
  misc_feature 1..1230: note = Description of Artificial Sequence: Synthetic coding sequence
  source 1..1230: mol_type = other DNA
atgaagtggcacagcgaggacgagatccggatcaccacctggcggaacaggaagcccccagagagaaagatgtcacagaatacgcaggacggctacactcgcaattggtttaaagtcactataccttacgggataaagtatgataaagcatggctcatgaactctatccagtctcactgttccgataggttcacacccgtcgacttccactatgtgcgaaacagagcatgtttcttcgtgcaggacgcatcagcagcctcagccctaaaggatgtctcttacaaaatctacgatgatgagaaccagaagatttgcatttttgtgaaccatagcaccgcaccttactcagttaagaacaaattgaagcccggacagatggagatgctgaaattgaccatgaataaacgttacaacgtgagccagcaggctctcgatctgcaaaacttgaggtttgatccggaccttatggggagggatattgatattatcttgaacagacgcaactgcatggcagccacattgaagataattgagaggaattttcctgaactcctgtcgcttaacctctgtaacaataaactctaccaactggacggactctcagacattaccgagaaggctccaaaggttaagaccttaaatctcagcaagaataaactcgaatctgcttgggagctaggcaaggtgaagggtctcaaactagaagaactttggctggaggggaatcccctatgctcaacattttccgaccagagcgcatatgtgtctgctatcagagattgtttccctaagttactgagactggatggccgcgagttatcagcccctgtcatcgtggacatagactcctccgagaccatgaaaccatgtaaagaaaacttcacaggatctgagaccttgaagcacctagttcttcaatttttacagcaatactactctatctacgactcaggagatcgccagggattgttgggagcctaccatgacgaagcctgcttttcactcgccattccttttgaccccaaagattctgccccaagttctctatgcaagtacttcgaggattccagaaacatgaagaccctgaaagatccctacctcaaaggtgagttgttacgacgcaccaaacgtgacatcgtggatagcttatccgcgctgccgaagacgcagcacgacctcagcagtatattggtggacgtgtggtgccagactgtgccgagcgggcagtag

SEQ ID NO: 197805 - DNA, 1881 bp, synthetic construct
  misc_feature 1..1881: note = Description of Artificial Sequence: Synthetic coding sequence
  source 1..1881: mol_type = other DNA
atgtgcagcaccctgaagaagtgcggcacctaccggaccgaggtggctgagtgtcatgatcacggttctacttttcaaggtcgcaagaagggggggagttcttttcgggataattttgacaagcggtcttgccattacgagcacggaggatacgagcgcccacctagccattgtcaggaaaacgatggcagcgtggagatgcgagacgtacataaggatcagcagctccgacatacaccatattctatccgatgcgagaggagaatgaaatggcatagcgaggatgagatcaggattactacatggcgcaataggaaaccaccagagcgcaaaatgagtcagaacacgcaagacgggtatacccgcaattggtttaaggtgacaataccttatggtatcaagtatgataaagcatggctgatgaactccatacagtcccattgttccgacaggtttaccccagttgacttccactatgttcggaacagggcgtgtttttttgtacaggatgcatctgccgccagcgccttgaaggatgtgtcctataaaatctatgatgatgagaaccagaaaatttgcatcttcgtaaatcacagcaccgccccgtattctgtgaagaacaaactcaagcccgggcaaatggagatgctgaaattaaccatgaacaaaagatataacgtgagccagcaagctttggatctccagaatctccgctttgaccccgacctgatgggccgggacatcgatattattctgaaccgcagaaattgtatggcagccacactgaagataattgagaggaatttcccagagctgctatctctgaacctgtgcaacaataaactctatcagctggatggcttatcagatatcactgaaaaggcccctaaagtgaagaccctgaatctgtctaagaataagctggagtcagcatgggagctgggcaaagtgaagggtctcaaacttgaagagctatggctggagggcaaccccctgtgcagtaccttttccgaccaaagcgcctatgtaagcgcaattcgagactgctttcccaagctgttacgtctggatggtcgcgagctgtcagccccagtaatcgtcgacatagatagttctgaaacaatgaaaccttgcaaagaaaactttacaggctccgaaacgctcaaacacctcgtactccagtttttgcagcaatactatagcatatacgacagtggagatagacagggtcttttaggagcttatcatgacgaagcctgtttcagtttggccatcccattcgaccctaaagacagtgccccctctagcctgtgtaaatacttcgaggactcccggaacatgaagactttaaaggatccttacctgaagggggagttgctgaggcgtacaaagcgcgacattgtggattctcttagcgcactgcctaagacacagcacgacctttcctctattctggtcgacgtgtggtgccaaaccgagcggatgctctgcttctctgtgaacggggtgtttaaggaggttgagggacagtcccaggggtctgtactagcattcaccagaacatttatcgccacccccggctcatcttcttccctatgtatcgtgaacgacgaactgttcgttcgggacgcttctccccaggagactcaaagtgcttttagcattcctgtatctactttgagttcttcctccgagcctagtctctctcaggagcagcaagaaatggttcaggctttctctgcccaatccggcatgaaactggaatggtcccaaaaatgtctgcaggataatgaatggaattacacacgcgctggacaggctttcacaatgttacaaaccgaaggcaagatcccggcagaagccttcaaacagatatcttag

SEQ ID NO: 197806 - DNA, 1596 bp, synthetic construct
  misc_feature 1..1596: note = Description of Artificial Sequence: Synthetic coding sequence
  source 1..1596: mol_type = other DNA
atgagcctgcccagcggccacaccaccggccacaccgaccaggtggtgcaaaggagagcccgttgctgggacatctatcagagaaggttcagctctcggtctgaaccagtgaaccctggaatgcactccagttctcaccaacagcaggacggagatgctgctatgcatggagcccacatggacagccctgttcggtacaccccatacaccatttccccctacaatcgcaaaggatctttcaggaaacaggatcagacacacgtgaacatggagagggaacagaagccaccagagcgtcggatggaaggtaacatgccggatggaacccttggctcctggtttaaaatcactgttccattcggcatcaaatacaatgaaaagtggctgttgaatctgatccagaacgaatgctccgtgcctttcgtgcctgtcgagtttcattacgagaacatgcatgccagcttcttcgtcgagaatgcttctatcgcttatgcgctgaagaatgtgtccgggaaaatatgggacgaagacaacgaaaagatcagcatttttgttaaccccgccggcattccacattttgtgcatcgcgagctaaagtcagagaaggtggagcagattaaattagccatgaatcagcaatgtgacgtcagccaggaggcactggacattcagcggttgcccttttacccagacatggtgaatcgcgataccaaaatggcctctaatccgcgcaagtgcatggccgcttccttagatgtccacgaagagaacatacccaccgtgatgagcgcaggggagatggataaatggaaggggatcgagcccggcgagaagtgtgccgacagaagccccgtgtgtaccacgttctcggacacatcctccaacattaacagcattctggaacttttccccaaactgctgtgcctggacggccagcagtcacctagagccaccttgtgtggaacagaggcccacaagaggttgccaacatgcaaagggtcatttttcgggagtgaaatgctgaagaatcttgtcctgcagtttcttcagcagtattatctgatatatgacagtggcgatagacaaggacttctgtccgcttatcacgatgaagcctgcttcagcctctcaattccttttaaccctgaggacagtgccccttctagcttctgtaaattttttaaggactccagaaatatcaagattctcaaagatccttatctccgtggcgaactattgaaacatacaaaacttgacatcgtggactccctgtcagctctgcctaaaacacagcatgacctctcttccttcttagttgatatgtggtatcagaccgaatggatgctgtgtttttccgtgaatggtgtcttcaaggaagtggagggtcaatcccagggctcggttctagcatttaccagaaccttcatagcaactcccgggagtagtagcagcctctgcattgtgaatgataagctgttcgtcagagatacttcccaccagggtacgcaaagtgctctctttaccctggtgcctaccgcgtttagctcatcagtgccagcgtttagccaggagcagcaaaagatgctgccatcgtag

SEQ ID NO: 197807 - DNA, 702 bp, synthetic construct
  misc_feature 1..702: note = Description of Artificial Sequence: Synthetic coding sequence
  source 1..702: mol_type = other DNA
atggagcgggagcagaagccccccgagcggcggatggagggcaacatgccagacggcaccttgggatcatggttcaaaatcacagttccatttgggataaagtataacgaaaaatggctgctgaatctcattcaaaacgaatgctccgtgcccttcgtacccgtggagtttcactacgagaacatgcacgccagcttctttgtggaaaacgcctcaatcgcctacgcactcaaaaacgtatccggtaaaatttgggacgaagacaatgagaagatttctatatttgtgaatcccgctggaatcccacactttgtacacagggagctgaaatcagaaaaggtagagcagattaaacttgccatgaaccagcagtgtgacgtgtcccaggaggccttggacattcagagactcccgttctatcccgacatggtgaatcgtgacacaaagatggctagcaacccgcgcaagtgcatggccgctagccttgacgtgcacgaggaaaatatcccgacagtgatgtcagcaggcgagatggacaagtggaaggggatcgagcctggtgaaaagtgtgccgatcgctccccagtctgcaccacattctcggataccagctctaatattaaatctgtggttccctccgttaccacctgggatcccgacctgtgcttgattgctcccttttgccggcggagacagcactag

SEQ ID NO: 197808 - DNA, 612 bp, synthetic construct
  misc_feature 1..612: note = Description of Artificial Sequence: Synthetic coding sequence
  source 1..612: mol_type = other DNA
atggccagcagccaccccgagcagctgtacgtggtgctgaagcccaccaggggctaccagccagtcagatactatctgatctacgacagtggtgatagacagggcctgcttagcgcttaccacgatgaggcttgcttcagtctttccattcccttcaatcccgaagacagcgccccatccagtttctgcaagttcttcaaggattctcgcaatattaagatactcaaagatccctaccttcgaggcgagctgcttaagcataccaaactagatatcgtcgactctttgtctgctctgcccaaaactcagcatgacctgtcctcttttcttgtcgacatgtggtaccagacggaatggatgctgtgctttagcgttaatggcgtgtttaaagaagtcgaaggccagtcccagggatccgtgctcgcttttacccgcacattcatcgcaacccccgggtcaagctcctcattgtgcattgtgaacgataaactattcgtaagggacacctcacaccagggcactcagagtgccctgtttaccctcgtgcctaccgctttctcatccagcgtgcctgcattctcccaggaacaacaaaagatgctaccaagctag

SEQ ID NO: 197809 - DNA, 1086 bp, synthetic construct
  misc_feature 1..1086: note = Description of Artificial Sequence: Synthetic coding sequence
  source 1..1086: mol_type = other DNA
tgaaacgagaagtggctgctgaacctgatccagaacgagtgcagcgtcccatttgtgccagtggaatttcactacgagaatatgcatgctagcttctttgttgaaaatgcatctatcgcttatgcccttaaaaacgtgtctggcaaaatttgggatgaagacaatgagaagatttctatcttcgtgaatccggccgggataccccacttcgtgcaccgcgagctcaagtccgaaaaagtggaacagatcaagctagccatgaatcagcaatgtgacgtgagccaggaagcgctcgatatccagcgcctgcctttctacccagacatggtgaatcgcgacaccaagatggcttcaaatcctcggaaatgcatggctgcaagccttgatgtccatgaagagaacattcctacagtgatgagtgcgggtgaaatggataagtggaaagggatcgaacctggcgaaaagtgcgccgatcggtctcccgtttgtactaccttttccgatacttctagcaatataaattctattctagaactctttcccaagctgctgtgcttggacgggcaacaatccccccgagccacattgtgcggaacggaggctcacaaacggctgccaacgtgcaaagggtcgttctttggatcagaaatgctgaaaaatcttgtcctccagtttttacagcaatattacctcatctatgattctggtgatagacagggtctactgtcagcctaccatgacgaggcgtgcttttccttgtcaattccatttaaccctgaggattcagctccgagcagcttttgcaagtttttcaaagatagtcgtaacatcaaaatcctcaaagatccctacttgcgcggtgagttgttgaagcacactaaacttgacatcgtcgatagcctgtccgcactcccaaagacccagcatgatttatcttctttcctggtggacatgtggtaccagactgaatggatgttgtgctttagcgtgaatggtgtattcaaggaagtatctgggttctgttccagactgcacccggacttacactgttatccctggcagcagttccagtctgtgcatcgctag

SEQ ID NO: 197810 - DNA, 1194 bp, synthetic construct
  misc_feature 1..1194: note = Description of Artificial Sequence: Synthetic coding sequence
  source 1..1194: mol_type = other DNA
atgcggcggaacacccaggacgagaacatgcggaagtggttcaaggtaacaatcccgtatggcattaagtacgacaaagcatggctcatgaactccatacagtccaattgctccgtccctttcacccccgtcgacttccactacatccggaatcgcgcctgcttctttgtccaggtggcgagtgcagcttcagcactgaaggacgtgtcatacaagatctacgacgacgagaaccaaaagatctgtatctttgtcagtcatttcactgccccttattctgtaaagaacaagttgaaaccaggccagatggagatgcttaaattaaccatgaacaaaaggtataatgtgagccagcaagcattagatctccagaaccttaggttcgaccctgacctgatggggcgagacattgacataatcctgaaccgccggaactgcatggccgctaccctgaagatcactgaacgaaatttcccagaattgctgtccctgaacctttgcaacaacaagctgtaccagcttgatggtttgagcgatataacagagaaagcccccaaggtcaaaacgctgaatctctcaaagaacaagctcgagagcgcatgggagctcggaaaggtgaaagggctgaaactcgaggaactgtggctggaaggcaatcccttgtgtagtacattctcagaccaatcggcgtacgtgagcgccatccgggattgctttccaaagcttctaagactggatgggcgtgagcttagcgcccctgtgatagtggacattgacagcagcgaaacgatgaagccgtgtaaagagaatttcaccggcagcgagaccctcaaacatctcgttctccagttcctccagcagagtaacctctgcaaatactttaaagatagccgcaatattaaaatcctcaaggatccctatctgcagcgaaagctcctcaagcatactaagtgccccagaaatgtggattccctgtccgcattaccagagacacagcatgactttacatcaatccttgtggatatgtggtaccagacagtgaatacatgtttcctaccccgcgccggaccagagagccaaagatggtggtgcttgctatcactgaaatggaaagatggacttagagtgctcattttgccttcctgtggaccttcctccctgcccctcgcagcaatacccgtttgtgcctcctag

SEQ ID NO: 197811 - DNA, 1194 bp, synthetic construct
  misc_feature 1..1194: note = Description of Artificial Sequence: Synthetic coding sequence
  source 1..1194: mol_type = other DNA
atgcggcggaacacccaggacgagaacatgcggaagtggttcaaggtcaccatcccatatggcattaagtacgacaaggcctggctcatgaactcaattcaatctaactgtagcgttccattcactcccgtggactttcactacatccgaaaccgggcttgttttttcgttcaagtcgcctccgctgcttccgcactgaaggatgtaagttataagatctatgatgatgaaaaccaaaaaatttgtatctttgttagccattttaccgctccatattctgtaaagaataagcttaagcctggccagatggaaatgttaaagctgactatgaataagcggtacaatgtctcccagcaagcactcgatttgcagaacctgaggtttgacccagaccttatggggagggatatagacatcattttaaataggcggaactgcatggctgctactctgaaaatcactgaacgtaacttcccagagctattgagtctcaacctgtgcaacaataagctgtatcagttggatggcctgagtgacattacggagaaagcgccaaaggtgaaaacactgaatctctccaaaaataagcttgaaagtgcctgggagcttggaaaggttaaaggccttaagctggaggagctgtggctggagggcaaccccctctgtagcacttttagtgaccaaagtgcttacgtgtcagccattagagactgctttcccaagctgctcaggctggacggtcgcgagctttccgcaccagtgattgtggatatcgactcttcggagacaatgaagccgtgtaaggaaaacttcacggggtcggagacgctcaaacatcttgtccttcagtttctccagcagagtaatctgtgcaagtatttcaaagactcgcgtaacataaaaattctcaaagatccttacttacagaggaagctgttaaagcacactaaatgtcctcgtaatgtagactcattgtctgctctgcccgaaactcagcatgactttacaagcatcctagtggacatgtggtatcagacggtaaacacttgtttcctgccgagggccgggccagagagccagaggtggtggtgtcttttgtccctgaagtggaaggacggcctccgagtgctgatcctcccctcctgtggcccctcgtctttaccactggcagccattcctgtttgcgcttcttag

SEQ ID NO: 197812 - DNA, 1098 bp, synthetic construct
  misc_feature 1..1098: note = Description of Artificial Sequence: Synthetic coding sequence
  source 1..1098: mol_type = other DNA
atgcggcggaacacccaggacgagaacatgcggaagtggttcaaggttaccattccttacgggattaaatacgacaaggcttggctcatgaactctatccagagcaattgcagtgtcccatttacacccgtagacttccactacattagaaatagggcctgcttctttgtccaagtcgcctccgccgcctctgcgctgaaagatgtgtcctacaagatctacgacgacgagaatcagaaaatttgcatctttgtcagtcactttactgcaccgtactctgtgaagaacaagctgaagccaggccagatggagatgctcaagctgactatgaacaagcggtacaatgtgtcccagcaagctttggacctccagaacctgcgcttcgaccccgaccttatgggacgagacatcgatatcatattgaaccgccgaaactgcatggctgccactcttaagatcactgaacgtaacttccccgaactgctcagtctcaatctgtgtaacaataaactttatcagcttgacgggctgtcggatattacagagaaggcaccaaaggtgaaaaccttgaatctcagcaaaaataagctggaaagcgcctgggagctgggcaaagtaaaaggactcaaactggaggaactttggctggaaggaaatcctctgtgttctacattctccgaccagagtgcctacgtctctgctatccgggattgttttcctaaactgctgcgactggatggtagggaactcagtgctcccgtcattgtggacatcgatagcagtgaaaccatgaagccgtgcaaagagaatttcaccggatcagagacattgaaacaccttgtgctccagttcttacagcagtccaacctgtgtaaatattttaaggacagccgcaacattaaaattctgaaggacccttacctgcagcggaagttgctgaagcacaccaagtgtcccagaaacgtggattccctgtcagccctgccagagacacaacacgacttcactagtattctggtagacatgtggtatcagacagttaacacttgtttcttacctcgggccggtcctgaatcccagtctctccgacccctctag

SEQ ID NO: 197813 - DNA, 1098 bp, synthetic construct
  misc_feature 1..1098: note = Description of Artificial Sequence: Synthetic coding sequence
  source 1..1098: mol_type = other DNA
atgcggcggaacacccaggacgagaacatgcggaagtggttcaaggtgaccattccctatggcattaaatacgataaggcatggcttatgaacagtattcaaagtaattgttcagttcctttcacaccagtggattttcactacattcgcaacagagcctgcttttttgtccaggtggcctctgctgctagcgcactgaaggatgtcagttacaagatctacgacgatgaaaaccagaaaatctgcattttcgtgtcccacttcacagccccatattccgtgaagaacaagctaaagcctggccagatggagatgctcaaactcactatgaacaagcgatataatgtgagccagcaggcccttgatcttcaaaatctgcgattcgacccagaccttatgggtagagacattgatatcattctcaacaggcgtaactgcatggcagcgaccctcaaaatcaccgagagaaattttccagagttgctctctttgaatctatgcaacaataagctgtaccagcttgacggacttagcgacattacggagaaagccccaaaagtcaaaaccctgaatctgagcaaaaataagttggagtccgcatgggaactcgggaaagtgaaaggactgaaattagaggaactgtggctggaggggaaccccttgtgcagtacgttctcggatcaatcggcatatgtctcagccattagggattgctttccaaagctccttcggctggacggccgggaactgtctgcacccgttattgttgacatcgacagttcagaaaccatgaaaccttgcaaggagaactttactgggtctgagacactgaaacatctcgtcctgcaattcctgcagcagtccaatctctgcaagtactttaaggactcccggaatattaagatcttgaaagacccttacctccagcggaagttgttaaaacatacaaaatgtccacgtaacgtcgactctttgtctgcactccctgagacacaacatgattttacatcaatcttggtggacatgtggtatcagaccgttaacacctgctttctgcctagggcagggcccgaaagccagagcctgagacctctgtag

SEQ ID NO: 197814 - DNA, 1044 bp, synthetic construct
  misc_feature 1..1044: note = Description of Artificial Sequence: Synthetic coding sequence
  source 1..1044: mol_type = other DNA
atggagcagtacaccgccaacagcaacagcagcaccgagcagatcgtagtgcaggccggtcagattcagcagcaacagcaagggggagtaaccgcggttcagttgcaaaccgaggctcaggtggcttccgcctcagggcagcaggtgcaaaccctccaggtagttcaggggcagccattaatggtccaggtctctggtggacagctgataacatccacagggcagcccataatggttcaggccgttcccggcgggcagggtcagaccatcatgcaggtgcccgtgagcggaactcaggggctgcagcaaattcagctggtgccgcctggtcagatacagattcagggaggccaggccgtgcaggtgcaagggcagcagggtcagacacagcagataataatacagcagccacaaacggcagtaacggccggacagacacagactcagcagcagatcgctgtacaaggccagcaggtcgcccagaccgctgaagggcaaacaatcgtttaccaacctgttaatgccgatggcacaatactacagcaagtgacggttccagtctccggaatgatcaccattcccgcagcttctctggccggcgctcaaatagtgcaaactggcgccaacaccaacacgacaagtagcgggcaggggacagtgacggtgacacttcctgtggcaggcaatgtcgtgaatagcggaggaatggttatgatggtgcccggagctggctccgttcccgccatccagaggataccactgcccggcgccgagatgctggaggaggaacccttgtatgtgaatgccaaacagtaccataggatcctgaagcggcgacaggctcgggccaaactggaagcagaaggcaagatacccaaagagcgccggaaatacctccacgagtcacggcacaggcatgctatggctcggaaaaggggcgagggggggagatttttttcccccaaagagaaggacagtccgcacatgcaagatccaaatcaagcagatgaggaagccatgacccagattatacgagtgtcttag

SEQ ID NO: 197815 - DNA, 957 bp, synthetic construct
  misc_feature 1..957: note = Description of Artificial Sequence: Synthetic coding sequence
  source 1..957: mol_type = other DNA
atggagcagtacaccgccaacagcaacagcagcaccgagcagatcgtcgtgcaggcagggcagatccagcagcaggttcaagggcagcccctgatggtacaggtctccggaggtcagctgattacatcgacgggccaacctatcatggtccaggctgttccaggcggtcagggacaaaccatcatgcaggtgcctgtatccgggacccaggggcttcagcaaatacagctggtacccccaggtcagattcagatccaaggcggccaagccgtccaggtccaggggcaacaggggcagacacagcagattattatccaacagccccaaaccgccgtgacagctgggcaaacacagacccagcaacagattgccgtccagggacagcaggtggctcaaaccgctgaaggacaaactatcgtctatcagcccgttaatgccgacgggactattctccagcaagtgacagttcctgtgtccgggatgattaccattcctgccgcgtcgctcgccggcgctcagattgtgcagacgggggccaatactaacactacttcctctgggcagggcactgttaccgtcacactgccagtggccggaaacgtcgtgaattctgggggcatggtcatgatggtcccaggcgcaggcagcgtgcccgctatccaacgcatccctcttcccggagccgaaatgctggaggaggagcccctttacgtcaacgcaaaacagtaccataggatcctcaagagacgccaagctcgggccaaactcgaagcggaaggcaaaattccaaaggagcgccgcaaatatctgcacgagagtaggcacaggcacgctatggctaggaaacgcggagaaggggggagattcttctcaccaaaggaaaaggatagcccccacatgcaggatcctaatcaagccgatgaggaggctatgactcaaattatcagagtgagctag

SEQ ID NO: 197816 - DNA, 624 bp, synthetic construct
  misc_feature 1..624: note = Description of Artificial Sequence: Synthetic coding sequence
  source 1..624: mol_type = other DNA
atgaccatggacggcgacagcagcaccaccgacgccagccagctgggcattagcgcggactatatcggaggctcgcactatgtcattcagcctcacgatgatactgaagatagcatgaacgaccatgaagataccaacggctcaaaagaatccttccgcgagcaagacatttatcttcctatcgctaatgttgcgaggattatgaaaaatgccataccacagacaggaaaaatagccaaggatgcaaaagagtgcgtccaggagtgcgtctccgagtttatcagtttcatcacctctgaagcttccgagcggtgtcaccaggaaaagcgaaagacaattaacggggaggacatcctcttcgcaatgagcacactgggctttgattcttatgtggagcctctgaaattgtatctgcaaaagttcagagaagccatgaagggggaaaagggcatcgggggcgccgtcacagccacagacgggctgtccgaggaactcactgaagaggctttcaccaatcaattgcctgccgggctgatcactactgatggccagcagcagaacgtcatggtctacactaccagctatcaacagatctcgggcgttcagcagatacagttctcctag

SEQ ID NO: 197817 - DNA, 624 bp, synthetic construct
  misc_feature 1..624: note = Description of Artificial Sequence: Synthetic coding sequence
  source 1..624: mol_type = other DNA
atgaccatggacggcgacagcagcaccaccgacgccagccagctgggaatttcggctgactacataggcggtagccactatgtgattcagcctcacgacgacaccgaggactcaatgaacgaccacgaagacacaaatggatccaaagaatcatttcgagaacaggacatctacttgccgatcgcgaatgtagcccgtattatgaagaatgccataccgcagactggtaagatcgctaaggacgcaaaagagtgtgttcaggaatgtgtatccgaatttataagctttattacgtctgaggcttccgagcgctgtcaccaggaaaaaaggaaaaccattaacggagaggacatcctcttcgcaatgtctactttagggtttgatagctatgtagagcctcttaaactatatttacagaagtttagagaagccatgaagggagagaagggcattggcggtgctgtgaccgctactgacggtctgtcggaggagctcacggaggaggcctttactaaccaattgcctgctggactcatcacaactgacggtcagcagcaaaacgtgatggtgtatacgacttcttaccagcagataagcggagttcagcagatccagttcagctag

SEQ ID NO: 197818 - DNA, 1377 bp, synthetic construct
  misc_feature 1..1377: note = Description of Artificial Sequence: Synthetic coding sequence
  source 1..1377: mol_type = other DNA
atgagcaccgagggcggcttcggcggcaccagcagcagcgacgcccagcagtctcttcagagcttctggcctcgggtgatggaagaaatcagaaacttaactgtaaaggactttagggtccaggaactgcccctggctaggattaaaaaaattatgaagctggacgaggatgtgaaaatgatatccgccgaggcgcccgtgctttttgcaaaagctgcccagatattcattaccgagctgacacttagagcgtggattcacaccgaggacaacaagcgacgaaccctgcagagaaacgacattgctatggctattacaaaattcgatcaatttgactttctcatcgacatcgttccccgagacgagctgaaaccccctaagagacaggaagaggtccgtcagtccgtcacccccgccgagcctgtgcagtattattttacattagcccagcagccgacggcagtgcaagtccagggccaacagcaaggccaacagaccacttcctccaccaccactatccagccagggcagataatcatcgcgcagccacagcagggacaaacaactcctgtgaccatgcaggtgggggagggacagcaggtgcagatcgtccaggcacagcctcaaggccaggcacagcaggcacaatctggcacagggcagactatgcaggttatgcagcaaatcatcacaaacacgggcgagatccagcaaatccccgtccagctcaacgccgggcaactccagtacattagattggctcagcccgtgagcgggacacaggtggtacagggccagatacaaaccctcgcgacgaacgcacagcagggtcaacgcaatgcttcccagggaaaacctcgtcgctgcctcaaggaaacgctgcaaatcacacagactgaagtgcagcagggacaacagcagttcagccaattcaccgatgggcagcgaaatagcgtgcagcaggcccgagtgagtgagctcacaggtgaagccgaacccagggaagtcaaagctacagggaacagtaccccatgtaccagcagtctgccaaccacccatcccccatcacatagggctggggcttcctgtgtgtgttgctcccagccacagcagagttcaacctccccacccccatcagacgccctacagtgggtggtggtagaagtttctgggactccaaatcagctcgagactcacagggagctgcacgcccctctgcctggtatgaccagtctgtctccactccaccccagtcagcaactctaccaaattcagcaggtcacgatgcctgctgggcaggatctggcccagccaatgttcattcagagcgcgaaccagccttcagacggacaggcccctcaggttacaggggactag

SEQ ID NO: 197819 - DNA, 1008 bp, synthetic construct
  misc_feature 1..1008: note = Description of Artificial Sequence: Synthetic coding sequence
  source 1..1008: mol_type = other DNA
atgagcaccgagggcggcttcggcggcaccagcagcagcgacgcccagcaatcactacagtcattttggccccgggtgatggaggagattaggaaccttactgtgaaagacttccgggttcaggaacttccgctggccaggatcaagaaaataatgaaattggatgaggacgtaaagatgatctctgcggaagcccctgtgctgtttgccaaggctgcacagatcttcataacggagctcactctgcgcgcctggatccacaccgaggataataagcggcgaaccctgcaaaggaacgacatagctatggcaataaccaaatttgatcagttcgatttcttgatcgatatcgtgcctcgggacgagcttaagccgccaaagcggcaagaggaagtaaggcaatccgtgacgcctgcagagcctgtgcaatattactttaccctggctcagcagcccacagcagtacaggtacagggccagcagcagggccagcagaccacatccagcaccacgaccattcaaccaggccagataattatcgcccaacctcagcaaggtcagactacccctgtaaccatgcaagtcggagagggccaacaagtgcagatagtccaggcacagccacaggggcaggcgcaacaggcacaatcaggtactgggcagacaatgcaggtcatgcaacagattatcaccaacaccggcgaaatacagcagatccccgtgcagctaaacgccggccagctccagtatatccgactcgctcagcccgtgagtggcacccaggtcgtgcagggtcagatccaaaccctggccactaatgctcagcagatcacccaaactgaggttcaacagggtcagcaacaattctctcagttcacggacgggcaacaactgtatcagattcagcaggtcactatgccagccggccaagacctcgctcagcctatgtttatacagtccgccaaccagccttccgatgggcaagcaccgcaggtgaccggtgattag

SEQ ID NO: 197820 - DNA, 1320 bp, synthetic construct
  misc_feature 1..1320: note = Description of Artificial Sequence: Synthetic coding sequence
  source 1..1320: mol_type = other DNA
atgagcaccgagggcggcttcggcggcaccagcagcagcgacgcccagcagagcctccagagtttctggccccgggtcatggaggaaatcaggaaccttactgtgaaggactttcgggttcaggaactacccctcgccaggatcaagaagataatgaaactggatgaggatgtgaagatgatctcagccgaggcccccgtcctgttcgcaaaagccgcccagatcttcatcaccgagttgaccctgagagcctggatccataccgaagacaataagagacgcacactccagcgcaatgacatcgccatggctattactaaatttgaccaatttgatttcctgatcgacatcgtaccgcgtgacgaactgaagccccctaaacggcaggaggaggtccggcaatcggtcaccccagccgaacccgtgcagtactatttcacgctggctcaacagcccaccgctgtccaggttcaggggcagcaacagggacagcagaccacgtcttccacaacaaccatccaaccaggtcagattatcattgcccaaccccagcagggccaaactacaccggtgacaatgcaggtgggcgagggacagcaagtgcaaatcgtgcaggcccaaccacagggccaagcccagcaggcacagtcaggcaccggccaaacaatgcaagtgatgcagcaaataattaccaatactggggaaattcagcaaattcctgtccaacttaatgccggccagttgcagtacattcgcttggctcaacccgtatccggtacacaggtggtgcagggccagatacagacattggccacaaatgcacaacagatcacccagacggaggtgcaacaaggccagcagcagtttagccagtttaccgacggacagcgcaactctgtccaacaagcacgagtctctgaattgaccggggaagctgaaccacgggaagtcaaagctaccggaaacagcactccttgcacatcctcccttcccactacacaccccccctcccaccgagctggggcttcttgtgtgtgctgcagccaaccccagcagtcctccacctcaccgccacccagcgatgcgttgcagtgggttgtggtggaagtatctggcaccccaaaccagttagagacacacagagagctccacgcacccctaccgggcatgacgagcttgtcgccgctgcacccttctcagcagctttaccagatccagcaggtgacgatgcccgccgggcaggacctggcccaacctatgttcatacagagcgcaaatcagccctccgatgggcaagctccgcaagtgactggagactag

SEQ ID NO: 197821 - DNA, 906 bp, synthetic construct
  misc_feature 1..906: note = Description of Artificial Sequence: Synthetic coding sequence
  source 1..906: mol_type = other DNA
atgagcaccgagggcggcttcggcggcaccagcagcagcgacgcccagcaatcactccagtcattctggcctcgggtgatggaagagattcgaaatttgactgtcaaggatttccgggtgcaggagctgccactcgcccggattaaaaagataatgaagttggatgaggatgtgaaaatgatatctgccgaagctcccgtgctgtttgccaaagccgcccaaatttttatcaccgagctcacattgagggcatggatccacactgaagataataaacggcggaccctccaacgaaacgacattgcgatggctatcacaaaattcgatcagtttgacttcctgattgatatcgtgccacgggacgaattaaaaccgccaaagcggcaggaggaagtgagacagagtgtgacccctgcagagcctgttcagtactacttcactctggcacagcagccgactgccgtacaggttcagggtcagcaacagggccaacagactaccagttcgacaactactatccagcctggccagatcatcattgcccaacctcagcagggacagacaatgcaggtgatgcagcagattattaccaatacgggtgagattcagcaaatcccagtacaactgaacgccggacaactgcagtacatacgccttgcgcaaccagtgtccggcacccaggttgtgcagggtcagattcagaccttggcaacaaacgcacagcagattacccaaactgaagtacaacagggccagcagcaattttcccagtttaccgacggccagcagttgtaccagattcaacaggtgacaatgcccgctgggcaagatttggcccagcccatgttcatacagagcgccaaccagcctagtgatggtcaggcgccccaggtgacaggtgattag

SEQ ID NO: 197822 - DNA, 1008 bp, synthetic construct
  misc_feature 1..1008: note = Description of Artificial Sequence: Synthetic coding sequence
  source 1..1008: mol_type = other DNA
atgagcaccgagggcggcttcggcggcaccagcagcagcgacgcccaacagtctttacagagtttctggccacgcgtgatggaggagataaggaacctaacagttaaagatttcagggtacaggagttgccacttgcgaggatcaagaagattatgaagctcgatgaggatgtcaagatgattagcgcagaggccccggtcctgtttgccaaagcagcccagatcttcatcaccgaactgacccttagagcctggatccatactgaagacaataagcgcagaactcttcaaagaaatgatatcgcaatggcaattactaagttcgaccagttcgattttttgattgacattgttcctcgagacgagctgaaaccacctaaaaggcaggaggaggtgaggcagagcgtcaccccggccgagcccgtccagtactattttaccctggcccagcagcctactgctgttcaggtgcagggccagcagcagggccaacagacgacgtcatccactacaaccatccagccgggtcagatcattattgcccagccacagcagggtcagacgactcctgtgaccatgcaggtcggggagggccagcaggtgcagattgtgcaggctcagccacaaggccaggcacaacaggcacaatccgggaccggtcaaacaatgcaggttatgcaacagatcatcaccaacaccggcgaaatccagcagatccccgttcaactcaacgccggacaacttcaatacatacgtctcgctcagcccgtcagcggcacgcaggtggtgcagggacagatccagaccctcgcaaccaacgcacagcaaattacccagactgaagtgcagcaggggcagcagcaatttagccagttcacggatggccaacaactgtatcagatccagcaggtcaccatgcctgccggacaagatttggctcagcccatgttcatacagagcgctaatcagccctccgacggacaggctccccaagtcacaggagactag

SEQ ID NO: 197823 - DNA, 702 bp, synthetic construct
  misc_feature 1..702: note = Description of Artificial Sequence: Synthetic coding sequence
  source 1..702: mol_type = other DNA
atggccatcaccaagttcgaccagttcgacttcctgatcgacatcgtacctcgagatgagctgaagcctccaaagcgccaggaagaagtgcgacagagcgtgacccctgcagaaccagtgcagtactactttactcttgctcaacaacctacagccgtgcaggttcaaggacaacagcagggacagcagactacaagctctaccaccacaatccaaccagggcagatcataattgctcagccccaacaggggcagactacaccagtcaccatgcaagtgggggaaggccagcaagtccaaattgtccaggcccagccacagggacaggctcagcaggcgcagtccggtactggccagacaatgcaagttatgcagcagatcataaccaacacaggcgaaattcaacagattcctgtgcaactaaatgccgggcagctgcagtatataaggttagcccaaccggtttcgggcacacaagtagtacagggacagatccagaccttggcaactaatgcgcagcagataacccagactgaggtccagcagggacaacagcagttttcgcagttcacagacggacagcagctgtaccagatccagcaggtcactatgagggcccggacctccccatccccatgtagtagcagccagccaacgagcccgcctacgggaccacccggtgaccgccggctgagggcgtag

SEQ ID NO: 197824 - DNA, 606 bp, synthetic construct
  misc_feature 1..606: note = Description of Artificial Sequence: Synthetic coding sequence
  source 1..606: mol_type = other DNA
atggccatcaccaagttcgaccagttcgacttcctgatcgacatcgtcccgagagatgaacttaagcctcctaaacggcaggaggaggtgagacagagcgttacgcctgctgagcccgtgcaatactacttcactctggcgcagcagcccactgctgtacaggttcagggtcagcagcagggtcagcaaacaacctctagcacaacaacaatacagcccggtcaaataatcattgctcagccccagcagggacaaacgaccccagttactatgcaggtgggcgaaggccagcaggttcagatcgtccaggctcaaccccaggggcaggcccagcaggcccagtcagggaccggccagaccatgcaagtgatgcagcagataataactaataccggagaaatacagcagatacctgtgcagctgaacgccggacagctccagtatatcaggctggctcagcccgtgtcaggaacccaggtcgtgcagggtcagatccagacccaggcaatggaaacattcttcgccttcaaacgccagatttatagcctctggcgggtcgggggatttatcgccactctattttccccaagggatcccggaaactag

SEQ ID NO: 197825 - DNA, 942 bp, synthetic construct
  misc_feature 1..942: note = Description of Artificial Sequence: Synthetic coding sequence
  source 1..942: mol_type = other DNA
atgagcaccgagggcggcttcggcggcaccagcagcagcgacgcccaacagtccctgcagtcattctggcctagagtaatggaggaaattcggaacctcactgtgaaggattttcgcgttcaggaactcccacttgctcggataaagaaaatcatgaagttggacgaggatgtgaaaatgatcagtgcagaggccccagtgctctttgccaaagccgctcaaatctttattaccgagctgacccttcgggcctggatacacacagaggacaataagaggcgaacactccaaagaaacgacattgctatggcgatcaccaagttcgaccagttcgactttttgattgacattgtacccagagacgagctgaagccccctaaacgtcaggaggaggtgcgacaatctgtgacgccagccgagccagtacagtactatttcactctggcgcagcagcctaccgccgttcaggtacagggacagcaacagggccagcagactactagttcaaccacgaccatccagccagggcagatcattatcgcccagccacagcaagggcagacgaccccggttacaatgcaggtgggagaaggtcagcaggtgcagatcgttcaggctcagccgcaaggacaggcccagcaggctcagtctggcacgggacagaccatgcaggtgatgcaacagatcatcacaaataccggcgaaatccagcagatccctgagacaggcctagctgtcagtctgcgactgatgaaatgcagcggcctgatctccgcacattgctcctttcggttacccggctctagcgattcacccgcttcagccagccgagtagccggaatcatcggagccgcagagtgccggccggcggctgtttacccactgagtccagcctgtatccgccactcttcatgcgcaggcacagacccggacacctgctag

SEQ ID NO: 197826 - DNA, 543 bp, synthetic construct
  misc_feature 1..543: note = Description of Artificial Sequence: Synthetic coding sequence
  source 1..543: mol_type = other DNA
atgagcaccgagggcggcttcggcggcaccagcagcagcgacgcccagcagagcttacaaagcttctggcccagggtgatggaggagataaggaatctcactgttaaggattttcgagtgcaagagttgcccttagctcggatcaagaaaattatgaagctggacgaggacgtcaaaatgatcagcgcagaggctccagtgttattcgcgaaagccgcccaaatctttatcacggaacttaccctcagggcctggatccatactgaagacaacaaacgccggaccctccaggaggaggttaggcagtctgttactccagcagagcctgtgcaatactatttcactcttgcccaacaaccaacagcagtacaggttcagggacaacagcagggtcagcagaccacctccagcacaacgacaattcagccgggacagataattatcgcacagccgcagcaggggcagacaacacccgttaccatgcaggtcggcgagggtcaacaggtacagattgtccaggcccagccccaggggcaagcatag

SEQ ID NO: 197827 - DNA, 1065 bp, synthetic construct
  misc_feature 1..1065: note = Description of Artificial Sequence: Synthetic coding sequence
  source 1..1065: mol_type = other DNA
atgagcaccgagggcggcttcggcggcaccagcagcagcgacgcccagcagagcctgcagtcgttttggccccgggtgatggaggagatccggaaccttacagtaaaggactttcgggtgcaagaactccccctggccaggatcaagaagattatgaagttagacgaagatgttaagatgatcagtgctgaggcacctgtgctcttcgctaaagctgcacaaatctttattaccgaattgacactgagagcttggatccatactgaagacaacaagcgaaggaccctccaacgaaacgatatcgctatggcgataaccaaatttgaccagttcgactttctgatcgacatagttcctcgagacgaactgaagcctcccaagcgccaggaggaggtccggcagtccgtaactcctgcagagccagtgcaatattacttcactcttgcacagcagcctacagcagtacaggttcagggacagcagcagggtcaacagaccacctcctcaaccaccaccatccagcctggccaaattatcattgcccaaccacagcaggggcagacaacccccgtcaccatgcaggtgggcgaggggcagcaggtgcagatcgtccaggctcaacctcagggacaggcccagcaggcacaaagtgggacgggacagactatgcaggtgatgcagcagatcataactaatactggggaaattcagcagatccccgtccagctgaatgctggacagctccaatacattagattagcacagcccgtttcgggcacccaggtggttcaggggcagatccaaacactggccactaatgctcagcagggacaacgcaatgcctctcagggcaagccccggaggtgtctcaaagagacactccagatcacccaaaccgaggtgcagcagggccagcagcaatttagtcagttcactgatggccagcagctgtaccagattcagcaagtgaccatgcctgccggccaggacctggcccagccgatgttcatccagtccgcaaatcaaccttctgacgggcaagccccccaggtcaccggagactag

SEQ ID NO: 197828 - DNA, 894 bp, synthetic construct
  misc_feature 1..894: note = Description of Artificial Sequence: Synthetic coding sequence
  source 1..894: mol_type = other DNA
atgagcaccgagggcggcttcggcggcaccagcagcagcgacgcccagcagtctctccaatcattctggcctagggttatggaggagatccgcaatctcactgtgaaggacttccgggtgcaggaactgcctctcgcaaggatcaagaaaatcatgaaactggatgaggacgtgaaacgtaatgatatcgcgatggctattaccaagtttgaccaattcgatttcctcattgacatagtgccacgtgacgaactgaaaccgccaaagcgtcaggaggaagtgagacaaagtgttacaccggccgaaccagtccagtactatttcaccctggcacagcagccaacggccgtgcaggtacaaggccagcagcaggggcagcagactactagtagcacgacaactatacagcccggacaaatcatcattgcccagccacagcagggacagacgaccccggttacaatgcaggtaggggaagggcagcaagtgcagatcgtccaagctcagccccagggacaggcacaacaagcccagtccggcacaggtcagaccatgcaagtcatgcagcaaatcatcacgaataccggcgaaattcaacagatccccgttcaattgaacgccggccagctgcagtacatcaggctggctcagcccgtttcgggaacccaggtggtacagggtcagatccagacgctcgctactaacgcccagcagataacacagaccgaggtgcagcagggccaacagcagtttagccagtttacagatgggcagcagctttaccagattcaacaggtaaccatgccagcgggccaggacctagcccaaccgatgttcattcagtcggcgaatcagcctagcgacgggcaggctccccaggtaactggcgattag

SEQ ID NO: 197829 - DNA, 1008 bp, synthetic construct
  misc_feature 1..1008: note = Description of Artificial Sequence: Synthetic coding sequence
  source 1..1008: mol_type = other DNA
atgagcaccgagggcggcttcggcggcaccagcagcagcgacgcccagcagagtcttcagtccttctggcctagagtaatggaagagatccgtaacctcacagtcaaagattttagggttcaagaactgcccctggcaagaatcaagaagatcatgaagctagacgaggatgtcaaaatgatcagtgcagaagctccagtgctgtttgcaaaagccgctcagatctttattaccgaactcacactgcgtgcctggattcatactgaagacaacaagcggcggacacttcagaggaatgacatagcaatggccatcactaagttcgatcagttcgatttcctgatcgacatcgtgcccagggacgaactgaagccccctaaacgccaagaagaggtccggcaaagtgtgacgccagccgaacccgtccagtattactttactttggcccagcagccgaccgccgtccaggtacagggtcagcagcaaggtcaacagaccacatcaagcaccaccaccatccagcccggccagatcatcatcgcccagccccagcaggggcaaaccactcctgtgactatgcaggtaggagaagggcaacaggttcaaatagtacaggcccaaccacagggccaggcccagcaggctcaaagcgggacaggccagacgatgcaggtgatgcagcagatcattaccaatacaggagagatacaacagatccctgtgcagctgaacgctggacagctccagtacatcaggcttgcgcagcctgttagtggaacccaggtcgttcaggggcagattcagactttagctaccaacgctcaacagataacacagactgaggtccagcagggccagcagcaattttcacaattcactgatggccagcagttgtaccagatacagcaggtaacaatgccagcagggcaggaccttgcacagccaatgttcatacagtccgcgaatcagccctctgacggacaggctccccaggtaactggagactag

SEQ ID NO: 197830 - DNA, 1008 bp, synthetic construct
  misc_feature 1..1008: note = Description of Artificial Sequence: Synthetic coding sequence
  source 1..1008: mol_type = other DNA
atgagcaccgagggcggcttcggcggcaccagcagcagcgacgcccagcagtcactgcagtcgttctggcctagagtgatggaggaaattcgaaacctgacagtgaaagactttagagttcaggaattgcccctggccaggatcaagaaaattatgaagctggatgaggacgtaaagatgatctccgccgaggcgcctgttctttttgccaaagctgcgcagatattcataactgaactcacgctgcgggcttggatccatacagaggacaacaaaaggaggacgttacagagaaacgatattgcaatggccatcactaaattcgatcaattcgatttcttaatcgatattgttccccgggatgagttgaagcctcccaagaggcaagaagaggtgcggcagtctgttacacccgctgagcccgtgcagtattatttcaccttggcacaacagcctactgcagtgcaagtgcagggccaacagcagggccagcaaaccacgtcttcaaccacgaccattcaacccggccagatcattatcgcgcagccacagcagggccaaacaacgccagtgactatgcaagttggagagggccagcaagtgcagatcgttcaggcccagccccaggggcaagcccagcaagctcagagtgggacagggcagaccatgcaggtcatgcagcaaattatcaccaacacaggagagatccagcagattccagtccagttaaacgccggccagctccagtacattcgcctagcccagcctgtaagtggtacccaagtcgttcaggggcagattcaaaccctcgctactaacgctcagcagattacccaaacagaagtgcagcaggggcagcaacagttctcacagtttaccgatggccagcaattgtatcagattcagcaggtgaccatgcctgctggtcaggacttggctcagcctatgtttatacagtcagcaaatcagccgagcgacggccaggctccccaggtcaccggggactag

SEQ ID NO: 197831 - DNA, 390 bp, synthetic construct
  misc_feature 1..390: note = Description of Artificial Sequence: Synthetic coding sequence
  source 1..390: mol_type = other DNA
atgagcaccgagggcggcttcggcggcaccagcagcagcgacgcccaacagagcctccaatctttctggcctcgcgtgatggaggaaatacgaaacttgacagtgaaagacttccgcgtgcaggaactcccactggcccgaattaaaaagattatgaagcttgacgaggatgtgaagatgatttcagccgaggctcctgtgctgttcgccaaagcagcacagatttttatcaccgaactaacccttcgagcctggatacataccgaagacaacaagcgaaggaccctccagcgaaacgatatagcgatggctatcactaaatttgatcagtttgactttctgatcgatatcgttcctagggacgaactgaagccacctaagaggcagtag

SEQ ID NO: 197832 - DNA, 1005 bp, synthetic construct
  misc_feature 1..1005: note = Description of Artificial Sequence: Synthetic coding sequence
  source 1..1005: mol_type = other DNA
atgagcaccgagggcggcttcggcggcaccagcagcagcgacgcccaacagtcgctacaatcattctggccaagagttatggaggagatccggaacctcacagtgaaggacttccgagtgcaagaactgccactcgcccgcatcaagaaaattatgaagttagatgaggacgtaaaaatgatcagcgccgaggcacctgtgctgtttgccaaagcggcccagattttcattacagaactcacactccgggcttggatccataccgaggacaataaacgaagaactcttcagagaaacgatatcgctatggctatcacaaaattcgaccagttcgacttcttaatcgacattgtccctcgtgatgagcttaagccccctaagcgtcaggaggaggtgcgtcagtccgtgacacccgcagagcccgttcagtattattttactctggctcaacagcccaccgcagttcaggttcagggccagcagcagggacagcagacgaccagcagcacgaccaccatccaaccaggtcagatcatcatcgctcaaccacagcaaggccagacaactcctgttacaatgcaagtcggcgagggacagcaggtacagatcgtgcaggcacagcctcagggccaagcacagcaggcccagtccggaacaggacagacgatgcaggtgatgcaacagattatcacaaataccggagagatacagcaaattcccgtgcaattgaatgccggccagctccagtatatcagacttgcccaaccagtcagtggcacccaagtggttcaaggccaaattcaaactctggccaccaacgcacagcagatcacccaaacagaggtgcagcagggccagcagcagttctctcagttcacagacggacaactgtatcagatacaacaggtaacaatgcctgcgggccaagacctggcccagcctatgtttattcagtcagcgaaccagccttccgacgggcaggcaccccaagttaccggcgactag

SEQ ID NO: 197833 - DNA, 426 bp, synthetic construct
  misc_feature 1..426: note = Description of Artificial Sequence: Synthetic coding sequence
  source 1..426: mol_type = other DNA
atgagcaccgagggcggcttcggcggcaccagcagcagcgacgcccagcagtcactgcagagcttctggccacgagttatggaagaaattcgcaatctgacagtcaaagactttcgggtgcaagagctgcctctggcccggattaaaaagatcatgaagttggatgaggatgttaaaatgatatcagccgaagcaccggttctgtttgctaaagccgcacaaatattcattacagagctgaccctgagagcctggatacacacagaagataacaagagacggaccctgcagcggaatgacattgccatggccatcactaagttcgaccagttcgattttctaattgacatcgtccccagggatgaactgaaacctccaaagagacaggaggtgagacagtcagtcacccccgcagagcccgtgtag

SEQ ID NO: 197834 - DNA, 288 bp, synthetic construct
  misc_feature 1..288: note = Description of Artificial Sequence: Synthetic coding sequence
  source 1..288: mol_type = other DNA
atgagcaccgagggcggcttcggcggcaccagcagcagcgacgcccaacaaagccttcagtctttctggccgcgcgtgatggaagaaattaggaacctgactgtaatgataagtgccgaagctccagtattgtttgctaaagccgcacagatcttcattacggaactgacgttgagagcgtggattcacacagaagataacaaacgccgcacactccagcggaacgatatagctatggccatcactaagtttgaccagttcgattttctgatagatattgtcccttag

SEQ ID NO: 197835 - DNA, 183 bp, synthetic construct
  misc_feature 1..183: note = Description of Artificial Sequence: Synthetic coding sequence
  source 1..183: mol_type = other DNA
atgagcaccgagggcggcttcggcggcaccagcagcagcgacgcccagcagagtttgcagagtttctggcccagggtcatggaggagatcagaaacctgacagtcaaggattttcgcgtgcaagagttgccactcgcgagaatcaaaaaaatcatgaagcttgacgaagatgttaagatgtag

SEQ ID NO: 197836 - DNA, 159 bp, synthetic construct
  misc_feature 1..159: note = Description of Artificial Sequence: Synthetic coding sequence
  source 1..159: mol_type = other DNA
atgagcaccgagggcggcttcggcggcaccagcagcagcgacgcccaacaatctcttcaatcgttttggccacgggtgatggaagaaatcagaaacctaacagttaaggacttccgggtacaggagttacctcttgcacgcatcaagaagattatgtag

SEQ ID NO: 197837 - DNA, 555 bp, synthetic construct
  misc_feature 1..555: note = Description of Artificial Sequence: Synthetic coding sequence
  source 1..555: mol_type = other DNA
atggcccggagcctggtgcacgacaccgtgttctactgcctgagcgtgtaccaggtcaaaattagccccaccccccagctcggggccgcctcctctgccgagggacacgtggggcagggagccccaggtctgatgggcaatatgaaccctgaggggggtgtgaaccacgagaatgggatgaatcgtgatgggggaatgataccagaaggaggcggagggaaccaggagcctagacagcagccgcagcccccgccagaggaaccagcgcaggccgccatggaggggccccagccagaaaatatgcaaccgcggacacggaggaccaaatttaccctactgcaggtggaggagctcgaaagcgtgtttcgccatactcagtatccagacgtgccaaccaggcgagagctggccgaaaacctgggcgtcacagaggacaaagtgcgagtctggtttaaaaataaacgtgcccggtgtcggagacatcagcgcgaattgatgctagccaacgagctccgagccgacccagatgattgtgtctacattgtggtcgactag

SEQ ID NO: 197838 - DNA, 345 bp, synthetic construct
  misc_feature 1..345: note = Description of Artificial Sequence: Synthetic coding sequence
  source 1..345: mol_type = other DNA
atggacaagcggcggcgggccctgacccggctgtacctggacaaggctactttgatttggaacggtaatgccgtgagtgggctggatgctcttaacaattttttcgacacactgccgagtagtgaattccaggtgaacatgttggactgtcagccagtccacgaacaggctacgcagagccagaccaccgtgcttgttgtcacttccggtaccgtgaaatttgatggaaacaagcagcacttcttcaatcagaattttctgttgactgcgcaaagcacacccaacaacaccgtctggaaaattgccagcgattgttttcgcttccaggactggagtagctcttag

SEQ ID NO: 197839 - DNA, 429 bp, synthetic construct
  misc_feature 1..429: note = Description of Artificial Sequence: Synthetic coding sequence
  source 1..429: mol_type = other DNA
atggccaccagcctggacttcaagacctacgtggaccaggcctgccgagctgcagaagaatttgtgaatatttactatgaaaccatggacaagcggcggagagctctgacccggttatacctggataaagcaacattaatatggaacgggaatgccgtgtccggattggatgcacttaataatttcttcgacactctgccatcgtcggaattccaagtgaatatgctcgactgccaaccagtgcatgagcaagccacccagagccagacgacagtgctggtcgttacatcagggacggtgaaatttgacggcaataaacagcatttttttaaccagaactttctgctgaccgcacagagcacccccaacaatacagtgtggaagattgcttcggattgcttccgctttcaggactggagttcgagctag

SEQ ID NO: 197840 - DNA, 345 bp, synthetic construct
  misc_feature 1..345: note = Description of Artificial Sequence: Synthetic coding sequence
  source 1..345: mol_type = other DNA
atggacaagcggcggcgggccctgacccggctgtacctggacaaggcaaccctcatctggaacggcaacgccgtctcgggcttggatgcactaaataacttcttcgacacccttcctagctcagagttccaagtgaacatgctggactgtcagccggtgcacgaacaggccactcagagccagaccactgtcctggtggtgacaagcggtactgtgaaatttgatggtaataagcaacacttcttcaaccagaacttcctactcacggcccagagcaccccaaacaatacagtgtggaaaattgcgtcggattgtttcagattccaggactggagctcaagctag

SEQ ID NO: 197841 - DNA, 882 bp, synthetic construct
  misc_feature 1..882: note = Description of Artificial Sequence: Synthetic coding sequence
  source 1..882: mol_type = other DNA
atgaccggcctgtacgagctggtgtggcgggtgctgcacgccctgctgtgtctgcacaggacccttacgtcctggctcagagtacggttcgggacctggaactggatctggagaagatgttgtcgagcagcgtcggcggcagtcctggctccgctcggctttactctgcgcaagccccctgccgtggggcggaatagaaggcaccatcgccacccccgaggaggctcctgtctcgccgccgcccaccatcgcatgagatggcgtgctgatggcagatccttggagaaactgccagttcacatgggccttgtaattacggaggtggaacaggaaccgtcttttagtgacattgctagcttggtagtctggtgcatggcagtgggcatatcatatatttcagtgtatgatcatcagggaatattcaaaaggaacaacagcaggctgatggacgagattctgaagcagcagcaagaactcctcggactggactgttctaagtactcccccgagtttgccaactcgaatgacaaagacgatcaggtcctgaattgtcatcttgcagtgaaagtcctctccccggaggatggcaaagctgatatcgtgagggctgcccaagacttctgccaactcgtggcccagaaacaaaaacgcccaactgacctggatgtagacactcttgcaagtttgcttagcagtaatgggtgccctgatcctgacttggtgctcaaattcggccccgttgactctaccctcggtttcctgccatggcacattagattgacggaaatcgtgtccttgccctcgcacctaaacatcagttacgaggacttctttagtgcgctaagacagtacgccgcctgtgagcagcggctaggaaagtag

SEQ ID NO: 197842 - DNA, 2571 bp, synthetic construct
  misc_feature 1..2571: note = Description of Artificial Sequence: Synthetic coding sequence
  source 1..2571: mol_type = other DNA
atgaagccccggcccgccggcttcgtggacaacaagctgaagcagagggttatccagtatttgacctccaacaagtgtggcaagtacgtagatatcggcgtactcgcgtccgacttacagcgcgtctatagtattgactacgggaggaggaaacggaatgcatttaggatacaggtggaaaaggtcttcagtataatcagttcagaaaaagaactgaagaatctgactgagctcgaggatgagcatcttgcaaaacgggcccgccagggcgaggaggataacgagtacaccgaatcttactcagatgatgatagcagcatggaagattatcctgacccccagtctgccaaccacatgaacagttcactcctcagtttataccggaaggggaacccagactccgtatctaatacccctgagatggagcagagggagaccacctcgtccacgcctcgaatctccagtaagacaggcagcatccctcttaaaacgccggcgaaggacagcgagggcgggtggttcatcgataaaactccctcggtcaaaaaggacagcttcttcctggacttgtcttgtgagaagagtaatcccaaaaaaccaatcacggagatccaagactcaaaggactcatcactgctggagagcgatatgaagagaaaaggcaagctaaaaaacaaaggatccaagagaaagaaggaggacctgcaagaagttgacggcgagatcgaagcagtcctgcagaagaaagccaaagctcgcggtctggaattccagatctcaaatgtgaaatttgaggacgttggtgggaatgacatgaccctcaaggaggtatgcaagatgttgatacacatgaggcacccggaagtgtatcaccatctgggcgtggttcccccgagaggtgttttattgcacggtcctccaggatgcgggaaaacgctgctggcacatgctattgcaggagagctagacttacctatcttgaaagtggcggccccagaaatcgtgtctggcgtttcaggggagtcggaacaaaagctgcgggaactcttcgaacaggccgtctctaatgccccctgcatcatatttattgacgaaattgatgccatcaccccgaaaagggaagtagcaagtaaagatatggagcggagaatcgtcgcacagctccttacctgcatggatgaccttaataatgtagcggccaccgcccgggttctggtcatcggcgctacgaataggccggacagtctggatcccgccctgaggagagctggccgctttgatcgagaaatttgtctcggaatccctgatgaagccagccgcgaacgaatacttcagaccctgtgccgtaaactgcgcctgccacaagcgttcgacttctgtcacctggcccacctgacccctggattcgtcggggccgacctgatggccctgtgccgagaggcagcaatgtgcgcagtgaacagagttctgatgaaactgcaggagcagcagaagaagaatcccgagatggaagacctgcccagcaaaggagtgcaggaagagcgtttgggtacagagccaacttcagagacacaggacgagttgcagcgcttattaggtctgctcagagatcaagatcccttatccgaagaacagatgcagggtctttgcattgagctgaacgacttcatcgtggctctctctagcgttcagcccagtgcaaagcgcgaagggttcgtaaccgtacctaatgtaacctgggccgacattggggccctggaggacatacgtgaggagctgaccatggcaatcctggcccccgtcagaaaccccgaccaattcaaagctttggggctcgtgacgccggctggagtgttgcttgccgggcccccaggctgtggtaagactttattggctaaggccgtagccaatgaatctggcttgaacttcataagtgtgaaaggccctgagctgctgaacatgtatgtgggcgagagcgagcgggccgtgagacaagtctttcagcgggctaaaaattcggcaccctgcgtaatctttttcgacgaggtggatgcgctgtgccctcgccgtagtgaccgggagacgggcgctagcgttagagtggtaaaccagttactcactgaaatggacggccttgaggctcggcagcaggtgtttatcatggctgccaccaaccgcccggatattattgatccagcaatacttcgccccggcaggctcgataaaacactcttcgtcggactgccccctcctgccgacagactagctattctcaagactatcaccaagaatggtactaaaccacccttggatgcagatgtcaacctggaggccatagcgggcgaccttcggtgcgactgttacactggagccgacctttctgctctggtccgggaggcctctatctgtgccttacgccaagaaatggctagacagaaatccggaaacgagaagggagagctgaaggtgagccacaagcattttgaagaggcatttaaaaaggtgagatcatctatcagcaagaaagaccaaatcatgtatgaaaggctgcaggagagtctctctcgatag

SEQ ID NO: 197843 - DNA, 2004 bp, synthetic construct
  misc_feature 1..2004: note = Description of Artificial Sequence: Synthetic coding sequence
  source 1..2004: mol_type = other DNA
atgaagcggaagggcaagctgaagaacaagggcagcaagcggaagaaagaagacttgcaggaagtggacggtgagatagaggccgtcttgcaaaaaaaagctaaggcccggggcctagagttccaaatctctaatgtcaagttcgaggacgtagggggaaacgatatgaccctgaaggaggtctgtaagatgttgatccatatgagacacccggaggtttatcaccacctgggtgtagtgccccccagaggggtgctgctacatggcccccccgggtgtgggaagaccctgctggctcacgccatagcaggtgctgaatgcagtggcatgatcacggctcactgcagctttgattttagcgggtcaaatgaccctcctgcctctgcctcacaggaactggatctgccaattctaaaggtcgccgcccccgagattgtgtccggagtatcaggcgagtctgaacaaaaactccgggagttgttcgagcaggccgtgagcaacgcgccctgcatcatatttattgacgaaatagatgcaattacccctaaacgagaagtggcctccaaggatatggagaggaggatcgtggcacaactgttgacatgcatggatgacctgaataatgtagccgccaccgcacgcgtgttggtaattggtgctacgaataggcccgactctctcgatcctgcacttcggcgcgctggccgcttcgaccgggagatctgtcttgggatccccgatgaagccagtcgggagcgcatcttgcaaaccctttgtcgtaagctaagactgccccaggccttcgacttctgccatttagcgcatctgacccccggcttcgtgggagccgacctgatggctctatgtcgggaagcagccatgtgcgcagtaaatagggtccttatgaaactgcaggaacagcaaaagaagaatcccgagatggaagacctaccatccaaaggcgttcaggaggaacgactcggcaccgagccaacatccgaaacccaggacgagctgcagagactgctgggcttactgcgcgaccaggatccactctctgaagagcagatgcagggactgtgtattgaactgaacgactttatcgtggccctaagctccgtccagcccagcgcaaaacgcgagggttttgtcacagtacctaacgtgacctgggccgatattggcgccctggaagatatcagggaggaacttactatggccatcctggcccctgtgaggaatcccgaccagttcaaggcccttggattggtgacccccgccggcgtcctgctggcaggcccacctgggtgcgggaagaccctcctcgcaaaggcagtagcaaatgagtctgggctgaactttatcagcgttaaaggcccagagctgttgaacatgtatgtcggtgagagtgagagggcggtcaggcaggtgtttcagagagcaaagaactctgctccctgtgtgatattcttcgacgaagtggacgccctttgtcctcgaagatcggaccgggaaaccggcgcgtctgtacgcgtggttaatcagctgctcaccgaaatggacgggttagaggcacgacaacaagtgtttatcatggccgccacgaatcgcccggatataatcgatcccgccatcctccgaccgggtcgccttgataaaaccctgtttgtcggcctccctccccccgcagatagactggcaatcttaaagacgatcaccaaaaatgggacaaagccaccgttagatgccgacgtgaatctcgaagctatcgctggcgacctgaggtgtgactgttatactggcgccgacctcagcgccctcgtgcgagaggcttccatttgtgccctgaggcaggaaatggcccgccagaagtccgggaacgaaaaaggagaactcaaggttagccacaagcacttcgaagaggctttcaaaaaggtaaggagcagcattagcaagaaggaccaaattatgtacgaacggctacaggagtctctgtcccggtag

SEQ ID NO: 197844 - DNA, 1770 bp, synthetic construct
  misc_feature 1..1770: note = Description of Artificial Sequence: Synthetic coding sequence
  source 1..1770: mol_type = other DNA
atggaggactaccccgacccccagagcgccaaccacatgaacagctccctcttgtcactgtacaggaagggcaatcccgacagtgtctctaacacacccgagatggagcagcgagagacaacatcctccacaccccgcatcagttccaagacaggatccatccccctgaagacaccagccaaagactcagagggaggctggttcattgacaaaacgccctccgtcaagaaggattcctttttcttggacctctcatgcgagaaaagtaatccaaaaaaacccatcacagagatccaagatagtaaggattctagcctgctggagtccgacatgaagaggaagggcaagttgaaaaacaaaggcagcaagcgaaagaaagaagatctccaagaggttgatggggaaatcgaagccgttctgcaaaagaaagcaaaagccagaggactggagtttcagatatccaacgttaaattcgaagatgtgggggggaatgacatgacgctgaaggaggtctgcaaaatgctgatccatatgcgtcatccagaggtttatcatcatctcggggtggtaccaccccggggcgtgttgcttcatgggccacccgggtgtgggaaaacccttttagcccacgccatcgctggagagctggacttgcctattcttaaagtggccgctcctgagattgttagtggcgtatctggagagtcagaacaaaagttgcgagaactctttgaacaggctgtttcaaatgccccctgcattatcttcatcgatgagatcgatgccattactccaaaacgcgaagtcgcctctaaagatatggaacggaggatcgtcgcccagctgctcacatgcatggatgatctcaataacgtggccgctactgctagggtcctggttattggggctaccaatcgacccgatagtctggacccggctctgcggcgcgcaggacggtttgatagagagatctgcctaggaatcccagatgaggctagccgcgaaagaatcttgcaaactttgtgccggaaactgaggctgcctcaggcgtttgacttttgccacctggctcacctgaccccgggctttgttggcgcggatttgatggctttatgtcgagaagctgcaatgtgcgctgtcaacagggtgctgatgaaactacaggagcagcagaagaagaatccggaaatggaagacttgcctagcaaaggcgtccaggaggagcggttaggaaccgaacctacttccgagacccaggacgagttacagagactgctggggctcttacgtgaccaggaccccctcagcgaagagcagatgcagggtctttgtatagagttaaacgactttattgtcgcactgagtagtgttcagccatctgccaaacgcgaggggttcgtaacggtccccaatgtgacctgggccgatattggggctctggaggatatccgcgaagaactcaccatggctattttggcaccagtgcgtaaccctgaccaattcaaggcactgggcctggttacccctgctggagtacttctcgctggccccccaggctgtgggaaaaccttgctggcaaaggcggtcgcaaacgaatctgggcttaactttatcagcgtcaaagggcccgagcttcttaacatgtacgtgggagagtcagaacgtgctgttaggcaggtcttccagcgggctaaaaacagtgctccatgtgttattttctttgatgaggtagacgcactctgccctcgtcggagcgatcgtgaaatatag

SEQ ID NO: 197845 - DNA, 2253 bp, synthetic construct
  misc_feature 1..2253: note = Description of Artificial Sequence: Synthetic coding sequence
  source 1..2253: mol_type = other DNA
atggaggactaccccgacccccagagcgccaaccacatgaacagctcactgctgtctctttatcgaaaaggcaaccccgattctgtgtcaaatacccctgagatggagcagcgagagactacctcttccacacccaggatttcctccaagactgggagtatcccattgaaaaccccagcaaaagactctgagggaggctggttcattgataaaactcctagcgtcaaaaaagacagcttctttctggacttgagctgcgagaagagtaatcccaagaaacccataacggagatccaagattccaaggattctagccttttggaaagtgacatgaaacggaaaggaaaactgaaaaacaaggggtctaagcgaaagaaagaagacttgcaggaggtggacggtgaaattgaggccgtccttcagaagaaagccaaagctcgtggacttgagttccagatctctaacgtgaagttcgaagatgttggagggaatgatatgaccctaaaggaagtgtgcaagatgctgatacatatgcggcatcctgaagtctaccaccatctcggagtcgtgccaccacgcggagttttattgcacggaccgccaggctgcgggaaaactttactggcccatgctatcgccggtgaacttgacttacccattcttaaggtcgctgcgcccgagatcgtgagtggagtctccggggaaagtgagcaaaagctgagggagctgttcgagcaggcggtctccaatgccccatgcatcatctttattgatgagatcgatgctatcacccctaagagagaagttgcctctaaggacatggagagacgaattgtcgcacagttactaacgtgcatggacgatctgaataacgtcgctgccactgctcgagtgctggttattggagccaccaatagacccgattctctggatccagctctgcgaagggccggcagattcgatagggaaatctgcctcggcatccccgacgaggctagccgggaaagaatactgcagaccctgtgtcggaagctcaggctgccccaggcatttgacttctgtcatctagcccatctgacgcccggctttgtcggagcagacttaatggcactctgtcgggaagctgcaatgtgtgccgtgaacagggttctgatgaagctccaggagcagcagaaaaagaatcccgagatggaagatctgccgagtaagggggtgcaagaagaacggctgggtacggaaccaacatcggaaactcaagacgagctccagcgacttttgggcttgctgagggaccaggatcccctctcagaagagcagatgcagggactctgtatcgagttgaacgacttcattgtcgctctgtcctcagttcagccttctgctaagcgggaaggcttcgtgactgtgcccaatgtcacttgggctgacattggagccctcgaagacatcagggaggaacttaccatggccattctggcgcctgttcgtaacccggatcagtttaaggccctcggcctcgtcacccccgctggtgtgttgctggcgggaccgcccggatgcggcaaaacactgcttgcaaaggccgtcgcaaacgagagcggcctgaactttattagtgtgaagggtcctgagctgctgaacatgtatgtgggcgagagcgaacgtgctgtcaggcaggtctttcagagggctaaaaactccgccccgtgcgtgatcttcttcgatgaggtcgacgcactctgccctcgccggtctgacagagagactggggcttctgtccgggtcgtcaatcagttgctgaccgaaatggacggcctggaagctcgacagcaagtttttattatggcggccactaacagacccgacatcatcgaccccgccattctgcgcccaggccggttggacaagactctctttgtggggctgccccctccagctgacagattagccatcctgaagacgatcacgaaaaacggcaccaagcctcccttagatgccgatgtcaacctcgaggctatagcgggagatctcagatgcgattgctacaccggcgctgacctttctgcattagtgagggaggcctcgatctgcgccctgcgccaggaaatggcccggcagaaatccggtaatgaaaagggcgagctgaaggtatctcataagcactttgaggaggcttttaagaaggtgcgtagctccatatcaaagaaagaccagattatgtacgaaaggttacaagaatctctttctcgatag

SEQ ID NO: 197846 - DNA, 2298 bp, synthetic construct
  misc_feature 1..2298: note = Description of Artificial Sequence: Synthetic coding sequence
  source 1..2298: mol_type = other DNA
atgaagccccggcccgccggcttcgtggacaacaagctgaagcagcgggtgattcagtacctcacgagtaataaatgcggcaaatatgtcgatatcggcgtgctggcctccgatttacagagggtgtactctatcgattatggtcggagaaagaggaacgctttccgcatccaggtggagaaagtgttcagcattataagcagtgagaaggagctaaagaaccttactgagcttgaggacgagcatctggcaaagcgagcccggcagggcgaggaagataatgagtacacagaatcatacagcgatgacgacagctcaatggaagactatcccgatcctcaagacagcaaagactcaagcctcttagagtctgatatgaaaagaaaggggaagctgaagaataagggatccaaacggaaaaaagaagacttgcaagaagtggatggagagatagaagccgttctccaaaaaaaggcgaaagcaagaggcttggaattccagatctctaatgtgaaattcgaggacgttggaggcaacgacatgaccctcaaagaagtgtgtaaaatgctaatccacatgcgccacccggaagtgtatcaccatctgggagtcgtgccacctcggggagtactgctgcatggtccacccggctgcgggaaaactctgttggctcatgcgatagccggtgagctggatctgcccattctgaaggtggcagctccggaaatcgtgagcggcgtatctggcgaatcggaacagaagctccgggagttgtttgaacaggctgtgagcaacgcaccatgcattattttcatcgacgaaatagacgctataacccctaaacgagaagtcgcatccaaagacatggagaggagaatcgttgcccagctgctcacctgcatggatgacctgaataatgtggcagcaaccgcccgtgtcctggttattggggcaaccaatcggcccgacagcctggatcccgccctgagacgcgctggcagattcgatagggaaatttgtctgggtatacccgacgaggctagcagggaaaggattcttcaaactctatgcagaaagttacggctgccgcaagcttttgacttttgtcacttggctcacctgactcctggcttcgtgggcgcagacctgatggccctgtgcagagaggctgcgatgtgtgcggtgaaccgagtcttgatgaagttacaagaacagcaaaaaaaaaatcccgagatggaggatctgccctcaaagggcgttcaggaggagcgccttgggaccgagccaacttctgagacacaagacgagctgcaacgactccttggactgctaagggaccaggatccgctctcagaggaacaaatgcagggtctttgtattgagctgaacgactttatcgtagctctttcatcagtgcagccttccgcaaagcgagagggtttcgtcactgtgcctaatgtgacctgggccgacattggcgccctagaggatatccgcgaggagctgactatggctatcttggcccccgtgaggaaccctgaccagttcaaggccctggggctggttaccccagctggcgtcctgctggccggcccaccgggatgtggcaagacccttcttgctaaagcggtggccaatgagtctggccttaatttcatcagcgtaaaaggtcccgagctgttgaatatgtacgtcggcgagtcagagagggctgttcggcaggtgtttcagcgcgccaagaacagcgctccttgtgtgatcttcttcgacgaggttgacgccctttgtccacgacgctcagaccgcgaaaccggagcaagcgtccgggtagtaaatcagctgctgactgagatggacggacttgaagccagacaacaggtattcatcatggcagcaacaaaccgcccagatatcatcgaccctgcgatcctgcgtccaggtcgattggacaagaccctgtttgtggggcttcctccccccgcagacagattggccattctgaaaaccatcacaaaaaacggaactaagccccctctggacgcagatgtcaacctggaagctattgccggagacttgcgttgcgactgttacaccggcgcagacctgtccgctttggtgcgagaggcttccatctgcgcactgcgacaggaaatggcgaggcagaaatcagggaatgagaagggtgaattgaaggtatcacacaagcattttgaggaagctttcaaaaaagtacggagctctatcagcaagaaggatcaaattatgtacgaacgtctacaggagtcgctcagccggtag

SEQ ID NO: 197847 - DNA, 1386 bp, synthetic construct
  misc_feature 1..1386: note = Description of Artificial Sequence: Synthetic coding sequence
  source 1..1386: mol_type = other DNA
atgccccccagcggcccccggggcaccctgctgctgctgcccctgctgctcctcctcctgctgcgggccgtcctcgccgtaccactggagcggggtgcaccaaataaggaagagactccagcaactgagtcccctgacacaggtttatattatcacagatacttgcaagaggttattgatgtcttagaaactgacggccatttccgagagaagttgcaggctgcgaacgccgaggatataaaaagtggcaaactgtcaagggagctcgattttgtttctcatcatgttagaacaaagctggatgaactcaagagacaggaagtgtccagactccgtatgttgctcaaggcgaaaatggatgcagagcaagatcccaacgttcaagtggaccatctgaatcttcttaagcagttcgagcatctggaccctcaaaaccagcacacctttgaagctagagatttggagctcctaatccagactgcgacacgtgatttggcccagtacgacgccgcccatcatgaggaatttaagcgttacgaaatgctcaaggagcatgaaaggaggcgctacctcgagagcctaggcgaggagcagcggaaagaagcggaaagaaagttagaggagcagcagcggagacatcgtgagcatcccaaagtcaatgtgcctggcagccaggctcagctgaaggaggtttgggaagaactggatggacttgatcccaataggtttaaccccaagacattttttattctgcacgatattaattccgacggtgttctggatgaacaggagctagaggccctattcacaaaagagctggaaaaggtgtacgaccccaaaaatgaagaagacgatatgcgcgaaatggaggaggaacggctgaggatgagagagcatgtgatgaaaaatgtagacacaaatcaggataggctggtgaccctggaggaattcctagcctctacccagcggaaggagttcggggatacaggagaaggatgggaaacggtggagatgcatccagcgtacacagaggaagagctgcgcaggttcgaagaggagctcgccgctcgcgaggcggagctaaacgctaaagcccagcgactgtcacaagagaccgaagcacttggccgatcacaaggtagactggaggcccaaaagcgggaactccaacaggcagttctccacatggagcagcgtaaacaacaacagcagcaacaacaaggacacaaagcacccgccgctcatcctgagggacagcttaagtttcatccggacacggacgatgtccctgtgcccgcgcctgccggggatcagaaggaagtcgatacgagcgagaaaaagcttctggagcgtcttccggaggtcgaggttcctcagcatctctag

SEQ ID NO: 197848 - DNA, 1386 bp, synthetic construct
  misc_feature 1..1386: note = Description of Artificial Sequence: Synthetic coding sequence
  source 1..1386: mol_type = other DNA
atgccccccagcggcccccggggcaccctgctgctgctgcccctgctgctgttgctgctgctgagggcagtgttagccgttcccctagagaggggggcccctaacaaggaagaaaccccagctacggagtcacccgatacgggtttgtactaccatagatacctacaggaggtcattgatgtgctggagactgatggccactttagagagaagctacaggccgcaaacgcagaggatatcaagtctggaaaattgtccagagagctggatttcgtgtcccaccatgtgagaacgaagctcgacgaattaaaacggcaagaagtaagtaggctgagaatgctgcttaaggcaaagatggatgctgagcaggacccaaacgttcaagtggaccatctgaacttacttaaacagttcgagcacttagatcctcaaaatcagcacaccttcgaagctagagacctggaattgcttatacagacagcaactcgcgatctggcccaatacgatgctgcccatcatgaggagtttaagaggtacgaaatgctgaaagaacacgagagaagacgttaccttgagtccctgggtgaagagcagcgaaaagaggccgagcgcaagttggaagagcaacagaggcgtcatcgtgaacatccgaaggtgaacgtgcccggatcacaggcacagctcaaggaggtctgggaggagctcgatggcctggaccctaatcggtttaacccaaagacattctttatcttgcacgatattaactccgacggggtgctggatgaacaggaactcgaggccttatttaccaaggaactcgagaaagtgtacgaccctaaaaacgaggaagacgatatgagggaaatggaggaagaaagactgagaatgcgcgaacatgtaatgaaaaacgtggataccaaccaggatcggctggtaaccctggaagagttccttgcaagtactcagagaaaggaatttggcgatactggcgagggctgggaaacggtggaaatgcatcctgcatataccgaagaggagcttcggagatttgaggaggaattagctgctagagaagcagaacttaatgccaaagcccagagactctcacaggaaaccgaggcccttggtaggagccaaggccgtttggaagcgcaaaaaagggaactgcaacaagctgttctgcatatggagcagagaaagcaacagcagcagcaacaacaggggcataaagcccctgcagcccatcccgaaggtcagcttaaattccatcccgacaccgatgatgttcccgtgccggctccagctggggatcagaaggaggtggacacctccgaaaaaaaactgctggagcgcctgcccgaggtagaagttccgcaacatctgtag

SEQ ID NO: 197849 - DNA, 1386 bp, synthetic construct
  misc_feature 1..1386: note = Description of Artificial Sequence: Synthetic coding sequence
  source 1..1386: mol_type = other DNA
atgccccccagcggcccccggggcaccctgctgctgctgcccctgttgctcctgctgcttctgcgcgctgtactggccgtccccctggagcgtggcgccccaaacaaggaggagacaccagccactgagagtcccgacactggtttgtactatcatagatacctgcaagaagtgatcgatgttctggagacggacggccattttagagaaaaactccaggccgctaatgccgaagatatcaaaagcggcaagctgtccagagaactggatttcgtctcacatcacgtgaggacgaagctggacgagctgaaacgacaggaagtttctcggctgcgcatgcttttgaaagcaaaaatggatgccgagcaagatcctaacgttcaggtggatcacctgaatctgttaaagcagttcgagcacctagatccccagaaccagcataccttcgaagcacgggacctcgagttgctgattcagaccgcaacgagggatttagcccagtacgacgcggcccatcatgaagagttcaaacgctatgagatgttgaaggaacacgaacgcaggagatacctcgagagcctaggtgaggagcaaagaaaggaggccgagaggaaactggaggagcaacagcgtcgacaccgagaacaccccaaggtcaatgtcccgggctcccaggcccaactcaaagaagtatgggaggagcttgacggcttagaccccaaccggtttaaccccaaaaccttctttattctgcacgacattaattccgacggagttctggatgagcaggaactggaagctctgttcaccaaggagttggagaaagtctacgaccccaagaatgaagaagacgatatgagggaaatggaggaagaaagactgcggatgcgcgaacacgtcatgaagaatgtagatactaaccaagatagactggtcactctggaggaattcctggctagtacgcaaaggaaggaatttggggacaccggcgagggatgggaaaccgtcgagatgcaccctgcttacacagaagaagaactgaggaggttcgaagaggaattggccgcccgcgaggctgaattgaacgcaaaagcccagcggctctcacaggaaaccgaggctctcgggcggagtcaggggaggctagaggcgcagaagagagagctgcagcaggcagttctgcacatggaacagaggaaacaacagcagcagcagcaacaaggccataaggctcccgcagcccacccagagggccagctcaagtttcaccctgacacggacgatgtgccagttcccgctcccgctggggatcagaaagaggtagatacgtctgaaaagaagcttctggaaagactgcccgaagtggaggtgcctcaacacctgtag

SEQ ID NO: 197850 - DNA, 375 bp, synthetic construct
  misc_feature 1..375: note = Description of Artificial Sequence: Synthetic coding sequence
  source 1..375: mol_type = other DNA
atgccccccagcggcccccggggcaccctgctgctgctgcccctgctacttctgctgctgctaagagcagtgctcgcggtacctctggaaaggggagcccctaacaaggaagaaacacctgctaccgagagtcccgataccggactgtactaccatcggtatttgcaagaagtgatcgacgtgctggaaactgacggccactttagagagaaactgcaagctgcgaatgccgaggacatcaagagcggtaaactgagtagggagctggacttcgtgagtcaccatgtccggacgaaacttgatgagctgaagcgtcaggaggtttcccgcctgcggatgctgcttaaggctaaaatggacgctgagcaagattag

SEQ ID NO: 197851 - DNA, 336 bp, synthetic construct
  misc_feature 1..336: note = Description of Artificial Sequence: Synthetic coding sequence
  source 1..336: mol_type = other DNA
atgccccccagcggcccccggggcaccctgctgctgctgcccctgctcctcctgctgctgcttcgtgccgtgctggctgttccgctggaaaggggcgcaccaaacaaagaggaaactcccgctacagagtccccggataccgggctatactaccaccgctatctgcaagaagtcatagatgtgctggagactgatggacatttccgagagaagctccaagccgccaatgccgaagacatcaagtcaggcaaactgagcagagaattggattttgtgtcccaccacgttcgcaccaagctggatgagctgaagcgacaggaagtgagccgtctgtag

SEQ ID NO: 197852 - DNA, 1263 bp, synthetic construct
  misc_feature 1..1263: note = Description of Artificial Sequence: Synthetic coding sequence
  source 1..1263: mol_type = other DNA
atgcggtggcggaccatcctgctgcagtactgcttcctgctgatcacctgcttactcaccgctctggaggccgttcctatagacatagacaaaacaaaagttcagaacatccaccccgtagagtctgcgaaaatcgagccccccgatacaggtttgtattatgacgaatacctgaagcaggtcatcgacgtcctagagacagacaagcatttccgagagaagctgcaaaaggccgacatcgaggaaatcaaatcggggcgtctgagtaaagaactcgatctcgtgtctcatcatgtcagaaccaagttagatgaactcaaaaggcaggaagtgggtcgtctgaggatgttgatcaaagcaaaacttgacagtctacaagacatcggaatggaccaccaagccctgctgaaacaatttgatcatctcaaccatcttaaccctgataagttcgagtctaccgacctcgatatgctgattaaggctgcaacctccgacttggaacactacgataagacccgccatgaggagttcaaaaaatacgagatgatgaaggaacatgagagaagggaatatctcaaaaccctcaacgaagagaaaaggaaagaggaagaatctaaattcgaggagatgaagaagaaacatgaaaatcaccccaaagtgaatcacccgggctcaaaggatcaactgaaggaagtgtgggaggaaacagatggacttgatccaaatgactttgatcctaaaacctttttcaaacttcacgacgtgaacagcgatggctttctggatgaacaggaactcgaggccctgttcactaaggaactagagaaagtgtatgaccctaagaacgaggaagacgacatggtagagatggaagaggagagattgcggatgagagagcatgtgatgtcagaagtggatacaaataaggacagattagtgacgctggaagagttcctgaaggcaaccgaaaaaaaggagttcttagagccagattcctgggagaccctcgaccagcaacagttttttaccgaggaagaactaaaggagtacgagaacatcattgccctgcaagagaatgagttgaaaaaaaaagccgatgagctgcaaaaacagaaagaagagctccagagacaacatgaccagcttgaagctcagaagctggagtaccatcaggtgattcaacagatggaacagaaaaagttgcagcagggcatcccaccatctggacccgccggcgaactgaagtttgaaccaagagtgtag

SEQ ID NO: 197853 - DNA, 1173 bp, synthetic construct
  misc_feature 1..1173: note = Description of Artificial Sequence: Synthetic coding sequence
  source 1..1173: mol_type = other DNA
atgcggtggcggaccatcctgctgcagtactgcttcctgctgatcacctgcctgctgactgccttggaggctgtaccaatcgacatcgataagacaaaggtgcagaatatccatccagtggaatctgccaaaatcgagccacctgacaccggcctctactacgatgagtacctgaagcaggtgatagacgtcttggagaccgataagcatttcagagaaaagttacagaaagcagacatagaagagattaaaagcggtcgcctgagtaaggagctggatctggtgagccatcacgtgcggacgaaactggatgagctaaagagacaggaggttgggagacttcgcatgttgatcaaagcaaagctggattcattacaagacatcgggatggaccaccaggccttattaaagcagtttgaccatctgaaccacctgaatcccgacaaattcgagtcaaccgatctagacatgcttataaaagcggcgactagtgacctcgagcattacgacaagactcggcacgaggagtttaagaaatatgagatgatgaaagagcatgagaggagggagtacctcaagactctaaatgaagagaagagaaaagaagaggagtccaagttcgaggagatgaagaagaaacatgagaaccaccctaaagtgaatcatccagggagcaaagaccagctgaaggaggtttgggaagagaccgacggccttgaccctaatgatttcgatccgaaaacattcttcaagctccacgacgtgaatagcgatggatttctggatgagcaggagctggaggctctgtttactaaagagctcgagaaggtgtatgatcctaagaacgaggaggatgacatggtggagatggaggaggagcgtttgagaatgagagaacacgtgatgagcgagacccttgaccagcagcagttctttacggaggaggaactcaaggagtacgaaaacatcatcgctctccaggagaacgaactgaaaaagaaagctgatgagctgcagaagcagaaagaggaactccagaggcagcacgaccaacttgaggcgcagaagcttgagtaccatcaggttatccaacaaatggagcagaaaaagctgcagcagggaattccgccttcgggccccgccggcgagctaaagttcgagccccatatttag

SEQ ID NO: 197854 - DNA, 210 bp, synthetic construct
  misc_feature 1..210: note = Description of Artificial Sequence: Synthetic coding sequence
  source 1..210: mol_type = other DNA
atgcggtggcggaccatcctgctgcagtactgcttcctgctgatcacctgccttcttacagccttggaagctgtgcctattgatatcgataaaaccaaggttcagaacattcaccccgttgagagtgctaagatagagccaccagatacagggctgtactacgacgagtacctgaagcaggtgatcgatgtgctagagaccgacaaatag

SEQ ID NO: 197855 - DNA, 105 bp, synthetic construct
  misc_feature 1..105: note = Description of Artificial Sequence: Synthetic coding sequence
  source 1..105: mol_type = other DNA
atgcggtggcggaccatcctgctgcagtactgcttcctgctgatcacctgtttacttacagctttggaagctgtgcccatagacatagataagaccaaagtgtag

SEQ ID NO: 197856 - DNA, 1263 bp, synthetic construct
  misc_feature 1..1263: note = Description of Artificial Sequence: Synthetic coding sequence
  source 1..1263: mol_type = other DNA
atgcggtggcggaccatcctgctgcagtactgcttcctgctgatcacctgcctcctaactgctctagaagcagtgccaatcgacatcgataagaccaaagtgcagaatatacatccggtcgagtctgccaaaattgaacctcccgacacaggattgtactacgatgagtacttgaagcaggtgatcgacgtgttggagactgacaagcattttagagaaaaactccaaaaagcagatatcgaagagatcaagagtgggaggctgtcgaaggagctggacctcgttagccaccatgtgcgcacaaaactggatgaacttaagagacaagaggttggccgcttgcgaatgctaataaaagcaaaactagactcgctccaggatattgggatggatcaccaggccctgttgaaacagtttgaccatctgaaccatcttaatcccgacaaatttgagtccacagaccttgatatgcttatcaaagcagcaacgagcgacctggagcattacgataagactagacacgaggagttcaaaaaatatgaaatgatgaaggagcatgaaaggagagagtatcttaaaactctgaacgaggaaaaaagaaaggaagaagagtccaagttcgaggaaatgaagaagaaacacgaaaaccacccaaaagtgaaccacccaggaagcaaagatcagctgaaggaggtttgggaagagacagacgggctggaccctaacgacttcgatccaaagacattctttaaattacatgatgtcaactctgacggattcctggacgagcaagagctcgaggcattattcacaaaggaactggagaaagtctacgaccccaagaacgaagaagatgacatggtagaaatggaagaggaaagattacggatgagggagcatgtgatgtcagaggtggatacaaataaggaccgccttgtcacgttggaggaattcctcaaggccaccgaaaaaaaagagtttctggaacccgactcttgggagaccctcgatcagcagcaattttttaccgaagaagagttaaaggagtatgaaaacatcatagcgctgcaggaaaatgagctgaaaaagaaagctgatgagctgcaaaagcagaaggaggaactccaaagacagcacgatcagttagaggcgcaaaaactggaatatcatcaagtaattcagcagatggaacaaaagaagttgcagcaaggaatcccgccaagcggccccgcaggggagctgaagttcgaaccgcatatttag

SEQ ID NO: 197857 - DNA, 588 bp, synthetic construct
  misc_feature 1..588: note = Description of Artificial Sequence: Synthetic coding sequence
  source 1..588: mol_type = other DNA
atgcggtggcggaccatcctgctgcagtactgcttcctgctgatcacctgcctgctgaccgccttagaagctgtgcccatagatatcgacaagactaaagtgcagaacattcaccccgtggagtctgctaaaatcgagcccccagatactggactctactacgacgagtacctgaaacaagtgatcgatgtgctggagacggataagcatttccgcgaaaaactgcagaaggctgacattgaggagattaaatccgggcggctctccaaggaactcgatctcgttagtcaccatgtccgcacaaagttggatgaactgaaaaggcaggaggtggggcgacttaggatgttaattaaagccaagctcgactcattgcaggacatcgggatggatcaccaggccctactgaagcaattcgatcacctgaatcatttgaaccccgacaaatttgagtctaccgatttggacatgctcattaaggccgcaactagcgacctggaacattatgacaaaacccgtcatgaggagtttaaaaagtacgaaatgatgaaagagcacgagcggcgcgagtatctgaaaacattgtag

SEQ ID NO: 197858 - DNA, 597 bp, synthetic construct
  misc_feature 1..597: note = Description of Artificial Sequence: Synthetic coding sequence
  source 1..597: mol_type = other DNA
atgcggtggcggaccatcctgctgcagtactgcttcctgctgatcacatgtttactgactgctttggaagccgtacccattgacattgacaagacaaaggtacagaatatccatcctgtggaaagcgcgaagatcgaacctcctgatacagggctgtactacgatgaatatttaaagcaggtgatagacgttctggagaccgataagcatttccgggaaaaactgcaaaaagcggatatcgaggagataaaatctggccgcctgagcaaagagcttgaccttgtttcgcaccatgtcaggaccaagttggatgagctaaaaaggcaggaagtcggacggctcagaatgctgattaaggcgaagctcgatagcttgcaagacatcggcatggaccaccaggctcttttaaagcaatttgaccacctgaatcacctgaaccctgacaagttcgaaagtacagacctggacatgctcattaaggccgcgacaagtgacctggaacattacgacaaaaccaggcatgaagagttcaaaaagtatgagatgatgaaggaacacgagcgtcgcgagtacctcaagactctcaatgaagagtag

SEQ ID NO: 197859 - DNA, 105 bp, synthetic construct
  misc_feature 1..105: note = Description of Artificial Sequence: Synthetic coding sequence
  source 1..105: mol_type = other DNA
atgcggtggcggaccatcctgctgcagtactgcttcctgctgatcacatgtctattgactgcccttgaggccgtccctattgacatcgataagaccaaggtgtag

SEQ ID NO: 197860 - DNA, 120 bp, synthetic construct
  misc_feature 1..120: note = Description of Artificial Sequence: Synthetic coding sequence
  source 1..120: mol_type = other DNA
atgcggtggcggaccatcctgctgcagtactgcttcctgctgatcacttgtctcctgactgccctcgaagccgtgcctattgatattgacaagacaaaagtgcagaatatccacccctag

SEQ ID NO: 197861 - DNA, 210 bp, synthetic construct
  misc_feature 1..210: note = Description of Artificial Sequence: Synthetic coding sequence
  source 1..210: mol_type = other DNA
atgcggtggcggaccatcctgctgcagtactgcttcctgctgatcacatgtctgctcacagctctcgaagctgtccccattgatatcgacaaaacgaaggtccagaatatccacccagtggagtccgccaaaattgagccgcccgatactggcctgtattacgacgaatatctcaagcaggtgatcgatgtgctggagacagacaaatag

SEQ ID NO: 197862 - DNA, 273 bp, synthetic construct
  misc_feature 1..273: note = Description of Artificial Sequence: Synthetic coding sequence
  source 1..273: mol_type = other DNA
atgcggtggcggaccatcctgctgcagtactgcttcctgctgatcacctgcctgctcaccgcactggaggccgtgcctattgatattgacaaaaccaaggtgcagaacatccatcctgtggagtctgctaaaatagaaccgccagataccggcctgtactatgacgagtacttaaagcaggtcatagacgtgttggagaccgacaagcattttcgcgaaaaactgcagaaagcagatattgaagaaatcaagagcggtagactgagcaagtag

SEQ ID NO: 197863 - DNA, 1323 bp, synthetic construct
  misc_feature 1..1323: note = Description of Artificial Sequence: Synthetic coding sequence
  source 1..1323: mol_type = other DNA
atgatcatccccagcctggaggagctggacagcctgaagtacagcgatcttcagaatctggcgaagtctctgggactgcgagccaatctgagagccaccaagctgctgaaagcactgaaaggctacatcaagcacgaggcgcggaaggggaacgagaatcaggatgagagccagacttcagcatctagttgtgatgagacagagatccagatcagtaaccaggaagaggctgaaagacagcccttagggcatgtgaccaagactcgacgtcggtgtaagaccgtgcgcgtggaccccgactcgcaacagaatcactccgagatcaagatttctaatccaaccgagttccagaaccatgagaaacaagaaagtcaggacctccgcgcaaccgcaaaggtgccctctcccccagatgaacatcaggaggccgaaaacgcggtgagttctgggaatcgtgacagcaaggtgcccagcgagggaaagaaaagcctgtatacagacgagtcgtctaaaccgggtaagaacaagaggactgctatcactacaccgaactttaagaagctccatgaagctcactttaaagagatggaatccatcgatcaatatatagagcgaaagaaaaaacatttcgaagaacataattccatgaacgagctcaaacagcctatcaacaaaggtggcgtgcggacgcccgtgccgccgcggggcagactgtccgttgccagcacgccaatctcccagcgtaggtctcaggggcggagttgcggccctgcctcacagtctaccctgggtctaaaagggtcgcttaagaggtccgcaatatctgcagcaaagacgggggtgaggtttagtgcagccactaaagacaacgagcacaaaaggtctctcaccaaaactccagctaggaagtctgcacacgtaaccgtgtctggtggcactccaaagggggaggcagttctgggaacccataagctaaagacaatcactggtaactcggccgccgtaataactcccttcaaattgaccactgaggctacccaaacacccgtttctaacaaaaagccagtatttgatctgaaagcctctctgagcagaccccttaattacgagcctcacaagggtaaacttaagccgtgggggcagtctaaagagaataattatttaaaccagcacgtcaataggatcaacttttacaagaagacttacaaacagccccaccttcagacgaaggaagagcagcggaaaaaacgggaacaggagagaaaagaaaaaaaagcaaaggtgcttggaatgcgccgtgggttgattctagccgaagattag

SEQ ID NO: 197864 - DNA, 1209 bp, synthetic construct
  misc_feature 1..1209: note = Description of Artificial Sequence: Synthetic coding sequence
  source 1..1209: mol_type = other DNA
atgatcatccccagcctggaggagctggacagcctgaagtacagcgacttgcagaatctcgcaaaatccttgggcctccgcgcaaacctgcgcgctaccaagctacttaaagccctgaagggatatataaaacatgaggcccgaaagggcaatgagaaccaggatgaatctcagacatcagcctcttcatgtgatgaaaccgagatccagatctctaatcaagaagaagccgaaagacagcccctgggacacgttactaagacccgccggaggtgcaagaccgtgagagtggacccggactctcagcagaaccactctgagataaaaatcagcaacccgacagagttccagaaccatgagaaacaagagtcccaggacttaagggccacagcgaaagtgccctctcccccggacgaacatcaagaggccgagaatgcagttagttctggaaaccgggatagcaaggtgcctagtgaaggaaagaaatcactgtacaccgatgagagctctaagcctggaaagaacaagcgcacagcgatcactactcccaattttaagaagctgcacgaggcacacttcaaggagatggagagtatcgatcagtatatcgagcgcaagaaaaagcacttcgaggagcacaattctatgaacgaactgaaacaacagccaattaacaaagggggcgtgcgtacccccgtcccaccacgggggcgcttaagtgtcgccagtaccccaatctcccagagacgaagccaaggccgtagctgtgggcccgcctctcagtcaaccttggggctgaaaggatccctgaagaggtcggccatcagcgctgcaaagacgggcgtgaggtttagtgcagccaccaaagacaacgagcacaaacgctcactgacaaagacgcccgctaggaaatctgcccacgtgacggttagtggaggcacgccaaaaggcgaggccgtccttggcacgcacaaattgaaaacaataactggtaatagcgccgctggcaagttgaaaccttggggacagtctaaggaaaataactatctcaatcagcacgtgaaccgcatcaatttctacaaaaagacctataagcagcctcaccttcagaccaaagaagaacagcggaagaagcgcgagcaggaacgaaaagaaaagaaagcaaaggttctgggaatgaggaggggcttgattttagctgaggactag

SEQ ID NO: 197865 - DNA, 1326 bp, synthetic construct
  misc_feature 1..1326: note = Description of Artificial Sequence: Synthetic coding sequence
  source 1..1326: mol_type = other DNA
atgatcatccccagcctggaggagctggacagcctgaagtacagcgacctacagaatctcgccaaaagcctcgggctccgcgccaacttgagagcgactaaactactaaaggcactgaagggttatatcaagcacgaggctcgcaaggggaacgagaatcaggacgaaagccagactagtgcaagctcttgcgatgaaaccgagattcagatatcaaatcaggaggaggccgaacggcagcctctggggcacgtgaccaagacacgccggcgctgcaagacggtgcgcgtcgacccagattctcagcagaaccacagcgaaatcaagattagcaatcctactgagttccagaaccatgaaaaacaggaatcacaagatttgcgcgccaccgcaaaggtgcccagtccacctgacgagcatcaggaggcagaaaatgctgtgtcctctgggaatcgcgatagcaaagtgccatccgaaggaaagaagagcctgtataccgatgagtcctcaaagcccggtaaaaacaagcgaaccgccatcaccactccaaactttaagaagctgcatgaggctcactttaaagagatggagagcatagaccagtacatcgagcgcaagaagaaacattttgaagaacataattctatgaatgaactcaagcagcagcccatcaataagggtggcgtccgtacccccgtgcccccaagaggtcgcctttcagttgcatctacacccattagtcaacgaagatcacaaggccgctcgtgcggacctgcctcccagtccaccctgggtctgaaaggcagtttgaagagatccgctattagcgccgccaaaacgggggtgagattttcggcagccaccaaagacaacgagcacaaacggtccctcacaaagacacccgctcggaaatccgcccacgtcaccgtatcgggcgggacccccaaaggagaggcggtgttaggtacccacaaattaaaaaccatcaccggtaactctgctgccgtgattactccattcaagctgaccacggaagccacgcagactcccgtctccaacaaaaaacctgtcttcgatctcaaggcctcactgtccaggcctctcaattatgaacctcataagggaaagctgaaaccgtggggccagtcaaaagagaacaattacctgaatcaacacgtgaacaggattaatttttacaaaaaaacgtacaagcagccccacttacagacaaaggaggaacaacggaagaagcgagagcaagaacgcaaagaaaagaaagcaaaagtactgggaatgaggagaggcttaattcttgcagaggattag

SEQ ID NO: 197866 - DNA, 1323 bp, synthetic construct
  misc_feature 1..1323: note = Description of Artificial Sequence: Synthetic coding sequence
  source 1..1323: mol_type = other DNA
atgatcatccccagcctggaggagctggacagcctgaagtacagcgatctccagaatctggctaaatccctcggtttaagagctaacctgagagcaactaaactgttaaaagccctcaagggctatatcaagcacgaggctcgcaaggggaatgaaaaccaggatgagtctcagacttccgcaagctcctgcgatgagacagagatccaaatctcaaatcaggaggaagcggagcggcagccccttggacatgtgacaaaaactaggaggaggtgcaagaccgtccgtgtggacccggattcccagaatcactccgagatcaagatctcaaaccctaccgagtttcagaatcatgaaaaacaggaaagtcaggaccttagagcgaccgctaaggttccttcccccccagacgaacaccaggaggctgagaacgccgtgagcagcgggaatcgggacagcaaggttcccagtgaagggaagaaatctctgtacacggatgaatcatctaagcctggtaaaaataagaggacagctattacgaccccgaactttaaaaagctgcatgaagcacatttcaaggaaatggagtcaatcgaccagtatattgagagaaagaaaaagcatttcgaagagcataattctatgaatgagcttaaacagcaacccattaacaagggaggggtgagaaccccagtcccaccgcgggggcgcctgtccgtggcttctacacccatctctcagcgaagatcccaggggaggtcctgtggtcctgcatctcagagtacactcggactgaagggtagcttgaaacgatctgctatttctgcagccaagactggggttaggttttcagcagcgacaaaagacaatgagcacaagagaagcctgactaagacaccggcccggaagtcagcccacgttacggtaagcggcggcacacccaagggagaggccgtgctgggtacacacaagctgaagaccataacaggcaattccgcggcggtcataaccccatttaagcttacaacagaagcaacccagactcccgtgtctaacaaaaagcccgtcttcgatctgaaggcaagtctctcccgcccactgaactatgaaccccacaaggggaagttaaagccctgggggcagagcaaggaaaacaactacctgaatcagcacgttaacaggattaacttctataagaagacttataaacagccccaccttcagactaaagaagaacagcgaaagaagcgcgaacaggagcggaaggagaagaaagcaaaggtcctcgggatgcgccgtgggctgattctggcagaagattag

SEQ ID NO: 197867 - DNA, 1320 bp, synthetic construct
  misc_feature 1..1320: note = Description of Artificial Sequence: Synthetic coding sequence
  source 1..1320: mol_type = other DNA
atgatcatccccagcctggaggagctggacagcctgaagtacagcgacctgcagaacctcgcaaagagtctgggtttgcgggccaatcttcgggcaactaaactcctgaaggccttgaagggctacataaaacacgaagctcgcaagggcaacgaaaatcaggatgagagccagacctctgcttcctcatgtgatgaaacggagatccagatatcaaaccaggaggaagccgaaaggcagcctctgggccacgtgactaaaacgagaaggcggtgcaagaccgtaagagtcgatccagattcccagaaccatagcgaaattaagatctccaatcctacagagtttcaaaatcatgagaagcaagaaagtcaagatctgcgcgccacagccaaagtcccaagtccacccgacgagcaccaggaggcagaaaacgcagtgtctagcggcaatcgcgactcgaaagtcccctcagaaggcaagaagtcactttatactgacgagagtagcaaaccaggaaaaaacaaacgaacggcaattacaaccccaaactttaaaaaactccacgaggcacattttaaagagatggagagtatcgatcagtatattgagcggaaaaagaaacatttcgaggagcacaacagcatgaacgaactgaagcagcctattaacaaaggcggagtaagaactccagtgcctcccaggggacgtctctcagtcgcctccaccccaatcagccaaagaaggtcacagggccgctcctgtggtccagcctcacagagtactctgggactgaagggtagtttaaagaggtccgctattagcgctgctaagacaggcgtgaggtttagcgctgctacaaaggacaacgagcataagcgctccctcaccaagacacccgctaggaagagtgctcatgtgactgtatccggcgggactcctaaaggggaagcggtgttaggcacacacaagctcaaaacgattaccgggaattcggcagcagtgatcaccccttttaagcttaccaccgaagccacacaaaccccggtgtcaaataagaagcctgtgtttgacctcaaggcttcattgtccaggcctctgaactatgagcctcacaagggaaagttgaagccatggggacagtcaaaagaaaataactatttaaaccaacatgtgaaccgcatcaatttctataaaaaaacgtacaagcaaccacatcttcagaccaaagaggaacaacggaagaaacgggagcaggaacgcaaagagaagaaagcaaaggtgctgggcatgagaaggggcctgatattagctgaggattag

SEQ ID NO: 197868 - DNA, 1281 bp, synthetic construct
  misc_feature 1..1281: note = Description of Artificial Sequence: Synthetic coding sequence
  source 1..1281: mol_type = other DNA
atgatcatccccagcctggaggagctggacagcctgaagtacagcgatttgcaaaatttggcgaaatctcttggcctgcgagcgaacttgcgggcaacgaagcttctcaaagcactgaagggatacatcaagcatgaggcccggaaaggaaatgaaaaccaagacgaaagccagacatctgcatccagctgcgacgagactgaaatacagatcagcaatcaggaggaagccgagcgacagccactagggcacgttacaaagacgaggcgccggtgcaagacagtgcgcgttgatccagacagtcagaatcacgaaaaacaagaaagtcaggatctgagagccaccgccaaggtcccttccccacccgatgagcaccaggaagccgagaatgcagtcagctccggtaacagggactcaaaagttccctcagagggcaaaaaatccctttatacagatgaatctagtaaacccggcaagaataagagaactgcaataacaacacccaacttcaaaaagctccacgaagcacatttcaaggagatggaaagtatcgatcagtacattgagcggaaaaagaaacattttgaagaacataactcaatgaatgaattaaagcagcagcccatcaataagggaggagtacgcactcctgttccacctagagggcgactgtctgtggccagcactccaatcagccagagacgttcccaggggagatcttgcggccctgcgagccaaagtacgcttggcctgaaaggatccctgaaaaggtcagccatttccgcagccaagaccggggtaagattttccgcagcaactaaggataatgaacataaacgaagtctcactaagactcccgccaggaagtccgctcatgtaactgtatccggggggacgcctaagggggaagctgtgctcggtacccataagctgaagaccattactggtaatagcgcagccgtaattactccctttaaactgaccaccgaagcaacgcagacacctgtgagcaataagaaacccgtctttgatcttaaagcctctctcagtagacccttgaattatgaaccacataagggaaagctcaagccctggggccaatctaaagaaaataattatctgaaccagcacgtgaataggattaatttttataagaaaacctacaaacaaccacaccttcaaacaaaggaagagcaacggaaaaagagggagcaagagcgaaaggagaaaaaggctaaggtactgggtatgcgtcgagggttaatactggcagaagattag

SEQ ID NO: 197869 - DNA, 2250 bp, synthetic construct
  misc_feature 1..2250: note = Description of Artificial Sequence: Synthetic coding sequence
  source 1..2250: mol_type = other DNA
atggccgccgccggcagccggaagcggcggctggccgagctgaccgtggatgagtttcttgcctcgggcttcgactcggagtcggaatccgagtcagaaaatagcccgcaagctgaaacaagagaagccagagaagctgccaggtccccagataaacctggcggcagtccgtctgcaagcaggaggaagggccgggctagtgagcacaaggatcagctttcacgattgaaagatcgggatccagaattttacaagttcctccaggagaacgatcagtctttgctgaatttttctgatagcgactctagcgaggaagaagaggggccttttcactctttgccggatgtgctcgaagaggcgagcgaggaagaggacggagccgaggagggggaggatggtgaccgcgtcccacgggggctcaagggcaagaaaaattcggtccccgttaccgtcgccatggtggaaaggtggaaacaagctgcaaaacaaaggctgacacctaagctatttcacgaagttgtgcaagccttccgggctgcagtggccacaactcgtggggaccaagagtctgcagaggcaaacaagtttcaagtcactgacagtgctgcatttaacgcactcgtaaccttctgcatccgtgatctgattggatgcctccagaaactgttgttcggaaaggttgccaaggattctagccggatgctgcagccttcaagttctccgctgtggggtaaactgagagtggatattaaagcctacctgggatctgctatacagctggtgtcgtgtctttccgagactactgtgttggccgccgttctgcgccacatcagtgtgctggtgccttgttttctgacatttcccaagcaatgtaggatgctgctgaagaggatggttattgtgtggtccactggtgaggaatccctgcgagtcctcgctttcctggttctgtcccgcgtctgtaggcataagaaggacaccttcctcggccccgtactgaagcaaatgtacattacctacgttagaaactgcaagtttacatcccccggcgccctgcccttcattagctttatgcaatggaccctgactgaactccttgcgttagagcctggagtagcgtaccagcacgcttttctctacatccgtcaacttgccatccatttgcgaaatgccatgactactcggaagaaggagacgtatcagagtgtttataattggcagtacgtccattgcctcttcttgtggtgccgagtgctgtcaaccgcgggcccctccgaagcgctccaaccgcttgtctacccattggctcaggttatcattggctgcatcaagcttatacctacagcccgattttatcccttaagaatgcattgtatccgagccctgactttattgagtggtagtagcggcgcatttattccagtgctgcccttcatcttagagatgtttcagcaggtcgactttaacagaaaacccggaaggatgagttccaagcctattaacttttcagttatcctgaaactctctaacgtgaacctgcaggagaaggcgtatagggacggactggtcgagcagttatacgaccttacccttgaataccttcacagtcaggctcactgtatcgggttccccgaattggtgctaccggttgtcctccagctgaagtccttcttgcgagaatgtaaggtggctaactactgccgccaggtgcagcagttgttgggcaaagttcaggaaaattcggcttacatttgttcacgtaggcagcgtgtcagcttcggtgtaagtgaacagcaggcagtcgaagcttgggagaaactgacccgggaggaaggaactccactgacattgtattacagtcattggcgcaagctgagagacagagagatccagttggaaatctctggcaaagagcgcctggaggatctgaacttccccgaaatcaaacgacggaagatggccgacaggaaggatgaggacaggaagcaatttaaggatctgtttgatctgaacagcagcgaagaagacgacaccgaaggcttctcagagagaggcattttaagacccctcagcacaagacatggggtcgaagacgatgaggaagatgaggaagaaggggaagaggattcatcaaattcagaagacggtgatcctgatgcagaggcaggcctggctccaggcgaattgcagcaactcgcacaaggtccggaggacgagctcgaggaccttcagttgagcgaagatgactag

SEQ ID NO: 197870 - DNA, 2403 bp, synthetic construct
  misc_feature 1..2403: note = Description of Artificial Sequence: Synthetic coding sequence
  source 1..2403: mol_type = other DNA
atgaagttccggcggaacaagaagcagatccccagcttccggaagctgatcaagacctcaaaagtgaagctggagaataagttaaagaataagcagtttaaacagcaatcaacgctcaaaaagtacaggaaagagcagcggaagttaagacaagcggtcaaggatgctgttagtaaaaagccaatcccattggagaatcctaaagagaagcggcccggcaaaaggatagagcgcgaagaagaggaggaagaggaggctcttccactggatatgatggatgaagatgatctgcagttgatgaaggatctgggccagagggtgagctttctgactcgcgacctgtcatcatccgagccagtacacgctaaaaagcgcaaacatgagcggattatcgacaagtacgaaaagattccacgcactttgcagacagcgcctgaaaaggaactcatccacttgctgcccattaaggataagtccggaattattcctcaaacgagggagaaaccagtaactgattctaataaagacgaagaggatcaggaagaggaacgggaacttgaggaggagataattgaggatccaatccaggagctcaccattgaggagcacttaatcgaacggaagaagaagcttcaagagaaaaaaatgcatatagccgcactggcatctgccatcctaagcgaccctgagaacaacataaaaaagctcaaagagttgcgctcaatgctgatggaacaggatcctgatgtcgccgtcaccgtgagaaagctggtgatcgtttccttaatggagctctttaaagatatcaccccctcttacaaaatcagacccctgactgaggcggagaaatcaacaaagacgcggaaagaaactcagaaactcagggagtttgaggaaggcctggtgagccagtacaaattttacctggagaacctcgagcaaatggtgaaggattggaaacaaaggaagctcaagaaaagcaacgtggtgtccctgaaagcttacaaaggactcgctgaagttgcggtgaagagcctatgcgagctgctcgtcgccctgccgcattttaacttccacaataatattatcgtcctgattgtgccactcatgaatgacatgtctaagcttataagcgaaatgtgctgcgaagcagtcaaaaaattgttcaagcaggataaactgggacaggcttcactgggagtgatcaaagtgatcagcgggtttgttaaggggagaaattacgaagtgcgaccagagatgcttaaaacctttctgtgcctgcgcattaaagaagttgaggtgaagaaggatactgaagacattaacaagcctaagaagtttatgacctttaaagagaaaagaaagtccctttcccggatgcagcggaagtggaagaaagcagaagaaaaactggagcgagagttgagggaagctgaagcgtccgaaagtaccgaaaagaagctcaagctccatacagagacgcttaatatcgtgtttgtgacatatttccgcatactgaagaaggcacagcggagcccccttctgccagccgtgctggaagggctcgcaaaattcgcccatttaatcaacgtggagttctttgatgatttgctggtagtgctgcatacactgattgaatctggggatttaagctatcaggagagccttcattgtgtgcaaaccgcctttcatatcctgtcgggtcagggggatgtgttgaatatcgatcctttgaagttttatacccacctctataagacactgttcaaactccacgccggagctacaaacgaaggcgtggaaattgtgctacaatgtctggatgtaatgcttaccaagcgacggaaacaggtcagtcagcagcgcgcactcgctttcataaagcgcctgtgtactctggcgctgcacgttctgccgaacagctcaattgggatcctggcgacaaccaggattcttatgcataccttcccgaagacagatcttctgctggacagcgagtcccaaggttccggagtgttcctgcctgaactcgatgaacccgagtactgcaatgcacagaacaccgcactgtgggaactccacgccctccggaggcactaccatcctattgtgcagcggttcgcagcccacctgattgcgggtgctccatcagaaggctccggcgcattgaaaccagaactcagcaggagaagtgcgacagaactgttcgaagcttacagtatggctgaaatgacctttaaccctccggttgagtccagcaatccaaagatcaaggggaagtttcttcaaggggactctttcttgaacgaggatctgaaccagctaataaagcggtattcttcggaagtggccaccgaatcacctcttgacttcacaaaatatctgaaaactagcctgcactag

SEQ ID NO: 197871 - DNA, 2403 bp, synthetic construct
  misc_feature 1..2403: note = Description of Artificial Sequence: Synthetic coding sequence
  source 1..2403: mol_type = other DNA
atgaaggcccggcggaacaagaagcagatccccagcttccggaagctgatcaagacctctaaggttaaactagaaaataagctgaagaataaacagttcaagcagcaatcgaccctaaaaaagtacagaaaagagcagcgcaagttgaggcaagcagtgaaggatgccgtcagcaaaaagcccatccctctcgaaaaccctaaagagaaaaggcccggtaaaaggatcgaacgggaggaggaggaggaggaggaggctctgcctctggatatgatggatgaggacgacctacagctgatgaaagatttaggtcagcgcgtatcattcttaacgagagacctaagttcctcagagccggtgcacgccaagaagcgcaaacatgaacgcatcatcgacaagtacgagaagatcccccgaacactgcaaacggccccagagaaggagctaattcacttgctgcccatcaaggacaagtcgggaattatacctcagactagagaaaaacctgtgaccgattctaacaaggacgaggaggatcaagaagaagaaagagaactcgaggaggaaatcattgaagaccccatccaagagctaaccatcgaggagcacttaattgaacggaaaaaaaagctgcaggaaaagaagatgcacatcgcagctctggctagcgccatcctctcagaccctgagaacaatattaaaaagctgaaggagctgcggagcatgctcatggaacaggatcctgatgtcgccgttaccgtgcgaaaactggtcatcgtttcactgatggagcttttcaaggatattacacccagctataagatcagaccccttacggaagccgagaaatcaactaagacccggaaagagactcagaagctacgggagtttgaagaaggactggtttcacagtataaattctatctggaaaatctggagcagatggttaaggattggaaacagcgcaaattgaagaagtcaaatgtggtgagcctgaaggcttacaaaggcctggcggaggttgccgtgaagagtttgtgcgaattgctcgttgcactgccccacttcaacttccataataacattatagtgctcatagtgccattgatgaatgacatgagcaagctgatctccgaaatgtgttgcgaagccgtgaaaaaacttttcaagcaagacaaactgggccaggccagcctgggagtgattaaggtgatcagtgggttcgtcaagggacgcaattacgaagttcggcctgagatgctgaaaacctttctatgcctcaggataaaggaggtggaggtgaagaaggataccgaggatatcaacaagcccaagaaattcatgacctttaaggaaaagcggaaatcactttctcggatgcagcgcaaatggaaaaaagccgaggagaagctcgaacgcgaactgcgcgaagcggaagctagtgagtcaactgagaagaaacttaaactgcacacggagacgctgaatatagtgttcgtaacttatttcaggattctgaaaaaagcccagcggtccccactgttacccgccgttttggaagggttggctaaattcgctcacctgatcaatgtggaatttttcgatgatctgctagtggtgttgcatactttaattgagtccggcgatctgtcttatcaggaatccctgcattgtgttcagaccgcattccatatccttagtggccagggtgacgtcctaaatatcgaccctctgaaattctatacccacctgtacaagaccctgttcaagcttcatgccggggccacaaacgagggagtggagattgtccttcaatgcctcgacgtcatgctcaccaagcgacggaaacaggtctctcagcagcgggccctagcctttatcaagagattgtgcacccttgcgctgcacgtgctccccaactcctcgattggtattctggcaaccacgagaatccttatgcatacatttcccaagacggatctactgctagattcagagtcccaggggtccggcgtgttcttgcccgaactggatgagccagaatactgtaacgcacagaatacagctctttgggagttacatgccttgcgtagacactaccatcctattgtccaacgctttgcagcacatctcatcgcgggagcaccctctgagggatctggggctttaaagcccgaattgagccggaggagcgctactgaactcttcgaggcctacagtatggcagagatgacattcaaccctccagtggaaagctcgaaccccaagataaagggcaaattcttgcagggagatagttttctgaacgaagatcttaaccaacttattaaaaggtactcaagcgaagttgccactgagtcacccttggacttcactaaatatttgaaaacgtctctccactag

SEQ ID NO: 197872 - DNA, 1506 bp, synthetic construct
  misc_feature 1..1506: note = Description of Artificial Sequence: Synthetic coding sequence
  source 1..1506: mol_type = other DNA
atggagctgttcaaggacatcacccccagctacaagatccggcccttgaccgaagccgaaaaaagcactaagacaaggaaggagactcagaaattgcgcgagttcgaggagggacttgttagccagtacaaattctacttggaaaacctcgagcagatggtcaaggactggaagcagcggaagctcaaaaaaagcaatgtggtgtccctcaaagcatacaaaggactggctgaggtcgccgtgaaaagcctgtgtgaactcctggttgccctccctcacttcaacttccacaataatattatagtgctgattgtgccattgatgaatgacatgagtaagttaatttctgagatgtgctgcgaggccgtgaaaaagctcttcaagcaggataagctcgggcaggctagtttgggggtgatcaaggtgatcagcggattcgtcaaagggcggaattatgaggtcaggccagaaatgttgaagacattcctttgcctcaggatcaaagaagtcgaggtcaagaaggacactgaggatattaacaagccaaaaaaattcatgacctttaaagagaagcgcaagtctttgtctcggatgcaaagaaagtggaaaaaggcagaagaaaagttggagcgggagctgagagaggcagaagctagtgaaagcacagaaaaaaagctgaaacttcacaccgagaccttgaacatcgtgttcgttacctatttccgcatcctgaaaaaagctcagagaagtcccctgttaccagctgttttagagggcttggccaagtttgcccacctgataaatgtcgagtttttcgacgacctcctcgtcgtcctgcacaccctgatcgaatccggcgatctttcctatcaggagtccttacactgtgtgcagacggcgtttcatattctatccggtcagggtgacgttttgaacatagacccccttaagttctacacccacctttataagacactctttaaactgcacgctggggctaccaatgagggcgttgagatcgttctacagtgtctggacgtgatgcttacgaaaagacgtaagcaggtaagccagcagcgggctttggctttcatcaagcgcctttgtaccctggcccttcatgtcctgcctaactctagtatcggcattttggcaaccactaggattctgatgcacactttcccgaagacagatttactgttagattccgagtcccaggggagcggggtgttcctccccgagctagacgagccggaatactgcaatgcccagaacacagccctctgggaattgcatgctctgcgcagacactatcatccaattgtgcaacgctttgccgcgcacttaattgcaggagcccccagcgaggggtctggcgcactcaaacccgaattgagtcgccgatcagcaactgagctgttcgaggcttactccatggctgagatgacattcaatcccccagtcgagagttccaaccccaaaataaaggtcacaacaaagggttag

SEQ ID NO: 197873 - DNA, 1551 bp, synthetic construct
  misc_feature 1..1551: note = Description of Artificial Sequence: Synthetic coding sequence
  source 1..1551: mol_type = other DNA
atggagcgggagcccggcgccgccggcgtgcggcgggccctgggccgccgcctggaagcagtcctggcgtcgcgttccgaagccaacgctgtctttgatattctggctgtgttacaatctgaggaccaggaagagatccaggaagccgtacggacctgttcacgacttttcggagccctcctcgagagaggagagttattcgtaggccagttaccctctgaggaaatggtgatgaccggcagccagggcgccacacgcaagtataaggtgtggatgcgtcatagataccatagctgttgcaacagactgggggagttattgggacatccaagtttccaggtcaaagaattggccttgtcagccctgctgaaatttgtgcagctggagggcgcccacccattagaaaagtccaagtgggagggcaactatttattcccccgggaactgtttaagctggtcgtgggcggtttgttatcacccgaggaagaccagtctcttctgctgtctcagttcagagagtacctggactacgatgacacccgctaccacaccatgcaggccgcagtagatgccgtggccagggtcaccggccagcaccccgaggtacctccagcgttctggaataacgcatttacactattatcagccgtttcactccctcgtcgggaacccactgtctccagtttttatgtcaagagagccgagctctgggatacatggaaagtggcacacctgaaggagcatcgcagggtctttcaggccatgtggctgtcctttttaaagcacaaactccctctgtcgctgtataaaaaagtgctcctaatagttcatgacgcaatcttgccacagctcgcccaacctaccctgatgatagactttctgacccgggcttgtgaccttgggggagcgctctctctgctggctctgaatgggctgttcattctgatacacaaacacaacctggagtatcctgatttttataggaagctatacggcctgttggatccaagtgtgtttcacgtgaaatatagggccaggttctttcacttggctgacttatttctttcatcctctcacctcccggcttatctggtagctgcttttgccaaacggctggcacgcctggccctcacggccccacccgaggcgctgctgatggtgctgccattcatttgtaatttactgaggaggcacccagcctgtagggtcctggtgcatcgcccgcatggtcccgagcttgacgccgacccttacgaccctggcgaggaggacccagcccagtctcgggcccttgagagttccttgtgggaactgcaggctctccagaggcattaccatccagaagtgtcaaaggctgcttctgtgattaaccaggccttatcgatgccagaggttagcatcgctcctctgttagaattgactgcttacgaaatttttgagcgggacctgaaaaagaagggccccgagccggtgccactggagttcataccggcccagggcctccttggccgccccggagagctttgtgctcagcatttcaccctgtcatag

SEQ ID NO: 197874 - DNA, 252 bp, synthetic construct
  misc_feature 1..252: note = Description of Artificial Sequence: Synthetic coding sequence
  source 1..252: mol_type = other DNA
tgacccgaggagctgaccttcgccagcgcccaggccgaggcccgggaggaggaacggcgagtaagagaaacagtaagacgggataaaacgctgctgaaggagaagcgcaagaggcgagaggaactctttatcgagcagaagaagcgcaagttgttacccgacaccattttggagaaattgaccacagcctctcagactaatattaaaaagtcccccggaaaggtgaaagaagggatgacaatcttgatatag

SEQ ID NO: 197875 - DNA, 774 bp, synthetic construct
  misc_feature 1..774: note = Description of Artificial Sequence: Synthetic coding sequence
  source 1..774: mol_type = other DNA
atggtgcagctgcggccccgggccagccgggcccccgccagcgccgaggctatggttgacgaagggcagctggccagcgaagaagaagaagccgagcacggtctgctattaggccagccaagttccggagccgctgccgagcctctggaggaggacgaagaaggcgatgacgaatttgatgacgaagccccagaagagttaacgtttgcttccgcccaggcagaggcccgggaggaagaacggcgcgtcagagagaccgtgaggagagataagacgctcctgaaggaaaaaaggaagaggcgcgaggagctcttcattgaacagaagaaacgtaagctactccccgacaccattctggaaaagctgactactgcatctcagacaaacattaaaaaaagcccagggaaagtcaaagaagttaatctccaaaaaaagaatgaggattgcgagaaagggaacgactctaaaaaagtcaaggtgcaaaaggtgcagagcgtgtcgcagaataagagttacctggcagttcgactgaaggatcaggatttacgggattccaggcaacaagctgcgcaagctttcatacacaacagtctctatgggccaggcaccaaccgcacaaccgtcaataagttcctgagcctcgccaacaagaggcttcccgtgaagcgcgccgccgtgcaattcctcaataatgcctggggcatccaaaagaaacaaaacgccaagagattcaagcgacggtggatggttaggaaaatgaagaccaagaagtag

SEQ ID NO: 197876 - DNA, 3300 bp, synthetic construct
  misc_feature 1..3300: note = Description of Artificial Sequence: Synthetic coding sequence
  source 1..3300: mol_type = other DNA
atgagcgtgctgaacaagaccaagtggaagggcggcaccctgcagatccagctggcaaaagagagctttttgcaccgccttgcacaagaacgagaagccgcaaaagccaagaaagaggagagcacaactgggaacgccaacctcttggagaaaacaggtggcgtcgattttcacatgaaagccgtacccgggacggaagtgcctggacataaaaactgggtcgtcagcaagtttggccgagtcctacccgtactacaccttaagaaccaacacaagcgcaaaataatcaaatacgacccttcaaagtattgtcataatctgaaaaaaatcggggaagactttagtaatacaatccccatctcatccctaacctgggaacttgagggaggcaacgatcccatgtccaaaaaacgccgcggagagttctccgacttccatggtccgccaaaaaagatcatcaaggtgcaaaaagacgagtcgtcaaccggctcattagcaatgagtactagaccaagaagggtcatcgagcgcccccctctgacgcaacagcaggcagcccagaagagaacttgcgattcaataaccccatctaaaagtagtcccgtgcctgtgtcagacactcagaagctaaagaacttgcctttcaagacatcgggccttgagactgctaagaagaggaattcaatcagcgacgacgataccgatagtgaagacgagctgcgaatgatgatcgcaaaagaggaaaatttgcagcgaactacccagccctctatcaatgaaagtgaaagtgacccgtttgaggtggtgcgggacgacttcaagtcaggggtccataagctccactctttaattgggcttgggatcaagaacagagtgtcctgccacgattcggacgacgacatcatgaggaatgatcgagagtacgactcgggagatacagatgagatcatcgctatgaaaaagaacgtagccaaggtcaaaaacagcaccgagttctcccaaatggagaagagtactaagaaaacctctttcaagaacagagagaattgtgagctgtcagaccactgcatcaagctccagaagagaaaatccaacgttgaatcagcgctctcccacggccttaagtctctgaaccgcaaatcaccgtctcactcctcttcgagtgaggacgccgatagtgccagcgaactggctgattcagaggggggcgaggagtacaatgctatgatgaaaaactgtctgagagtcaacctgactctggctgatctagaacagttagccggctccgacctgaaagtcccgaacgaggatacaaaatcagacggtcccgaaacgactacccaatgtaaatttgatcgcgggagtaagagccccaagacccctaccggattgcggcgagggcgacagtgcattcgccccgccgagatagtagcttccttattagagggggaggagaacacatgcggaaaacaaaaaccaaaggagaacaatctgaagcctaagttccaggccttcaaaggcgtggggtgtctttacgaaaaggaaagcatgaaaaaatccttaaaggactcagtggcgtcaaataataaggaccagaactccatgaaacacgaagaccctagtattatctctatggaagacggtagcccttacgtgaacggttctctcggggaagtcactccctgtcagcacgctaaaaaagctaacggccccaattatatccagccccagaagcgccagacaactttcgaaagtcaagaccgtaaagctgtgtctccaagcagtagcgaaaagcgctctaagaatcctatcagtaggccattagaagggaagaagtcactctcactgtccgccaagactcataatatcgggtttgacaaggactcctgtcacagcacgacaaagaccgaagcttcccaggaggagcgctcggattcgagtggactcacatccctgaagaaatctccaaaggtttcctccaaggatacccgagagataaagactgatttctccctctctatctcgaacagttccgacgtgtcggctaaagataagcacgccgaagacaatgaaaagcgactggctgccctggaagccagacaaaaggctaaggaagtgcagaagaaactggtgcacaacgccctggcgaatctggatggccatcccgaagacaaacctacccatattattttcgggtctgattccgaatgcgagaccgaagaaaccagtacccaggagcagagccaccctggcgaggagtgggtgaaagagtcaatgggtaaaacgtctggtaagctctttgacagctcagacgatgacgaatccgattccgaagatgattctaatagattcaaaattaaacctcagttcgaggggagggccggtcaaaaactgatggacctccagagtcatttcggaacagatgacaggtttaggatggacagccgattcctcgagacagacagtgaagaagaacaggaggaagtgaatgaaaagaagaccgccgaggaagaggaacttgcggaggaaaaaaagaaagcactcaacgtggtgcagtccgtgctccaaatcaacctgagtaactcgaccaatcgcgggtcagtagcggctaaaaaattcaaggacatcatccactacgacccgaccaagcaggaccacgctacctatgaacgcaaaagagatgataaacccaaagaaagcaaagctaagagaaagaagaagcgggaggaggctgagaaactcccagaggtcagcaaggagatgtactataatattgctatggacttgaaggagatttttcagacaacaaaatatacgagcgaaaaggaggaagggaccccctggaacgaggattgcggcaaggaaaagccggaagagatacaggatcccgccgcactgacaagtgacgcagagcaacctagtggcttcaccttcagctttttcgactcagacaccaaagacattaaggaggagacatatcgggtcgagactgtcaaacccggcaagattgtgtggcaggaggacccacgtttgcaggacagctctagcgaggaggaggacgttacggaggagactgaccacaggaatagctctccaggggaggcttccttgcttgaaaaggaaaccactcggttcttcttcttttccaaaaacgatgaacggctgcagggcagtgacctcttctggcggggcgttggttccaacatgagccgaaattcttgggaggcccgcacgaccaatttgcgcatggattgtagaaagaagcacaaagacgctaaaagaaagatgaagcccaaatag

SEQ ID NO: 197877 - DNA, 3396 bp, synthetic construct
  misc_feature 1..3396: note = Description of Artificial Sequence: Synthetic coding sequence
  source 1..3396: mol_type = other DNA
atgaaggtgaaccgggagaccaagcggctgtacgtgggcggcctgagtcaggatatcagcgaggcggatctgcagaaccagttttcaaggttcggggaggtctctgatgtcgaaattatcacacggaaagacgatcaaggtaatcctcagaaagtgttcgcctacatcaacatatctgtagcagaggcagatctgaagaagtgcatgagtgtgctgaacaaaacaaaatggaaaggggggactctacagatccaactggctaaggaatcatttctgcatcggctggcccaggagcgcgaagccgccaaggctaagaaagaggagagtacaacgggaaacgcgaacttgttggagaagaccggcggggtggatttccacatgaaagcagtccccggcaccgaggtgcccggccataaaaattgggtcgtctcgaaatttggccgagtccttcccgtgctccatctgaagaatcagcataagcatctgcgaaacattatcaagtatgatcctagcaaatattgtcataatctaaagaaaatcggggaagacttttccaacaccatccccatctcgagcctaacttgggaactcgaaggcggaaatgacccaatgtccaagaagcgccgcggggagttctccgactttcacggcccacctaagaagatcattaaagtgcagaaagatgagagctccactgggtcacttgctatgtccaccaggcctcgccgcgtgattgagcgcccccctctcacccagcaacaggctgctcagaaaagaacttgcgactccattacgccgtcgaagagctcccctgtccccgtgtccgacacccagaaattgaagaatctgcccttcaagaccagcggtctggagaccgcaaagaagagaaattccatctctgatgatgacactgacagtgaagatgagctgaggatgatgatcgcgaaggaggagaacctgcaacggacaacccagccaagcattaacgagtctgaatcagatccgtttgaagtggttagagatgacttcaaatccggtgttcacaagcttcattccttgattggtctcgggatcaaaaatcgcgtctcatgtcatgatagcgacgatgatataatgcgaaacgatcgcgagtacgacagtggcgataccgacgaaatcattgccatgaaaaaaaatgtggcaaaggtgaagaacagcaccgaattttcccagatggaaaagagcactaaaaaaaccagcttcaaaaaccgggagaactgcgaactgtccgatcactgcattaagctccagaaaaggaaatctaatgtggaatctgccctctcacacggtttaaagtccttaaatcgcaaatcaccttcccactcttcgtcttccgaggacgccgattccgcaagcgaactggccgactccgagggtggcgaagaatacaacgctatgatgaagaattgccttcgggtaaacctgaccctcgccgatctggagcaactcgctggatccgatcttaaggtgccaaatgaggacactaagtccgacggccccgaaactactacccagtgtaaattcgaccgagggagcaagtcacctaaaacaccgacgggcctccgccgcggcagacagtgcatcagaccagctgaaatcgtcgcttctctactcgagggtgaggagaacacgtgtggcaaacagaagccgaaagagaataatctgaaacccaagtttcaggcctttaaaggagtgggatgcttgtacgagaaagaatctatgaagaagtcacttaaggatagtgtagctagcaacaacaaggatcagaactctatgaagcacgaggacccttctatcatctccatggaagatggctctccatatgtcaatggatccctaggagaggtgaccccctgtcagcatgctaaaaaggccaacggacccaactacatccagccacagaagaggcagaccactttcgagagccaagatagaaaggctgtttctccttcttcgtcagaaaaacgctccaaaaatcctatctcacgtccactcgaggggaaaaaatctctcagtctctcagcgaaaacccataacatcgggttcgataaggacagctgccacagtacaactaaaactgaggcttctcaagaagaacgaagtgactcaagcgggctgacctccctgaaaaagtcccctaaggtaagctctaaagacacacgggaaattaagacagatttttctcttagcataagcaatagcagtgatgtgagcgccaaagacaagcacgccgaggacaatgaaaaacggttggccgccttggaagcccgccagaaggctaaggaggtacaaaagaagttagtgcataacgcgttagcaaatctcgaatctatgggcaagaccagcggcaagctgtttgatagttctgacgacgacgagtctgactccgaagatgacagcaatagatttaagataaaaccccaattcgaaggaagggcgggccagaagcttatggaccttcaaagtcactttggcaccgatgaccggtttcggatggatagtcgttttctcgagacagactccgaggaggaacaggaagaagtaaacgaaaagaaaacagccgaagaggaggaattggccgaggagaagaagaaagctctgaacgtcgtccagtctgtgctccaaattaatctctccaatagcaccaatagaggtagtgtggccgctaaaaaattcaaggacatcatccactatgatcctactaaacaggaccacgctacctatgagcgcaaacgggatgacaaacctaaagagtctaaagctaaacgaaagaagaagagagaggaggccgagaaactcccagaggtaagcaaggagatgtactataacatcgcaatggatttgaaagagatcttccagacaacaaaatacacctcagagaaagaggagggaaccccatggaacgaggactgcggtaaagagaagcccgaagagatacaggatcccgctgccctgaccagtgacgctgaacagccatccggttttacattcagtttctttgactcagatacaaaagacataaaggaggaaacttatagggtggagacagtcaagccaggtaagattgtttggcaggaggatccccgcttgcaggactcaagctcagaggaggaagacgtcactgaagaaacagaccacaggaattcaagtccaggggaggcttctctgcttgaaaaggagacaacaaggtttttctttttttccaagaatgacgaacggctgcaaggatccgacctattttggcgcggggtgggcagcaacatgagcaggaactcttgggaagccaggacaacgaatctgaggatggactgccgcaaaaaacacaaggacgcaaagcgcaaaatgaaacctaaatag

SEQ ID NO: 197878 - DNA, 777 bp, synthetic construct
  misc_feature 1..777: note = Description of Artificial Sequence: Synthetic coding sequence
  source 1..777: mol_type = other DNA
atgaaggtgaaccgggagaccaagcggctgtacgtgggcggcctgagccaggacatctccgaagcagacctgcagaatcagttttctcgcttcggggaagttagcgatgtcgaaattatcacaaggaaggatgaccaggggaacccacaaaaggtcttcgcatacataaatatctccgtcgcagaggccgaccttaaaaaatgtatgagcgtgctgaataagaccaagtggaagggagggactctccagattcagctggccaaagagtcttttctccaccgattggcccaggagagggaagctgccaaagccaaaaaggaagaatctacaacaggcaatgctaacttgctggaaaagacaggtggcgtggatttccatatgaaggccgtgccaggaaccgaagtccctggccacaagaactgggtggtaagcaagttcgggcgggtcctccccgtgctccacctcaagaaccagcataagaggaagatcataaagtatgaccccagcaagtactgtcacaacttaaaaaagataggggaggacttctccaacaccatccctattagttctttgacatgggagctggaaggcgggaacgaccccatgtcgaaaaaacggcgcggcgaattttcagacttccatgggccaccaaaaaaaataatcaaagtgcagaaagacgagagcagcactggaagcctggcaatgtcgacgaggccaagacgggttattgaaagaccccccctgacccaacagcaagctgctcaaaagcgtacttag

SEQ ID NO: 197879 - DNA, 2913 bp, synthetic construct
  misc_feature 1..2913: note = Description of Artificial Sequence: Synthetic coding sequence
  source 1..2913: mol_type = other DNA
atgaaggtgaaccgggagaccaagcggctgtacgtgggcggcctgtctcaggatatctctgaggccgacctacagaatcagtttagtagattcggggaagtgtctgacgtcgaaattattacacggaaggacgatcaaggaaatccccagaaagtattcgcttatattaacatctcagtggcagaggcggatttgaaaaaatgcatgagtgtgttgaataagacgaagtggaaggggggaacactgcagattcagctcgctaaggaatcctttctgcaccgcctagcacaggagagagaagctgcgaaggccaaaaaggaagagtcaacaaccggaaacgccaatttactggaaaagaccgggggagttgacttccacatgaaggcggtacctgggaccgaagtccccggccacaagaactgggtcgtgagtaaattcggccgggtgctccctgtgctccacctcaagaaccagcacaaacggaaaatcattaagtacgacccctccaaatactgccataacttgaagaaaattggcgaagattttagcaacactatcccaattagcagcctaacatgggaactcgaaggaggcaatgaccccatgtctaaaaaaaggagaggtgagttttcagattttcacgggccaccaaagaaaattatcaaggttcagaaagatgagtcctctacaggctccctcgccatgtctactaggccaaggagagttatcgagcgtccaccactgacgcaacaacaagccgcccagaagcgaacctgcgacagcatcaccccgtcaaagtcttcaccggtgccagtgtcggacacccagaagctaaaaaatttgcctttcaaaacatcagggcttgagacagctaagaaacgcaactccatctctgatgatgatactgactctgaagacgagttgcggatgatgatcgcgaaagaagaaaacctacaacggactacccagccctccatcaatgaatctgaatccgatccatttgaggttgtgcgcgatgacttcaagagcggagttcataaactccattccctgatcggcttaggaatcaaaaacagggtctcttgccatgactctgatgacgatataatgcggaatgatcgcgaatacgattctggtgacactgatgagataatcgctatgaagaagaacgtggcaaaggtaaagaacagcacggagtttagccagatggaaaaatcgaccaaaaagaccagcttcaaaaatagggaaaactgcgaattgtccgaccattgcattaagcttcaaaagcgcaagtctaacgtggagagtgccttgtctcatggactaaaatcactcaaccgcaaatctccatcccattcttctagttccgaagatgccgacagtgcctcagaattggccgacagtgaaggtggcgaagagtacaacgccatgatgaaaaactgcctcagagtcaatctcacactggccgatttagagcagttggcaggctcagacctgaaggtcccgaatgaagacacaaagtctgacggacctgaaacgacaacacaatgtaaatttgatagggggagcaagtctcccaagacccccaccggactacgccgcggacgccaatgcattcgccccgcggaaatcgtcgcctcattactggaaggcgaagaaaatacttgtggcaaacagaagcccaaggaaaataatttgaaacccaagtttcaggcttttaagggcgtaggatgcttgtacgaaaaggagtctatgaagaaatcactaaaagatagcgtggccagcaacaacaaagaccaaaactccatgaagcatgaggaccccagcattatctcgatggaggacggttctccatatgtgaatggtagcctgggcgaggtgaccccttgccagcacgcgaagaaagcgaatgggcctaactatatccagccccagaaaagacagactacctttgagagccaggatagaaaggcagtgtcccccagctcctccgagaagagaagtaaaaatcctatctctcggccgctagaaggcaaaaaaagcctctcattgtccgccaagacacataatatcgggtttgacaaggatagctgccactcgacgaccaaaacagaggcttcccaggaggagcggtccgactcatctggcctcactagccttaagaaatccccgaaggtgtctagtaaagacacccgtgaaatcaaaaccgatttcagtttatctatcagtaattcaagcgacgtgtctgccaaggataagcatgctgaggacaatgagaagcggctggctgctttggaagcacgtcagaaggccaaggaagtccagaagaagcttgttcataatgcactggcaaatttggatggacacccagaagataaaccgactcacatcatcttcggaagtgattcagaatgtgaaactgaagagacatccacccaggagcagtcacatccgggcgaagaatgggtgaaagaatccatgggaaagacctccggcaagttgttcgactcttcagacgatgacgagtctgattcggaggacgactcaaaccggtttaagatcaagccccagttcgaaggccgggctggccagaaactgatggatttacagtctcatttcgggaccgacgatagattccgaatggattcccgatttctagagactgactctgaggaggaacaagaggaggtcaacgagaagaaaactgctgaagaggaagagttagctgaagagaagaagaaggctttgaatgtggtccagagtgtgctgcagatcaacctaagtaatagcaccaacaggggcagcgtggctgcaaagaaattcaaagatataatccactacgaccccaccaagcaggatcacgccacttacgagcggaagagggacgacaagcccaaggagagtaaggcctag

SEQ ID NO: 197880 - DNA, 1242 bp, synthetic construct
  misc_feature 1..1242: note = Description of Artificial Sequence: Synthetic coding sequence
  source 1..1242: mol_type = other DNA
atgaaggtgaaccgggagaccaagcggctgtacgtgggcggcctgtcacaagacatttctgaggccgatctacagaaccagtttagcagattcggtgaagtgtcagatgtggaaataatcacccgaaaggatgatcaggggaatccgcaaaaagtgttcgcttatatcaacatatctgtagccgaagctgacctgaagaaatgtatgtctgtgttaaacaagactaaatggaaaggcgggacccttcaaattcagcttgccaaagaatcattcctgcaccgcctggcacaagagagagaagccgcaaaagctaagaaggaagagagcacgaccggcaacgccaatctgctcgagaaaacaggaggggttgacttccacatgaaagccgtgccagggactgaagtaccaggccacaaaaattgggttgtaagcaaatttgggcgggtgttgcccgtgctgcacctgaagaaccagcacaagaggaagattatcaagtacgaccctagtaagtactgtcacaacctcaagaaaatcggcgaggacttctctaacacaattcctataagctccctcacttgggaattagaggggggcaacgaccccatgagcaaaaagcgaaggggggagttctcagacttccatgggcctcccaagaaaatcatcaaagtgcagaaagacgagagctctactgggtctcttgccatgagcacccgccctcgccgggttattgagaggccaccacttacccagcagcaagccgcgcagaagaggacatgtgattctatcacacccagcaaatcgagccccgttcccgtcagcgatactcagaagctgaaaaacctaccctttaagactagtgggctcgagactgccaagaagcggaatagcattagcgacgacgacaccgactcagaagatgaattgcgcatgatgattgctaaagaagaaaatcttcaacgcacgacgcagccatccattaatgaatctgagtctgatccattcgaggtggtccgggacgacttcaagtccggcgtacacaaactgcacagcctcattggacttggaatcaagaatagggtttcgtgtcatgattcagacgacgatatcatgaggaacgaccgagaatacgacagcggcgacacagacgagatcatagccatgaaaaagaacgttgccaaggtaaaaaacagtactgaatttagccagatggaaaagagcaccaaaaagacatcgtttaagtag

SEQ ID NO: 197881 - DNA, 3504 bp, synthetic construct
  misc_feature 1..3504: note = Description of Artificial Sequence: Synthetic coding sequence
  source 1..3504: mol_type = other DNA
atgaaggtgaaccgggagaccaagcggctgtacgtgggcggcctgtctcaggacatctcagaagccgaccttcagaatcaatttagccgctttggcgaagtttccgatgtagaaatcatcaccagaaaggatgaccagggaaacccccagaaggtcttcgcgtatatcaatatcagtgtcgccgaagcagatctgaaaaaatgcatgtccgtgttaaacaaaactaagtggaaggggggtaccttgcagatccagctggccaaagagagcttcctgcaccgcctggcccaggagcgtgaagcagcaaaagccaagaaagaggaaagtacaactggcaacgcaaatctactagagaagactggcggggtggacttccacatgaaagcagttcccggcacggaggttcctgggcataaaaattgggtggtatctaagtttggccgagtgttgcctgtgttgcacctcaagaaccagcataaacgaaaaattatcaagtacgacccgtcaaagtactgtcataacctgaaaaagatcggggaggacttttcgaacacaataccaatctcatctctgacatgggaactggaaggcggaaatgacccgatgagtaagaagagacgtggggagttctctgattttcacggccctccaaagaagattattaaggtgcagaaggacgaatcctcaacagggtctctagccatgtctacacggcctcggagggttatcgagaggcccccactgacccaacagcaagctgctcagaagagaacttgcgacagcatcaccccctccaagtcttcaccggttcccgtctctgatacacagaagctgaaaaatctgccattcaaaacttctgggctggaaaccgccaaaaaaaggaatagtatctccgacgacgataccgactccgaagatgagctgagaatgatgatcgctaaggaggaaaacctccagcgtaccacccagccatccatcaacgaaagcgaatccgatcctttcgaagtggtacgcgatgatttcaagtctggtgtccataaactccactctctcataggactggggatcaaaaaccgcgtgagctgccacgattctgatgatgatatcatgcgcaacgacagggagtatgattctggcgacaccgatgaaatcattgccatgaaaaagaatgtagctaaagtgaagaacagcacagagttcagccaaatggaaaaatcaactaagaagacttccttcaagaatagggagaactgcgagttaagtgatcattgcatcaagctacagaagcgaaagtcaaatgtagaaagtgcgctcagccacggattaaagtctctaaaccggaaaagcccctcccatagctcaagctctgaagacgcagactcagcatccgagctggccgactcagaggggggcgaggaatataacgctatgatgaaaaattgcttgcgggtgaacctcacactggctgatttggagcagctggccgggtccgatctgaaagtgccaaacgaagatactaagagcgacggccctgagacaaccactcaatgtaagttcgaccgggggagcaaatctccaaagactccgaccgggctgaggcgcggacgacagtgtatccgtcctgctgaaattgtcgcctcgctcttagaaggtgaagaaaacacctgtggaaagcagaagcccaaggaaaataatctgaagcccaagtttcaggcatttaagggagtcggctgcctctacgagaaggagagcatgaagaaatctctgaaagacagtgtggcttcaaacaacaaagatcaaaatagcatgaaacatgaggacccgtctattatttctatggaggacgggtctccttatgtcaacggctccctaggtgaagttactccatgccaacatgccaagaaagccaacggccccaattacatccagcctcagaaaagacagaccactttcgaatctcaggaccggaaggctgtatccccttcctcgtccgagaaacggtctaagaatccgatttctaggccactcgaagggaagaagtcactgtccctctctgcaaagactcacaacatcgggttcgataaagatagctgccactccactactaagacagaggcttctcaggaggagcgcagtgactcttccggcttaacatccttgaagaagtcgccaaaagtgagtagcaaagacacccgagagattaagaccgatttctccctgtcaatctctaattccagtgatgtcagcgccaaggacaagcacgccgaggataacgaaaagaggttggctgctctcgaggcgcgccagaaagcaaaagaggtccaaaagaaactggtgcacaatgcgctggccaacctggatggtcaccccgaggacaaacctacgcacattatcttcgggtccgattctgagtgcgagacggaggagacaagtacacaggagcagtctcacccaggggaagagtgggtgaaagaaagtatgggtaaaactagtggcaaactgtttgatagcagtgacgatgatgaaagcgattctgaagacgattcaaataggttcaagattaaaccgcagtttgagggtagggctggccagaaactgatggacttgcagagtcatttcgggacagatgaccggtttcgcatggactcacggttccttgagaccgattccgaggaggaacaggaggaagtcaacgagaagaagaccgcggaggaggaggagctggcagaggagaagaaaaaggccctcaatgtggtgcaatctgtcctgcagatcaatctgtccaattccaccaaccggggatctgtggctgccaagaagtttaaagatatcatccattacgacccaaccaagcaggaccacgcaacctacgaacggaagcgcgacgacaaacccaaagagagcaaagcaaagagaaaaaaaaagagagaggaggcggaaaaactccccgaagtcagtaaagagatgtattacaacattgcaatggatcttaaggagatcttccaaaccaccaagtatacatcggagaaagaagaggggaccccctggaatgaggattgcggcaaagaaaaacccgaagagattcaggaccccgctgctttgacatccgacgcagagcagcccagtggatttaccttcagtttctttgatagcgacaccaaggacattaaggaagagacttaccgagttgaaacggtcaagccaggcaagattgtctggcaagaagatccgcgcctgcaggactcctctagtgaagaggaggacgttacagaagagacagaccatcggaattcaagtccaggagaggccagtctgctggagaaggagacaacaagattcttctttttctccaaaaatgacgagcggcttcaggggtctgacctcttttggcggggggtggggtcgaacatgtcaagaaattcctgggaagcaagaacaacaaacctgcgaatggactgtcggaaaaagcacaaagatgcgaagagaaagatgaagccgaagtag

SEQ ID NO: 197882 - DNA, 438 bp, synthetic construct
  misc_feature 1..438: note = Description of Artificial Sequence: Synthetic coding sequence
  source 1..438: mol_type = other DNA
atgaaggtgaaccgggagaccaagcggctgtacgtgggcggcctgagccaggacatatccgaggcagacctgcagaatcagttttccagattcggggaagtttccgatgtcgagatcatcacccgcaaggatgaccaggggaatccgcagaaagtgttcgcatatattaacatcagcgtggccgaggctgatctaaagaagtgtatgtctgtgctcaataaaacaaaatggaagggtggtacgctgcaaattcagttggccaaggagtcttttttgcaccgattagctcaggaaagggaagcggccaaggctaaaaaagaggagtcgacgacagggaacgccaatctgctggagaagacgggcggcgtagacttccatatgaaggccgtgccaggtacggaggtgccagggcataagaattgggtagtttctaagtag

SEQ ID NO: 197883 - DNA, 3504 bp, synthetic construct
  misc_feature 1..3504: note = Description of Artificial Sequence: Synthetic coding sequence
  source 1..3504: mol_type = other DNA
atgaaggtgaaccgggagaccaagcggctgtacgtgggcggcctgtctcaggacatttctgaggccgacctccagaaccagttcagccgtttcggcgaggttagcgacgtagagatcatcacaagaaaagacgaccaagggaacccacagaaggtattcgcatatattaatatcagtgtggcagaagccgatctgaagaagtgtatgagcgtgcttaacaagaccaaatggaaggggggcaccctacagatccagctggcgaaggaaagcttcctccaccggctggcacaagagagagaagcggcaaaagctaagaaggaggagtccacaacaggcaatgctaacttattagagaagactggaggcgtggattttcacatgaaagccgtgccaggcaccgaagtaccaggccacaagaactgggtggtatcgaagttcgggagggtcctgcctgttctgcaccttaagaatcagcacaaaagaaaaataatcaagtatgatccatccaagtactgtcacaatctgaaaaagataggcgaggacttctccaataccatccctatcagcagcctaacatgggaactggaggggggaaatgaccctatgagcaagaaacggaggggagagttttcggatttccacggaccacccaaaaagatcattaaagttcagaaggacgagagttcaactggctctttagccatgagtacccgacccagacgggtcatcgagcgcccaccactaacccaacagcaggcagcccagaaacggacctgcgattctattaccccgtcaaagagctctccggtacctgtgtccgacactcagaagctgaaaaacttacccttcaagacaagcggactggagacggcaaagaaacgcaactcgatcagcgatgacgatactgattccgaagacgaactgcggatgatgatcgcaaaggaagaaaacttgcaaaggacgacccagccaagtatcaacgagtccgagtcagacccctttgaggtcgttagagatgatttcaagtctggggtgcataaactgcacagcctcatcggtcttggcatcaagaatagagtcagctgtcacgactcggatgacgatattatgaggaatgatcgagaatacgactcgggcgatacggatgaaatcattgccatgaaaaagaatgtggcaaaggttaagaacagcaccgagttcagccaaatggaaaaatcaacgaagaaaacatccttcaaaaatcgcgagaattgtgaattatccgaccactgcattaaactccagaagcgaaaatctaatgttgaatccgctttgagtcatggcctcaaaagtctgaatagaaagagcccctcgcatagttcctcatcagaggatgcagactccgcttcagaactggccgattccgaaggtggtgaggagtacaatgcaatgatgaagaattgtttaagagtaaatctgacactggctgacctggagcaacttgcggggtctgatctgaaagtccctaatgaggacactaaatccgatggtcccgagactaccactcaatgcaagttcgaccggggctctaaatcgcctaaaactcccaccggcttgagaaggggccgacagtgtatcagaccagctgagatcgttgcctccctgttagagggtgaggaaaacacgtgtggcaaacagaaaccgaaggagaataacctcaaacctaaatttcaggccttcaaaggagtgggatgcctatacgaaaaggaaagtatgaagaaatctctgaaggacagcgtggcaagtaataataaagatcagaactctatgaaacacgaggaccccagtatcatttcaatggaggatgggtctccttacgtgaatggatccttaggggaagtgactccctgtcagcacgccaagaaggcaaacgggcccaattatatacagcctcagaagcgacagaccacgtttgagtcccaggataggaaagcggtgtctccttcttcttcagaaaagagatctaaaaaccctatctctaggccgctggaggggaagaagtctctctcccttagcgccaaaacccataatattggtttcgataaggactcatgccattcaaccaccaaaaccgaggctagccaggaagagcggtccgactctagcgggctgacttctttgaagaagtcaccaaaggtgtctagtaaagacacaagggaaatcaagaccgattttagcctctctatctccaattccagcgacgtgtctgctaaggataaacatgcagaagacaacgaaaagaggttagctgctctcgaggcccggcagaaagctaaggaagtccagaaaaagctggtgcacaacgcgctggccaacctggacggtcatcctgaggacaaaccaactcatatcatctttgggtctgactctgagtgcgaaactgaggagacttccacccaggaacagagtcatccaggcgaagaatgggtgaaggagtccatgggtaagacaagcgggaagttgtttgactcttccgacgacgatgaatcagattcagaggacgattctaaccgtttcaagatcaaacctcagtttgagggccgggctggtcaaaaattgatggatctgcaatcacacttcggtactgatgacaggtttcgtatggactcaaggttcctcgaaacggatagcgaagaggaacaggaagaggtgaatgagaagaaaaccgccgaggaggaggaacttgccgaggagaaaaaaaaggcgcttaacgtggtacagtctgtcctacagatcaacctttcaaattctacaaaccgaggatcagtggcagctaagaaattcaaggacattatccactatgatcccacaaagcaggatcacgccacttatgagcggaagcgcgatgataagccaaaggaatcgaaggctaagcggaaaaagaagcgcgaagaagcagagaaactgccagaagtgagcaaagaaatgtactataacatcgccatggacctcaaggagatttttcagactactaagtacacatctgaaaaggaggaaggtaccccttggaatgaggactgcggcaaagagaaacccgaagagattcaggatccagctgctctaacgtcggacgctgagcaacctagcggatttacattttctttcttcgactcggacactaaagacatcaaggaggaaacttacagagtggagacagtcaaacctgggaagatagtgtggcaagaggaccctagattacaggactccagttctgaagaagaagacgtgacagaagaaaccgatcacaggaattctagccccggggaagcctccctgctagagaaagaaacaacccgcttctttttcttcagtaaaaatgatgaaaggctccagggaagtgatctcttctggaggggcgtgggcagcaatatgtcccgcaattcttgggaggctagaacaactaatctgcggatggactgccgtaaaaagcacaaggatgcaaagcggaaaatgaaacccaagtag

SEQ ID NO: 197884 - DNA, 261 bp, synthetic construct
  misc_feature 1..261: note = Description of Artificial Sequence: Synthetic coding sequence
  source 1..261: mol_type = other DNA
atgaaggtgaaccgggagaccaagcggctgtacgtgggcggcctgagccaggacattagtgaggcagacttgcagaaccaattctcaaggttcggagaggtgtccgacgtagagatcattactcggaaggacgaccagggcaacccgcagaaggtttttgcatatatcaatattagcgtggcagaggctgatctaaaaaagagcatttttcatgtcattcagcgggattcaagtgacgaagagaacagttctattgtgtag

SEQ ID NO: 197885 - DNA, 3441 bp, synthetic construct
  misc_feature 1..3441: note = Description of Artificial Sequence: Synthetic coding sequence
  source 1..3441: mol_type = other DNA
atgggccccgcccccgccggcgagcagctgcggggcgccaccggcgaaccagaggtgatggaacccgccctggagggtactggcaaagagggcaaaaaggcatcctcaagaaaacgaaccctggccgaacccccagccaagggtctccttcagccagttaaactgtcgcgggccgaactgtacaaagagcccacaaacgaggagctgaacagactgagagagacagaaatcctttttcactcatcccttctcagactgcaggtggaagagttacttaaggaagtacgtctgtccgaaaaaaagaaagataggatcgacgctttcctgagggaggtgaatcagagggttgttcgggtacccagtgtgcccgaaacagagctcacagaccaggcttggttacccgctggtgtgcgtgtgcctcttcaccaggtgccatacgccgtgaaggggtgctttcgattcttacctcccgcgcaagtaactgttgtgggatcttatctgctagggacttgtattaggcccgacattaatgtagacgtagcactgactatgccccgcgagattttgcaggacaaggatggattgaatcaacggtatttcaggaagagggctttgtatctggcccacctcgcgcatcacctggctcaggatcctctttttggctctgtttgtttctcctacacgaacggttgccatttgaagccttccctgttactcagaccacgcggaaaggatgagcgcctggttacagtgcggcttcacccttgccctccacccgatttctttcggccttgtcggctcctccctacgaagaataatgtccgcagtgcctggtatcggggccagtctcctgcgggcgatgggtcccccgagcctcctacacctcggtacaacacctgggttctccaggatacagtcctcgagagccacctccagctgttatctactatcttgtcttcggctcagggcttgaaagatggggtggctttgctgaaggtctggctacgtcaacgcgaactggataaagggcaaggtggtttcaccgggttcctcgtctctatgttagtagtgtttctggtctccaccagaaagatacatacgactatgtccggttatcaggttttgaggagcgtcttacagtttcttgccacgactgacttgaccgtgaacggcataagtctttgcttgagctccgatcccagcctgccggctctggcggattttcaccaggcattctcggtagtctttctagactcttctggtcatctgaatttatgcgccgacgttaccgccagcacatatcaccaggtgcagcacgaggctcgcctgagtatgatgctattagacagtagggctgacgatggctttcatctacttctgatgaccccgaagcctatgattagggctttcgaccacgtgcttcatctgcgacctttaagccgtctgcaggccgcttgccatcgcctaaagctttggcccgagctgcaggacaatggtggcgactatgtgagcgcggcgcttggccctcttaccacccttctggaacagggactaggcgctaggctgaaccttctggcccacagtagacctcctgttccggaatgggacatcagtcaggatccccccaagcacaaggatagcggtacattaactttggggcttctcctgaggcctgagggtcttacttccgtgctggaactaggcccagaggcggaccagccagaagctgccaagttccggcagttttggggaagtcggtccgagctgagacgctttcaggacggagccatcagggaagccgttgtctgggaagccgccagcatgagccagaaacgtttaattccccaccaagtagttacgcatctgctggccttgcacgccgatatccccgagacctgcgtgcactacgtgggcggacccctcgatgccctgatccaggggctgaaagagacctcctcaactggcgaagaagcattagtggcagctgttagatgctatgacgatttgtcccgtctcctctggggcttagaaggcctgccccttaccgtcagcgcagtccagggagcacatcccgtgttgaggtacaccgaagttttccctccgacccctgtgcggccagcattcagcttctatgagactctgcgagaacggagctccctcctacctcggttggataagccttgtccggcatacgtagaaccaatgactgtggtctgtcaccttgagggcagcggacagtggcctcaggacgcagaagcggttcagcgtgtgcgagccgcctttcagctgcgattggccgagctcctgacacaacagcatggcctgcaatgcagagctactgccacccataccgacgtcctgaaagatggcttcgttttccggatccgtgttgcctaccagcgggagcctcagattttgaaagaggtgcagagtcccgaggggatgatcagcctgagggacacggccgcatcccttaggctggagcgggataccagacaactaccgctgttaaccagtgccctgcatggactccagcagcagcatccagcattctctggcgttgcccgcctggccaagcggtgggttcgggctcagctgctcggcgagggattcgccgatgagagcctcgatttggtcgcagccgccctttttttgcaccctgagccttttacccctccttctagtccccaagttggcttcctaaggttcctgttcctggtgtctacgttcgattggaaaaacaatccactcttcgtgaatctgaacaacgagctaactgtagaagagcaggtggaaattagaagtgggttcctcgccgctcgggcccagctgccggtcatggttatcgtcacaccccaggaccggaagaacagcgtttggacccaggacggacctagcgcgcagatactccagcagctcgtagtgctcgcagcagaggcattgcctatgctcgaaaagcagctaatggatccacgtgggcctggagatatcagaacagtattcagaccgcccctggatatttacgacgtgctgatcagattgagccctcggcatatcccacgacatagacaggccgtcgatagtcccgccgcttcattctgcagaggtttattgagccagccagggcctagttcccttatgccagttttgggatatgaccccccacaactgtacctgacacagctgagggaggctttcggggacctggccttgtttttttatgaccagcacggcggggaagtgatcggagtattgtggaagccgacaagctttcagcctcagccatttaaggcttcctccaccaaaggacgaatggtaatgtctcgcggcggcgagttggttatggtgcctaatgtcgaagcaatcttggaagattttgctgttctcggcgaaggactggtacagaccgtggaggcccgaagcgagaggtggactgtgtag

SEQ ID NO: 197886 - DNA, 3024 bp, synthetic construct
  misc_feature 1..3024: note = Description of Artificial Sequence: Synthetic coding sequence
  source 1..3024: mol_type = other DNA
atgggccccgcccccgccggcgagcagctgcggggcgccaccggcgagcccgaagtaatggaacctgcccttgaaggtacaggaaaggaaggtaagaaagcctcaagccgcaagcgcaccttagccgagccgcctgctaagggacttttgcagcccgtgaaactgtcccgagcagagttatataaggaacccacaaatgaagaactcaataggctgagggagaccgagattttgtttcacagctcgctgctcagactgcaggtggaggagctactgaaggaagtgcgactgagcgagaagaagaaggatcgaatcgacgcatttcttagagaggtgaaccaaagggtggtgcgagttccctctgtgcctgaaaccgaactgactgatcaggcatggctgccagctggcgtgagagtgcccctgcaccaggtaccatacgcagttaagggctgcttccgattcttgccgcccgcccaggtgaccgtggtgggatcctatctattagggacctgcatccggccagatataaacgttgatgtggccctgactatgccgcgggagattctccaggataaggatgggctcaatcagcgttatttcagaaagcgggcactctacctggcacacttagcacatcacctggcgcaagacccacttttcggctccgtttgctttagttacaccaatggctgtcacttgaagccaagcctcttgctgcgaccgcggggcaaggatgagagactcgtgaccgtgcgactgcatccatgcccgcccccggacttctttcgcccgtgccgactgttgcctacgaagaacaacgtgcggtcggcctggtaccgagggcagagcccagccggcgatggatcccccgagccccccaccccccgctacaacacctgggtgcttcaagacactgttctggagagccacctgcagctgttgtccactatcctgagctccgcacaaggcctgaaggacggcgttgcccttctgaaagtatggctgaggcagagggagctggataaggggcagggcggttttacgggtttccttgtgagcatgctggttgtgttccttgtaagcactaggaagatccacaccacgatgagcgggtatcaggttctgcgcagcgtgttgcagttcctggccacgaccgacttgaccgtaaatggcatctccctatgtctcagttcggatccatcacttcctgcgctggcagacttccaccaagccttttctgttgtgtttttagattcctcaggccacctgaatctgtgtgccgatgtgaccgcctccacataccatcaggtccagcacgaggcccgactgtctatgatgctgctcgactcccgcgccgacgacgggtttcacctgctcctcatgacacctaagcccatgatcagagcatttgaccatgtgcttcacctccggccgttgtctcgcttgcaggctgcctgccatcgtttgaagctctggcccgaactccaggataatggtggcgactacgtgtcggctgccttgggtcccctcaccaccctgctggagcagggactcggagctcgcctgaacctcctagcacattcccgccctcctgtcccagagtgggatatctcacaggatccacctaaacataaggatagtggcaccttgacactcggcctgctcctgagaccagaaggcctaacgagtgtccttgagctgggacccgaagccgatcagcccgaagctgccaagtttcgacagttctggggcagccgcagtgagctgcggaggttccaagacggtgccataagggaagccgtagtctgggaagctgctagcatgtcacaaaaacgcctgataccacatcaggtggtcacccacttgcttgccttacacgccgacattcccgagacgtgtgttcattacgtgggcgggccgctcgatgccctgatccaaggtctgaaagagactagtagcacaggagaggaagccctcgtggccgctgtgcgctgttacgatgacctctctcgcctcctctggggtctagaaggactgccgctgaccgtctccgccgttcagggagctcatccggttctcagatacacagaagttttcccccccactcccgttagacccgccttcagcttctatgagacgctcagagagaggtccagtcttctgccacgcctcgacaaaccgtgtccagcctacgtagagcccatgacagttgtatgccacctggaggggagtggtcagtggccccaggatgctgaggccgtgcagcgggtgcgagcagctttccaactgcgcttagccgagctgctaacccagcagcacggcctccaatgtcgggcaacagccacgcacaccgacgtgctgaaggatggtttcgtgtttagaattcgagttgcctatcagagggagcctcaaatcttaaaggaggttcagagccctgaagggatgatcagcctgcgagacacggccgcgtccttacggctggaaagagataccaggcagctgccgcttctgacctccgccctgcacggtctgcaacagcagcatccggctttctctggcgtggccagactagcgaaaagatgggtcagagcgcagcttctgggggaaggtttcgctgacgaatcgctggatctggttgctgctgcacttttcctccaccccgaaccgtttactcctccttccagcccccaagtgggatttctcagattcctgtttctggttagtactttcgactggaaaaataaccccctcttcgtgaacctgaataatgagctgacagtggaggagcaagtggagattagatccgggtttctggctgcaagggcccagctgccagtcatggtgatcgtgactcctcaagatagaaagaactccgtgtggacccaagatggtccaagcgcacagattctgcaacaactggtagtcctcgcagcggaggctctgcctatgctagagaaacagctcatggatccccgcggtcccggagacatccggtgggacccagccaaaatgtggcccttctag

SEQ ID NO: 197887 - DNA, 2100 bp, synthetic construct
  misc_feature 1..2100: note = Description of Artificial Sequence: Synthetic coding sequence
  source 1..2100: mol_type = other DNA
atgggccccgcccccgccggcgagcagctgcggggcgccaccggcgaaccggaagtgatggagcctgctctggagggaacaggaaaagaggggaagaaagcatcgagccgcaaaagaaccttggccgaaccacccgctaagggactgctgcagcccgtgaagctctctcgggcggaactttataaagagcctaccaatgaggaactgaaccgcctgagggagacggaaatactttttcactcgtcccttctgagactgcaggtggaagaactgctgaaagaggttcggttgagcgagaagaagaaggatcgaatagatgccttcctgcgggaggtgaatcagagagtcgtgcgcgtgcccagtgttcctgagactgagttgactgaccaagcttggcttcctgctggcgtgcgtgtgcctctccaccaggtgccctatgctgttaaggggtgctttaggttcctccctcctgcccaagtaacggtcgtcggaagctatttattgggcacctgtatccgacccgacattaacgtagacgttgccttgactatgcctcgcgagatcctccaggacaaggatggattgaaccagcgctatttccggaagagggctctgtatctagcgcacctggctcaccacttggcccaggatcctctgtttggatctgtgtgttttagctacacgaacggctgtcacctgaagccgagtctgctgctgaggccgaggggcaaggacgagcgccttgttaccgtaagattacatccttgccctccccccgacttttttagaccgtgcagattgctgcccactaaaaacaatgttaggtctgcatggtaccgtgggcagagtcccgccggagacggcagcccagaaccgcctactccccgttataacacctgggtgctgcaggacacagttctggagtcgcatctgcagctgttgtctacgatcctgagctccgcccagggtctcaaagacggtgtagctcttctcaaagtgtggctgaggcagagggagttggataaaggccaaggggggttcaccggcttcttggttagcatgttggtggtctttctggtgagcacccgcaaaatccacacaaccatgtccgggtaccaggtgctccgcagtgtccttcaattcttggccaccacggaccttaccgtgaatgggatctcattatgcttaagctcagacccaagtttgccggcactcgccgattttcatcaggcgttcagcgtggtgtttcttgactcgagcgggcacttgaatctatgtgcagatgtaaccgcaagcacctatcaccaagttcagcacgaggcaaggctttcgatgatgcttcttgactcccgagcggacgacgggttccaccttctgcttatgacacctaaacctatgatacgcgcttttgatcacgtgcttcatctgaggcccctgtctaggttgcaagcggcttgccacagactcaaactgtggccagagctccaggacaacggcggcgactatgtgtctgcggccttgggccccttgactacactattggagcagggcttgggtgcacgcctaaatttacttgcccactcacgcccaccggtgccagaatgggatatctcgcaggatccacccaaacacaaggattctgggaccttaaccctcggcctgctgctgaggcccgaagggttgacatcagttttagagctcggtcccgaggcagaccagccagaggccgccaagttccgacagttttggggctcacgcagcgagctgaggcgttttcaggatggagccatcagggaagcggtggtctgggaggccgcttccatgagccagaagagactgataccccaccaagtagttacccaccttctggctttacacgccgatatccccgagacttgcgtacactatgtgggaggaccactcgacgctttaatccagggtttaaaggaggcctcttccaccaagggccggatggttatgagtcggggcggtgaactcgtgatggtccctaacgtagaggctatcctcgaggactttgcagtgctaggggagggtttggtgcagaccgtggaagccaggtccgagcggtggactgtgtag

SEQ ID NO: 197888 - DNA, 603 bp, synthetic construct
  misc_feature 1..603: note = Description of Artificial Sequence: Synthetic coding sequence
  source 1..603: mol_type = other DNA
atggtgatcgtgaccccccaggaccggaagaacagcgtgtggacccaagacggcccatcagcccagatcctgcagcagctggtcgtccttgctgccgaggccctgccaatgctcgagaagcagctgatggacccgcgaggccctggcgacatcagaacagtcttccggccaccactggatatatacgacgtgctgatacgattgtcacccaggcatatcccccgacatagacaggcagtagactcccctgcggcttctttttgcagggggctgttatcacagcccggaccatcaagcctgatgcccgtgcttgggtatgatccaccacaactgtacctgacccagctgcgtgaggccttcggggacctggctctgttcttctacgatcagcatggaggggaggttatcggagttctgtggaaaccgacgagtttccagcctcaaccattcaaggcaagtagcaccaagggccgcatggtcatgtcgagagggggcgagctggtgatggtgcctaatgtagaagcgatcttagaagactttgctgtattgggcgaaggcctggtacaaaccgtcgaagcccggtccgaacgatggaccgtatag

SEQ ID NO: 197889 - DNA, 3072 bp, synthetic construct
  misc_feature 1..3072: note = Description of Artificial Sequence: Synthetic coding sequence
  source 1..3072: mol_type = other DNA
atgggccccgcccccgccggcgagcagctgcggggcgccaccggcgaaccagaggtgatggagcctgccttggagggtacaggaaaggagggtaagaaagctagctcccgcaagcgcactctcgcggagccacctgccaagggccttctccagcccgtgaagctgtcccgggcagagctttataaagagcccactaacgaggagctgaatcgattgagagagactgaaatactgtttcattcctctctgcttcgactccaggttgaagagctgctgaaagaggttaggctatctgaaaagaaaaaggataggattgacgcctttttgcgggaggttaatcagcgggtcgtccgagtgcccagcgtgccagagacagaactgacagatcaggcctggctccccgctggggtccgagtccccctacaccaggtgccgtatgccgttaaaggttgctttcgattcctgccacctgcccaggtgacagtagtagggtcttacctcttgggcacatgcattcgcccagatatcaacgtggacgtggccctaaccatgccccgcgagatcctgcaggataaagacggcctcaaccagcgatacttccgaaagagagccctctatctggcccatttggcacatcatttggctcaggaccccctattcggatctgtttgtttcagctacacaaatggatgccacttgaaacccagcctactcctgcggccaagggggaaggatgaaaggctggtcaccgtgaggctccacccttgtcccccaccagatttcttccgcccttgccggctgttgcccactaaaaataacgtcagatctgcttggtatagggggcagtcccccgccggggatggttcaccggaacctcctacgccacggtataacacctgggtgctgcaggacacagtgctggaatcccacctccagttattgtccaccattctatcttcagcccaggggttgaaggatggcgtggcactgcttaaggtatggctacgccagcgggaattggataagggtcagggtggttttactgggtttctggtaagcatgttggtggtgtttctagtctctactaggaagattcatacaacgatgtcaggttaccaggtactgcgaagcgttctccaattcctagcaacaaccgacctgacagtcaacggcatcagtctgtgcctcagctcagatccaagcttgcctgcattggccgacttccatcaagcattttccgtggtatttttagactcctctgggcacctgaacctttgcgccgacgtaacagcttcaacgtatcaccaagtgcagcatgaagcgagacttagcatgatgctgctagactcacgagcagatgatggattccaccttctccttatgaccccaaagccaatgatccgggctttcgaccacgtgctccacttacgtccactgtccaggctgcaagcagcctgtcacaggctgaaactctggcccgaattgcaggataacggtggtgattacgtgtcagcagccctgggtcccttgaccaccttgctcgagcagggcctcggtgctcgcctgaaccttttggcccactcccgacccccggtgcccgaatgggacatcagtcaggatccacctaagcataaagacagtggcaccctgactctgggtctgctactgagaccggaaggactcacctctgtgctagaacttgggccggaggctgaccaacccgaggccgcaaaatttcgtcagttttggggatcacggagcgagttacgtcgctttcaggacggggcaatccgcgaggctgtagtatgggaagccgcctccatgtcacagaaaaggctcattccacaccaagtggtcactcatctattagcccttcacgccgatatcccagagacctgtgtgcactatgtcggagggccactggacgctctgatccagggcctcaaggagacgagttctactggcgaagaggccttagttgcggctgttagatgctatgatgatttgtctcgcttgctgtggggattagaggggctacccctcactgtaagcgccgtccaaggcgctcacccagttctgcggtacacagaagtgtttcccccaaccccggtaaggccagccttttcgttttatgaaacattgagggaacgctctagccttctgccccgcctcgacaaaccatgccctgcatacgtggagcccatgactgtagtctgccatctggaaggatctggtcaatggcctcaggatgcggaggctgtccagagggtccgtgcagcgttccagcttagactcgccgaactcttgacgcaacagcatggcctacagtgccgtgcaactgccacccacactgatgtgctcaaggacggcttcgtatttcggattagggtggcataccagagggagccgcagatcctgaaggaggttcagagcccagaaggcatgataagtcttcgagataccgccgcaagcctccggctggagagggataccagacagctgcctctgctcacgagtgccctgcacgggctgcaacagcagcacccagcattctccggtgtagcaagactggcgaaacgatgggtgagagctcagctgctaggcgaaggctttgcggacgagtcgctcgatctcgtcgcggccgcccttttcctccacccagagccatttacacccccaagtagcccccaagtaggattcctgcgatttctgttcctagttagcaccttcgattggaagaacaacccattgttcgttaacctaaataacgaacttacagtcgaggagcaggtggagattcggagcggcttcctggcggcaagagcacaactgcccgttatggtcatcgtcactccacaggaccgtaaaaatagcgtgtggacacaggatggcccttccgcccagattcttcagcagctggttgttctagcagccgaggcgttgccaatgctcgaaaagcagctaatggatccccgggggccaggagatattaggatgggaccctcagaaaatgttgctttactctctcatataactgataccgaacagtggaaaggggccatctgtgtatag

SEQ ID NO: 197890 - DNA, 3285 bp, synthetic construct
  misc_feature 1..3285: note = Description of Artificial Sequence: Synthetic coding sequence
  source 1..3285: mol_type = other DNA
atgggccccgcccccgccggcgagcagctgcggggcgccaccggcgaacccgaggtcatggaacccgctctcgaaggaaccggcaaggagggcaagaaagctagctcacgtaaaagaaccctggctgagcccccagccaaagggctactgcagccagtgaaactatcacgggccgagctctacaaagaacccacaaatgaggagcttaatcggcttagggaaaccgaaatcttattccacagctccctactgcgtctccaggtggaagaattgctgaaagaggtgagactgagcgagaagaagaaggacaggatagacgcattcctcagggaggtcaatcaacgtgtagtcagggtcccctccgtaccggagactgaggagattttacaggataaagatggattgaatcagagatactttagaaaaagggctctgtacctcgcacacctggcgcatcacctggcccaggaccccctgtttggatctgtgtgtttctcgtacaccaatggctgtcacctgaaaccatccttactgctccgacctagaggcaaggacgagcgcctggttactgtccggctgcacccctgtccgccccctgatttcttccgcccttgtcggctacttccgacgaagaacaatgtgagaagtgcttggtatcggggccaatccccagcaggggatggatccccagagccccctaccccacggtacaacacatgggtcctgcaagataccgtcctagaaagccatctccaacttttaagcactatcctgagttctgcgcagggacttaaagacggcgttgccctgctgaaggtgtggctgagacaaagagaactggacaaagggcagggcggtttcaccggatttttggttagcatgttagtggtgtttctggtctcgaccaggaagatccacacaacaatgagcgggtaccaggtgcttcgtagtgtcctgcagtttctcgcaaccacagacttgaccgtgaatggcattagcctgtgcctgagcagtgacccctcactccccgctcttgccgatttccatcaggcgttcagcgtcgttttcttagattcgagcggccacctgaacctctgcgctgacgtgacagccagtacatatcatcagggatggtcccttctgtggctgcaggtccagcacgaggctcgcttgtccatgatgctgttagacagcagagcagacgatggattccacttgttattaatgactcccaaaccaatgattcgagcctttgatcatgtactgcaccttaggcccttgagtaggttgcaagcggcctgccatcgattgaaactttggccagagctgcaggataatgggggcgattatgtatccgctgccctcggccctctaacgacacttctggagcaagggctgggtgccaggctgaatctgctcgctcactcacgaccgcctgtgccagagtgggatatttctcaggatcctcctaagcacaaagactccggcacactcacactcggcctgctgctccgcccagagggactgactagcgtgttagaactgggacctgaggccgatcaaccagaggcagctaagtttaggcaattctggggctcccgctctgagctccggcgctttcaggatggcgctattagggaggcagttgtgtgggaagcagccagtatgtcacaaaagaggctaatcccccaccaagtcgtcacacacctcctcgctctgcacgcggacatccctgagacctgtgtgcactacgtcgggggccctctggacgccttgatccagggtctgaaggaaacgtccagcacaggagaggaagcgctggttgctgcagtgaggtgctacgacgacctgagccgactcctttggggcctagagggcctcccattgaccgtaagtgccgtccaaggcgcccatccagtgttacgctataccgaagtctttcctcctacaccagtcagacctgccttcagtttctatgagactctgagagagaggtctagcctactccccaggttggataagccatgcccagcttacgtggagcctatgaccgtcgtctgccaccttgagggttcaggccagtggcctcaggatgccgaggctgtgcagagagtgcgcgccgccttccaattgcgcctcgccgagctgcttacacagcaacacggactgcagtgtagggccaccgctacacacactgacgtgctgaaagatgggttcgtgtttagaatccgagtggcctatcagagggagccccagattctgaaggaagtacaatcgcctgaagggatgattagtctcagagatactgccgccagtcttcgtctggaacgtgatactagacagcttccactactcacaagcgcgttacacggattacagcagcagcaccccgcctttagtggggtggcacgtctggctaaacgttgggtaagagcccagctcttaggtgaaggcttcgctgatgaaagcctggacttggtggctgctgccctgttcctgcacccagaacctttcactcctccttcttcaccgcaggtgggttttctgaggtttttgttcctggtatccaccttcgattggaaaaataatccgctcttcgttaaccttaataacgagttaacggtcgaggaacaagtcgagatcagatcgggctttctagccgcccgagcccagctcccagtgatggttattgtgactccccaggataggaaaaacagcgtgtggacccaggacggcccctctgcccagatcctgcagcagctcgtggtcctagcagccgaggctctaccaatgctggagaagcagttgatggatccacggggtcctggagacatcagaacagttttcagaccaccactcgatatctatgatgtcttgattagactgagccctcgccatattccaagacatcggcaggccgttgacagtccggccgcttccttctgccggggcttgctgagtcaacctggcccttcgtccctcatgcccgtcctgggctatgacccgcctcaactgtacctgactcagttacgggaagccttcggagaccttgccctttttttctatgaccagcatgggggtgaagttataggcgtcctctggaaaccaacgtcctttcaaccccagcccttcaaggcttcttccaccaagggcaggatggtcatgagccgaggtggagagctggtcatggtgcctaacgtggaggcaattttagaggattttgctgtcctgggggaaggtttggtgcaaactgtggaggcccgatcggaacggtggaccgtgtag

SEQ ID NO: 197891 - DNA, 2109 bp, synthetic construct
  misc_feature 1..2109: note = Description of Artificial Sequence: Synthetic coding sequence
  source 1..2109: mol_type = other DNA
atgatgctgctggacagccgggccgacgacggcttccacctgctgctgatgacacccaagcccatgatccgggccttcgatcacgtcctccatctgcgacccctctccagactgcaggctgcatgccaccgcctgaagttgtggccggagctgcaggacaacgggggggactacgtgagtgccgctctgggcccccttaccactctgttggagcaagggttaggcgctcggctgaaccttctcgctcattccaggccacccgtgcccgagtgggatatatcccaagaccctccgaaacataaagatagcggaaccttaaccctcgggctcctgttgcggcccgaggggctgacctcggtcctcgagctgggacctgaggccgaccaacctgaggccgcaaagtttagacagttctggggtagtcggagcgaactcagaaggtttcaggacggagccatccgcgaggctgtggtgtgggaggctgctagcatgtctcagaaaagactaatcccacaccaggtcgtgacacacctattggcactccatgccgacatcccggagacatgcgtgcactacgtgggtggtcccttggacgcactgatccagggcctaaaggaaacctcctccacgggtgaagaggcattggtggcagccgttagatgctatgatgatttgagcagactcctgtggggcttagaaggcctgccacttacggtgtctgctgttcagggggcacaccctgtgttgagatacaccgaggtattcccccccacccctgtccggccggcgttctccttttatgagaccctgcgggaacggtcatccttgctgcccagactggacaagccctgtcccgcgtatgtagagcccatgactgtcgtctgtcacttggaggggagcggacagtggccccaggacgccgaggccgtgcagcgggtgagagccgccttccagctgcggctcgccgagctcctgacccagcaacatggcctgcagtgtagagcgactgctacgcatacggacgtgctgaaggacggcttcgtgttcagaattcgagtggcatatcagcgggagcctcagatccttaaggaggtgcaatccccagagggcatgatatccctgcgcgacactgccgcgagcctccggctggaacgggacacccggcaacttcccctgctgacatctgctctgcacggactacaacaacagcaccctgccttctcaggggtggcccgcctggccaagaggtgggttcgggcacaattgttgggtgaaggcttcgccgacgagagccttgatctagtagccgccgcgctctttctccaccctgagccttttacccccccatccagcccacaagtgggctttctgagattcctgtttctcgtgtctacttttgactggaaaaacaacccattgtttgttaatctgaataatgaactgacggttgaagagcaagtagaaatccgttctggatttctggcggcgagggcccagctgcccgtgatggtaattgtaacacctcaggacaggaaaaactcagtctggacccaagatggcccctccgcacaaattctgcagcagttagtggtcctggcagccgaagcactcccaatgctcgagaaacagttgatggacccgcgggggcccggagatattaggaccgtgtttcgtccacccctcgatatctacgatgtcctcattaggctctcccctcgtcacattcccaggcatcgccaggccgtggactccccggctgcatcattctgcagaggactgctctcccagccaggaccgtcttctttgatgccagtgctaggatatgatccgccgcagctgtacttgacacagcttcgagaagctttcggcgacctggcactgttcttttatgaccagcacggcggggaagtcataggtgtgctctggaagcccaccagtttccaaccgcagccattcaaagcctccagcactaaaggcaggatggttatgtctcggggcggcgaattggtgatggtgcccaacgtcgaggcgatactcgaggactttgccgttttgggcgaaggcctggtgcaaaccgtcgaagcccgctctgaaaggtggacggtgtag

SEQ ID NO: 197892 - DNA, 645 bp, synthetic construct
  misc_feature 1..645: note = Description of Artificial Sequence: Synthetic coding sequence
  source 1..645: mol_type = other DNA
atgaacctgagcagcgccagcagcaccgaggagaaggccgtgaccaccgttctttggggatgcgaattgtcccaagagcgaagaacttggacttttagaccacagttggaggggaagcagagttgtagactcctgctgcatactatttgcctgggcgaaaaagctaaagaagaaatgcaccgggtggaaattctgccgcctgccaaccaggaggataaaaagatgcaacccgtaacgattgctagtctgcaggcgagtgtcctgcccatggtgtccatggtcggtgttcagctgtctccacctgtgacatttcagctacgggccgggagcggacctgttttcctaagtggtcaggaacgatatgaggcatcagacctcacttgggaagaagaggaagaagaggaaggagaagaagaggaagaagaggaagaggatgatgaggacgaagatgctgacattagccttgaagagcaatctccagtaaagcaggttaagagactcgttcctcagaagcaggcatctgtggctaagaagaagaaactcgagaaggaggaggaggaaatccgcgcatcagtgcgggacaaaagccccgtcaaaaaggcaaaagcaaccgcacgagctaaaaaacctggctttaagaagtag

SEQ ID NO: 197893 - DNA, 411 bp, synthetic construct
  misc_feature 1..411: note = Description of Artificial Sequence: Synthetic coding sequence
  source 1..411: mol_type = other DNA
atgaacctgagcagcgccagcagcaccgaggagaaggccgtgaccaccgtcttgtggggatgcgagctatcgcaggagagacggacatggacctttcggccacagctcgagggcaaacagagctgtcggctgctgctccatactatctgcctcggagagaaggccaaggaagagatgcatagagtggagattctcccacctgcaaatcaggaagacaaaaagatgcagccagtgacgatcgcgagcctgcaggcttcggtgcttccaatggtttctatggttggagttcagctttcaccacccgtgacgttccagctgagggctggatctggacccgtcttcctttccggtcaggaacgatatgaaaagaaggcaggcaagaggagacgaggtaataagagccagagatag

SEQ ID NO: 197894 - DNA, 645 bp, synthetic construct
  misc_feature 1..645: note = Description of Artificial Sequence: Synthetic coding sequence
  source 1..645: mol_type = other DNA
atgaacctgagcagcgccagcagcaccgaggagaaggccgtgaccaccgtcctgtgggggtgtgagctcagtcaagagaggaggacgtggaccttccggcctcaactggaagggaaacagtcatgcagactgctgcttcacacaatctgcctgggtgaaaaagctaaagaggagatgcaccgtgtcgagattctccccccggcaaatcaggaggacaaaaagatgcagcctgtgacaatagcttcgttgcaggcctctgttctgcctatggtgagcatggtcggtgtccagttgtccccaccagtgacgttccagctgcgcgccgggtccggccccgtttttctgtcaggtcaggagaggtacgaggcttcagacctaacttgggaggaagaagaggaggaagagggagaggaggaggaggaggaggaggaagacgacgaagatgaggacgcagatatatccctggaggaacaaagcccagttaaacaggtcaaaaggcttgtcccgcaaaaacaggcttcagtcgcaaaaaagaaaaagcttgaaaaggaggaagaagaaatcagagccagtgttcgggataagagtccagttaaaaaggctaaggccacggctcgtgcaaagaagcctgggttcaaaaaatag

SEQ ID NO: 197895 - DNA, 645 bp, synthetic construct
  misc_feature 1..645: note = Description of Artificial Sequence: Synthetic coding sequence
  source 1..645: mol_type = other DNA
atgaacctgagcagcgccagcagcaccgaggagaaggccgtgaccaccgtgctgtggggttgcgagttgtcccaggagcgccgaacttggactttcaggccccagctcgagggaaagcagtcttgcagactcctgttacacacaatctgtctaggcgaaaaagcaaaggaggagatgcatcgtgtggagatccttccccccgccaaccaggaagataaaaagatgcagcccgtgacaatcgcgagcctgcaggccagtgtcctaccaatggtgagcatggtgggtgtgcagctatctcctcctgtcacatttcagttacgcgccggatcaggcccggtgtttctgtcaggacaggaacgttacgaagcgtccgaccttacctgggaggaagaggaggaggaggaaggcgaagaggaagaagaagaggaagaggacgatgaggatgaggacgccgatatcagcctggaagagcaatctcctgtgaaacaggtgaaaaggcttgtcccacagaagcaggccagtgtcgcaaaaaaaaagaagctcgagaaggaagaggaggaaatacgagcttctgtgcgggataaaagcccggtgaagaaggccaaggctaccgcacgcgccaaaaaacccggctttaagaaatag

SEQ ID NO: 197896 - DNA, 645 bp, synthetic construct
  misc_feature 1..645: note = Description of Artificial Sequence: Synthetic coding sequence
  source 1..645: mol_type = other DNA
atgaacctgagcagcgccagcagcaccgaggagaaggccgtgaccaccgtgctatggggctgtgagctgtcacaggagcggcgcacatggacatttagaccacagctggaagggaagcaatcttgccggttgctgctgcatacgatatgcctgggcgagaaagcaaaagaggaaatgcaccgggttgaaattcttcctccagccaaccaagaggacaagaaaatgcagcccgtgaccatcgcttccctccaggcatctgtcctgcccatggtctcgatggtgggtgtgcaattgagtccccctgtgacctttcagctccgcgccggctcaggcccagtgttcctctccgggcaggagcggtacgaagcctctgatctaacttgggaggaagaagaggaggaggagggggaggaggaggaggaagaggaggaagatgacgaggacgaggatgccgacatatccttagaggagcagtctcctgttaaacaggttaaaagattagtgccccaaaaacaagccagtgtggctaagaagaaaaaactcgagaaagaggaagaagagatccgggcatctgtccgagacaagagcccagtaaaaaaagccaaagccactgcccgcgcaaagaagcctggcttcaagaagtag

SEQ ID NO: 197897 - DNA, 537 bp, synthetic construct
  misc_feature 1..537: note = Description of Artificial Sequence: Synthetic coding sequence
  source 1..537: mol_type = other DNA
atggccgccggcaccgccgccgccctggccttcctgagccaggagtcacgaactcgggccggtggtgtgggtggcctgcgtgttcctgctcccgtgactatggactcctttttctttgggtgtgagctgagtggtcacacccgaagctttacatttaaagtggaggaggaagatgacgcggagcatgtcttggcgctgaccatgttatgtctgaccgaaggggcaaaagatgagtgcaacgtcgtcgaggtggtggccagaaaccacgaccaccaggagatagcagtgcccgtcgctaacctgaaactgtcatgccaaccaatgttgtctctggacgacttccaactccagccacctgttacttttcggctgaagtctgggtctggaccagttagaataaccggccgccatcaaatcgtaacaatgtctaatgacgtcagcgaggaggagagtgaagaggaagaagaagattctgacgaggaggaagtcgagctgtgcccaattttacccgcaaagaagcaagggggtcgcccctag

SEQ ID NO: 197898 - DNA, 501 bp, synthetic construct
  misc_feature 1..501: note = Description of Artificial Sequence: Synthetic coding sequence
  source 1..501: mol_type = other DNA
atgaagtacaccagctacatcctggccttccagctgtgcatcgtgctggggtcactcgggtgctactgccaggacccgtacgttaaagaagccgagaatcttaaaaagtactttaatgcaggccatagtgacgtagccgataacggtacactcttcctgggaatcttgaagaattggaaagaggagagtgacaggaagattatgcaatctcaaatagtgtccttttacttcaaattgttcaagaacttcaaggacgatcaaagcatacagaaatcagtagagaccataaaagaggacatgaatgttaaattctttaactccaataagaagaaacgggacgacttcgagaagctcacgaattacagtgtcacggacctgaatgttcagcgaaaagctatccatgaacttatccaagtgatggctgagctatctcccgctgccaagactggcaaaaggaaaaggagccagatgctgttccggggcagacgagctagtcagtag

SEQ ID NO: 197899 - DNA, 2061 bp, synthetic construct
  misc_feature 1..2061: note = Description of Artificial Sequence: Synthetic coding sequence
  source 1..2061: mol_type = other DNA
atgagcatgttcagcgacttcctgcagagcttcctgaagcacagcagttccactgtgttcgatctggtggaagagtatgaaaacatctgtggttcccaggttaatatcctaagtaagattgtttcccgagccacacctgggttacagaagtttagcaagactgccagcatgctctggttgttgcagcaagagatggttacatggaggttgctagcaagcctctaccgggatcgcattcagagtgctctggaagaagaatctgtatttgctgtaacagcggtcaacgcctctgagaagacagtagtggaagccctcttccagagggacagcctggtgagacagtcccagctggtggtggattggctggagtcgatagccaaggacgaaataggagagttcagcgacaacatcgagttctatgctaagtctgtgtactgggaaaatacgctccacacccttaaacaaaggcagctgacaagctacgtgggctccgttagacccctggtcacagagctggacccagatgcacccatccggcagaagatgccactggatgaccttgacagggaggacgaggtaaggctgctaaagtatttgtttactctcattcgcgccgggatgactgaagaggcccagcgcctctgtaagcgctgcggacaggcctggagagctgccaccctggagggatggaaactctaccatgatcccaacgtcaacggcggtaccgagcttgagcccgtggaaggcaacccataccggcgcatctggaagatctcgtgctggaggatggcagaagatgagctctttaaccggtacgaacgcgcgatttatgctgccctgtccggaaacctcaagcaactgctccctgtgtgtgacacatgggaggacactgtctgggcctatttcagggtgatggtcgatagtcttgtagaacaagagatccagaccagcgttgcaacattggatgagaccgaggaactccctagggagtatcttggggccaactggacactagaaaaagtgttcgaggagctccaggccactgacaagaaaagggtcctcgaagagaaccaagaacactaccacatcgtgcagaagttcttgatcttaggcgacattgacgggctgatggatgagttttcgaagtggctctcaaagtccaggaataaccttccaggccatttgttaaggtttatgacgcatctgattctgttcttccgcaccctcggcctgcagacaaaggaggaggtttcaatagaagtgttgaagacttatatccaggaagaccgcttaaaaatcgacgtgatcgattggctggtatttgatcctgcacagagggcagaagctttgaagcagggaaatgccattatgcgcaaattcctggccagcaaaaagcacgaggcggccaaagaagtgttcgtcaagatcccacaggattccattgccgagatttacaaccagtgtgaggagcagggcatggaatcacccttacccgccgaagacgacaacgccatccgtgaacatctatgcataagagcgtacttggaggcgcatgaaacattcaatgaatggtttaagcacatgaatagtgtgccccagaagccagcccttattccgcagcccacgtttacagagaaagtggcacacgagcacaaggagaagaagtacgaaatggattttgggatctggaagggccatctggacgcactaactgccgacgtgaaagaaaagatgtacaacgtccttcttttcgttgacggcggttggatggttgatgtcagagaggacgctaaagaggaccacgaaagaactcaccagatggtgctactgcggaaattatgtcttcctatgttgtgtttcctgttacatacaatcctgcatagcactgggcagtaccaggaatgcctgcaactcgctgatatggtctcgtcagagaggcacaagctgtatttggtgttctcaaaagaagaactgaggaagcttctgcagaaactgcgtgagtctagcctgatgctgcttgatcagggacttgacccactcgggtacgagatccaactgtag

SEQ ID NO: 197900 - DNA, 2691 bp, synthetic construct
  misc_feature 1..2691: note = Description of Artificial Sequence: Synthetic coding sequence
  source 1..2691: mol_type = other DNA
atgaagatcctggtgatcctgcaccaggagacccggctgagcctggaactgctcgcccattttgacagtttggtgctgagcaccaacttgctgttcattgtaacccccacgtcgcgatcactgctgcggcagcctgatatatcctgtatattgggtaccggaggaaaaagcccgcgcctgacacaaagctccggctttttcgggaacctgtctatggttaccaacttggacgacagcaactgggcggccgctttcagctcacagagaagcggcttgtttactaatacagagccccactccattacggaggatgtcacaatttctgcggtcatgttgagggaagacgatccaggggaggcggcctccatgtcgatgtttagcgattttctgcagtcttttctcaagcacagcagcagcacagtgtttgatctggtggaggaatacgagaacatttgcggatcacaagtcaacattcttagcaaaatagtgagccgggccaccccaggactgcagaaattctccaaaaccgcgagcatgctctggctcctgcagcaagagatggttacgtggagactgttggccagcctctatcgggataggatccagagcgccttggaggaagagtctgttttcgccgttacggccgtgaacgcgtcggagaagactgtcgtggaagccctttttcaacgagacagtctggtgcggcaaagtcagctcgtggtggactggctggagagcatcgcaaaggacgagatcggagagttcagtgacaatatcgagttctacgccaagagcgtgtattgggaaaatactctgcacacacttaagcagagacagcttacttcgtacgtcggctcagtgagaccactcgtgacagaattggacccggatgccccgatccgccagaagatgcctctcgatgacctggatagggaagacgaagtgaggctgttgaaatatctcttcacgctgatcagggcaggtatgaccgaggaggcccaaagactctgtaaacgatgcggtcaggcatggcgagccgcgaccttggagggctggaagctctaccacgatccaaacgtaaacggaggtaccgagctcgagccagtcgagggcaatccctaccggcggatttggaagatttcatgttggcgcatggccgaagatgaactatttaatcgatacgagagggccatttacgcagccctgtcaggtaacctgaagcagcttttgccagtctgcgacacttgggaagacacagtgtgggcgtactttcgcgtcatggtggatagcttggtggagcaagagattcagacaagcgtcgccaccctggatgagacagaggagctgccacgggaataccttggcgccaattggaccctcgagaaggtgttcgaggagttgcaagcaacagataaaaagcgcgtactcgaagagaaccaggaacattatcatatcgtccagaaatttctaatactaggagacatcgatggtctgatggatgaattttcaaagtggttgagtaaatcccggaataatctccctggccacctcctgcgctttatgacccatctcatcctgttctttcggaccctgggtctccagactaaagaggaagtgagtattgaggtgctgaagacctacatacaactgctgataagagagaaacacaccaacctcatagcattttatacttgtcatctgcctcaggacctagcggtagctcagtacgccctgttcttggagtctgttacggagttcgagcagcgccatcactgtctggagcttgctaaggaggccgatctcgatgttgcgactattactaaaaccgtcgtggaaaacatccgtaagaaagataatggtgagttctctcaccatgaccttgccccagccctggataccggcactactgaggaggatcggctgaaaatcgatgttatagactggcttgtcttcgatcccgcgcagcgtgctgaggctttaaagcaggggaatgctatcatgaggaagtttcttgcttctaagaaacatgaggccgcaaaagaagtgttcgtaaaaatcccacaggacagcatcgctgagatctacaaccagtgtgaggagcagggaatggagagtccactcccagcagaagacgacaatgccattagggagcatctgtgcatccgggcctatttagaggctcacgagaccttcaacgaatggtttaaacacatgaactccgtccctcagaagccagccctgatcccccagccaacgttcaccgaaaaagtggcacacgaacacaaggaaaaaaaatatgaaatggatttcggtatatggaaagggcacctcgatgctctaactgctgacgtcaaggagaagatgtataatgtcttactgttcgtcgacggcgggtggatggtggacgtcagagaggatgctaaagaggatcacgaacgaacccaccagatggtgctactgaggaaactttgcttaccaatgctgtgttttcttttgcataccatcttgcacagtacagggcagtatcaggagtgcctacagctggcggacatggtgtcatcagagaggcataaactatatcttgtcttttcaaaggaagagttgaggaaattgcttcagaaactcagagagagtagtctcatgctgttagatcagggcttggatcctctggggtacgaaatacagctctag

SEQ ID NO: 197901 - DNA, 3471 bp, synthetic construct
  misc_feature 1..3471: note = Description of Artificial Sequence: Synthetic coding sequence
  source 1..3471: mol_type = other DNA
atgttccccgccgcccccagcccccggacccccggcaccggcagccggcggggccccttagcaggattagggcctggctcaaccccgagaacagcctcacgcaaggggctccccctcggtagcgctgtaagtagtcccgttcttttctcccccgtgggaaggagaagctctctgtcttctcgtggaaccccgacccggatgtttccacatcactctattaccgagagtgtgaattatgacgtgaagaccttcggctcaagcttgccggtgaaggtgatggaggctcttactcttgctgaagtcgatgatcagctgaccatcaacatagatgagggaggatgggcttgtttggtgtgtaaggaaaaactcatcatctggaagatcgctctgtcacctatcaccaaactctcagtctgcaaggagctgcaactcccgccctcagatttccattggtctgccgatctggtggctctgagttactcctcccccagcggggaggcacattcaacccaggccgtggcggttatggtcgcgactagagaggggagtattaggtactggccatctctcgcaggcgaggacacatacactgaagcattcgtggacagtggcggggataaaacttacagcttcctgacagccgttcaaggaggctcttttattttaagctctagtggatcccagctgattcgacttattcctgaaagctccgggaagatccaccagcacattcttccccagggacagggcatgctgagtggtatcggtaggaaagtatcatcgctgttcggaatcctgtctccgagtagtgacctgacccttagtagcgtcctgtgggaccgagagaggtcttcattctattcacttacatcgagcaatatctctaagtgggaactggacgacagcagcgaaaagcatgcttactcctgggatatcaatcgtgccctaaaggaaaacattaccgacgcgatctggggcagcgaaagcaactacgaagcgatcaaagaaggagtgaacatacgctatttagacctcaagcagaattgcgatggactcgtaatcctagctgctgcgtggcacagtgctgacaacccatgcttaatttactattcactgattactatcgaggataacgggtgtcagatgtccgacgccgtaacggttgaagtgactcagtacaaccctccatttcagagcgaggatttgatcctttgtcagttgacggtgcctaatttttcgaaccaaactgcctatctgtataacgagagcgccgtttacgtgtgctctactggaactggcaagttttcactgccacaggaaaagattgtatttaacgctcagggcgatagtgtgctgggcgccggtgcttgcggcggcgtccccataattttctccagaaatagcgggctggtttccatcacatcacgcgaaaatgtctcaattcttgcagaagacctggaaggttcactcgcctcttccgttgcgggacctaacagcgaaagtatgatttttgaaaccaccactaaaaacgaaacaattgcccaagaagacaagataaagctgctaaaggctgctttcctgcagtattgtcgtaaggatctgggccatgcccagatggtcgtggacgaactttttagctctcattccgacctggacagcgatagtgaactcgatcgagccgtgactcagattagcgtggatctgatggacgactacccggcctctgaccctaggtgggcggagtctgtgcccgaggaggctcctgggttctcgaacaccagcctgatcatcctgcatcagttagaagacaagatgaaggctcatagctttttgatggactttatccaccaagttgggctctttgggagacttggtagcttccccgtgcggggaacacccatggcaacaaggctgctgttgtgcgaacatgctgagaagctttctgctgccatcgtcctgaaaaaccatcattcgagattgtccgatctcgtgaacactgctatcttaattgctcttaataaaagggaatacgagatcccttccaatttaactcctgccgacgtattctttagggaagtgagtcaggtcgataccatctgcgagtgtttactggaacatgaagaacaagtcctaagagatgcccctatggattcaatagagtgggccgaggtggtgatcaacgtcaacaacatactcaaagacatgctacaggccgcctcacactatagacagaatagaaacagcctctatagaagagaggagagcctcgaaaaagaacccgaatacgttccatggacagcaacgtcaggaccaggggggatccgcacagtaattattcgccagcatgaaattgtgctcaaggtcgcctaccctcaggccgactccaatcttagaaacattgtcacagaacagttagtggcattaatcgactgcttcctcgacggctatgtgtcacagctgaagtcggttgataagagcagcaaccgggagaggtatgataacctcgagatggaatatctgcaaaaacgctctgacctgctgtctcctttgctctcgctgggtcagtatttgtgggccgcatctctcgccgaaaagtactgtgacttcgacatcctggtacagatgtgtgaacagaccgataatcagagcaggttgcagcggtacatgacacagtttgcagaccagaacttttcagatttcctttttcgctggtatcttgaaaagggcaagagagggaaacttctttcacagcctatctcacagcatggtcaactggccaactttctgcaagctcatgagcatctcagctggctgcacgaaattaatagccaagagctcgagaaggcccatgcaactctgctggggttagccaacatggagacgcgctactttgccaaaaagaagactttgctgggtctgtcaaagctggccgctcttgctagcgatttttccgaggatatgctgcaggaaaaaatcgaggagatggccgagcaagagaggtttctactccaccaggaaactctgcctgaacaactgctggctgagaaacagttaaatctttcagccatgccagtgctaacggcaccccaactcattggactatatatctgtgaggagaatcggagggcaaacgaatatgatttcaagaaggctttggatctgctagaatacattgacgaggaagaggacatcaatattaacgatctgaagttagaaatcttgtgcaaagcgcttcaaagagacaactggtcgagctccgacggaaaagacgacccaatcgaggtctccaaagattcaatttttgtcaaaatactgcagaagctccttaaggacggaatccaactttccgagtacttgccagaggtgaaggatctccttcaagccgatcagctcgggagcctgaagagcaacccctatttcgagttcgtcctgaaggcaaattacgaatattacgttcagggtcagatctag

SEQ ID NO: 197902 - DNA, 675 bp, synthetic construct
  misc_feature 1..675: note = Description of Artificial Sequence: Synthetic coding sequence
  source 1..675: mol_type = other DNA
atgttccccgccgcccccagcccccggacccccggcaccggcagccggcgtggtcccctcgctggcctgggacctggctccacgccccggactgcctcacgtaaaggtctgccattaggatccgccgtatcgtcaccggtgctcttctcacccgtgggaagacggtcatcgctctcatctagggggactcctactcgtatgttcccccaccacagcattaccgagtcagtcaactacgacgtgaaaacatttggatccagtctgcccgtgaaggtgatggaagcactgaccctggccgaggtagatgatcagttaactatcaacattgacgaaggaggctgggcatgtctcgtgtgtaaggaaaagttgatcatctggaaaattgcccttagcccgatcaccaaactgagcgtgtgtaaagaactgcagctgcccccctcggatttccactggtcagcggacttagtggctctgtcgtatagctccccttccggcgaagcacatagtactcaggcagtggccgttatggtcgccaccagagaggggtccatccgatactggccaagcttagcaggggaggatacttatactgaggcatttgtcgacagtggaggggacaaaacttattctttcctcaccgcggtgcaggtgcataaggaaacaaagtctggctag

SEQ ID NO: 197903 - DNA, 3207 bp, synthetic construct
  misc_feature 1..3207: note = Description of Artificial Sequence: Synthetic coding sequence
  source 1..3207: mol_type = other DNA
atgttccccgccgcccccagcccccggacccccggcaccggcagccgacgcgggcccctagcaggacttggtcccggctccacccctagaactgcctctaggaagggcctcccacttgggtccgccgtcagttccccagtgctgttttctcccgtgggtcgccgcagctcgctctcctcaaggggcaccccaacacggatgttcccacaccattctattacggaatctgtaaattatgacgtgaagacctttggtagcagtctgcccgttaaggtgatggaggctctgaccctcgccgaagttgacgaccagcttacaatcaatatagacgaaggtggttgggcttgcctagtatgcaaggaaaagttaattatttggaaaatcgccctctcccccatcactaaactgtccgtgtgtaaggaattgcagctgccgccttctgacttccattggagcgccgacttggtggcactcagctattcctctccatccggggaggcacattcaacgcaggcagtggccgttatggtggcaactcgggaaggctccatccgctattggccatctctggctggcgaagacacctacacggaggcttttgtggattcaggtggggacaagacctattcttttcttacagccgtgcagggcgggtcatttattctcagctcttccggaagccagctgataagactgatcccggaaagctctggcaagatccatcagcacatcctgccgcagggacagggaatgctgagcgggatcggtcgaaaagtgtctagtttattcgggatcctgtctccctccagtgacctgaccctgagctctgttctctgggatcgtgagcgcagctctttctatagcctaacctcctcaaacatctccaaatgggaacttgacgatagctccgaaaagcatgcatactcttgggatatcaatagggctctaaaggagaacataactgatgccatatgggggtctgagagcaattatgaggcaataaaggagggagtgaatatcagatacttggacctgaagcagaactgcgacgggttggtgatcttggccgccgcttggcactctgcagacaatccctgtctgatctattactccctcatcaccatcgaggataacggctgtcaaatgtcagatgcggttaccgtcgaggtgactcagtataatcccccattccagagcgaagatctgattctctgccaactgaccgtgcccaattttagcaaccagaccgcctacctatataatgaaagcgccgtgtatgtgtgctctacagggacaggtaagttctccttacctcaggaaaaaatagtgttcaacgcacagggtgatagtgtcctgggcgccggagcctgtggaggcgtgcctatcattttcagccgcaacagcgggcttgtgagtataacgagtagggagaatgtatccatcctggctgaagatttggaaggatcactagcttcatccgtcgccgggccaaattcagaatctatgatattcgagacaacaacgaaaaatgagacaatcgcccaagaggataaaatcaaacttttgaaagccgcattcttgcagtattgtaggaaagacctgggccacgctcagatggtcgtggatgagctgttctcctcacatagtgacctggattcggactctgagttagaccgcgctgttacacagatctccgtggaccttatggatgactaccccgcatctgacccacggtgggctgagagcgtgcccgaggaggcaccagggtttagcaacaccagcctgattattctacatcagcttgaggataaaatgaaagcacatagcttcctgatggactttatccatcaagtgggcctgttcggccgcctggggagctttccagttcgcggcacaccaatggcaacgcgcctactgctgtgtgaacacgccgagaagctgtccgctgcaatcgtcctaaaaaaccaccactcacggctttcggaccttgtaaataccgccattttgattgctttgaacaaacgcgaatacgaaattccttcaaatcttactcctgcggatgtgttctttagagaggtctctcaggttgatactatctgtgaatgtctgctggagcacgaggaacaggtccttcgggacgcccctatggactccatagagtgggcagaagtggttatcaacgtgaacaacatacttaaagatatgcttcaggctgcctctcactataggcagaaccgcaatagtttatacagacgcgaagaatcactggaaaaagaacctgagtatgtcccctggaccgctacctctggtccaggtggaatccggacagtgatcatcaggcaacacgaaattgtgttgaaggtagcttatccccaggccgacagcaatctccgaaatatcgtgaccgaacagctcgtggctcttatagactgtttcctagatggctatgtctctcagctcaaatcagtggacaagtcctccaaccgagaacgctacgataacttggaaaagggaaagcgcgggaaactgctttcgcagcccatttcccagcatggtcaactcgcgaactttctccaggcccatgagcacctgtcatggctccatgagatcaactctcaggaactggagaaggctcatgctacccttctgggactagctaatatggagacacgctactttgccaaaaagaagaccctccttgggctttcaaagttggccgccctggcctccgacttctccgaggacatgttacaggagaagatcgaagagatggccgagcaagagagattcctgttgcatcaggagaccctccctgaacagctgctggctgaaaaacagcttaacctgagcgccatgccagtgctgacagccccacagctgattggtctgtacatttgtgaggaaaacaggcgtgccaacgaatacgattttaagaaagctctcgatctccttgaatatattgatgaggaggaggatatcaacattaacgatctgaaactggaaatcctgtgcaaggcccttcagcgcgacaactggtcttcgagtgatggaaaggatgacccgatcgaggttagcaaagactctatcttcgtaaaaatactgcaaaagctgcttaaagacggtattcagttgtctgagtaccttccagaagtgaaggatctgctgcaagccgatcagctgggctccatcaacgtaaacttctgctag

SEQ ID NO: 197904 - DNA, 3258 bp, synthetic construct
  misc_feature 1..3258: note = Description of Artificial Sequence: Synthetic coding sequence
  source 1..3258: mol_type = other DNA
atgttccccgccgcccccagcccccggacccccggcaccggcagcaggcgcgggccgctcgccgggctaggtccaggatctaccccaaggactgcatcaaggaaagggctaccccttggaagcgcggtgtcatcccccgtgctcttttcacctgtaggccggagaagtagcttgtctagcagaggaacacctacccggatgttcccacaccacagcataaccgagtcagtgaattacgatgtcaaaacttttggttcttccttgccggtgaaggtcatggaggcgctaactttagcagaagttgatgaccagttgaccatcaatatcgatgaaggcgggtgggcctgtctggtttgtaaagagaaattgataatctggaagattgctctgtctcctatcacaaaactcagcgtgtgtaaggaactgcagctcccacccagcgatttccactggtctgcagatctcgtagccttgtcatattctagcccgtcaggtgaggctcactccacccaggctgtagccgtgatggtcgccacccgggaaggctctattcgatactggccatccctggctggggaggatacttacactgaagcctttgtcgattctgggggcgacaagacttacagctttttgaccgcggtgcaaggtggatcctttatcctgagcagttccggctcgcagctgataagattgattccagaatcttccgggaaaattcaccagcacatcctgccgcagggacaggggatgctctccgggatcggcaggaaggtgtcttcactgttcgggatcctgagcccatccagcgatcttaccctgtcttctgttctttgggatagggaacggagctccttctacagtcttacatcctcaaatatttccaagtgggaactcgacgacagcagtgagaaacacgcatactcgtgggatatcaacagggcactaaaggagaacatcactgatgctatatggggatcggaatctaattacgaggctattaaggaaggtgtgaacatccggtacttggacctcaagcaaaactgtgacggcttggtcatccttgccgccgcctggcacagcgctgacaacccctgcctgatctactatagtctgatcacaatcgaagataacggctgtcagatgagtgacgccgttactgtcgaagttacacagtacaaccctccattccagtctgaggatctgattctctgtcagcttaccgtaccgaactttagcaatcagacagcctacctgtataatgaaagcgcggtctacgtctgcagtaccgggaccggcaaattctccctcccacaagaaaagatcgtttttaacgcccagggagactcagtgttaggcgcaggtgcctgcgggggggtgcccataatcttctcccgaaattcgggactcgtgtcaatcacaagtcgggaaaatgtgagtatcctggctgaagacttagaaggatcgctcgcatctagtgtagccgggcccaactctgagtctatgattttcgagactacgaccaaaaatgagaccattgcacaggaagacaagatcaaactgctcaaggctgctttcctgcaatactgccgcaaagacctgggccatgcccagatggtggttgatgaattattttcctcgcatagcgacctggatagcgactccgagcttgatcgcgccgtgacccaaattagtgtagacctgatggacgactatccagcctctgatccccggtgggcagaatctgtacccgaagaggcccctggcttcagtaatacatctctgatcattctccaccagcttgaggacaagatgaaggcccactcttttctcatggattttatccatcaagtcggattatttggcagactgggatccttcccagtgagagggacccctatggcgacgcggctcctgctgtgcgagcacgccgagaaactatccgcagccatagtgctgaagaatcatcattctcgcctaagcgacctagtgaacactgccattctgattgcattgaataaacgagagtatgagatccctagtaacctgactccagccgatgtttttttccgcgaagttagtcaggttgacacaatctgcgaatgcttactggagcatgaggaacaggtcctgcgggacgcccctatggattcaatcgagtgggccgaggtagttattaacgtcaacaatatcctgaaagatatgttgcaggcagcctcacactacaggcagaacagaaactccctgtacaggcgggaggagtctttagagaaggaaccggagtacgtgccctggaccgcaacaagcggtcccggcgggatccggacagttatcattcgtcaacatgagatcgtgcttaaggtggcatatccacaggccgatagcaatctacgcaatattgtgaccgagcaactggtggctctaattgactgcttcctggatggatacgtaagccagctcaaaagcgtcgataagagttcgaaccgcgagcggtacgacaacctcgagaagggaaagcgcgggaaactcttgtcccagcccatctcccagcacggtcagttggccaactttttacaggcccatgagcacttgtcatggttacatgagataaactcacaggaattggaaaaggcccacgcaactcttttgggcttggctaatatggagacacgatattttgcgaagaagaagacgctcctcggcctctcgaagttagccgcactggccagcgatttctctgaagatatgctgcaggagaagattgaggaaatggctgaacaggagaggtttctcctgcaccaggagactctacctgaacagttattagccgagaagcagctcaacctgtctgccatgccagttctgaccgcaccgcagcttattggcctttacatttgtgaggaaaatagacgggcgaatgaatatgatttcaaaaaggcattggacctccttgaatacatcgatgaggaggaggatatcaatatcaacgatctgaaactggaaattctgtgcaaagccctacagagggacaattggagcagcagcgatggaaaggacgacccaattgaggtaagcaaggactccatatttgtcaagatccttcagaagctcttgaaagatgggatccaactctccgaataccttccagaggtaaaggacctcctccaggctgatcagctcggatcattaaagagtaacccatatttcgagttcgttcttaaagcaaattatgaatactatgttcagggccagatctag

SEQ ID NO: 197905 - DNA, 3423 bp, synthetic construct
  misc_feature 1..3423: note = Description of Artificial Sequence: Synthetic coding sequence
  source 1..3423: mol_type = other DNA
atgggccccctggccggcctgggccccggcagcaccccccggaccgcctctcggaagggcctccctttgggatctgctgtgtcgagccccgtcttattcagcccagtgggcaggagatccagcctcagctctagaggtacccccactagaatgtttcctcaccactccatcactgagagcgtgaattatgatgtaaaaacgtttgggtcaagcctgccagtgaaagtgatggaggcccttactttagctgaggtcgacgaccagctcactataaatatcgacgaaggcggctgggcatgtctcgtttgcaaggaaaaactgatcatctggaaaatagcacttagcccaatcaccaagctttctgtgtgcaaagaactgcagctccctccttctgactttcactggtcagctgatctggtggcactcagttatagttcccctagtggcgaagcccatagtactcaggcagttgcggttatggtcgccactcgtgagggatccattagatattggcccagcctggccggagaagacacatacacagaagccttcgtcgacagcgggggggacaagacttactcttttcttactgccgtccaggggggctcttttatcttgtcttcctctgggagccagctgatccgcctgatccctgagagctctggtaagatccaccagcacatcctgcctcagggacagggcatgctgtctggaatcgggcgcaaggtgtcttccctgttcggcattttgtcaccttcctcagatcttactctgagcagcgtgttgtgggaccgtgagcgcagttcattctattcattgactagctcaaacatcagtaaatgggaactagacgactcatccgagaagcatgcctactcctgggacataaatcgagcgttgaaagaaaatataacggacgccatttggggttcggagtcgaattacgaggccatcaaagagggggtgaacattagatacctggacctcaagcaaaattgtgacggattagtcatcctcgcagccgcctggcattcagccgacaacccctgcctgatctactattctttaataactatcgaggacaacggctgtcagatgtccgacgccgtcacggttgaagtaacacagtataaccctccctttcagagcgaagacctgattctctgccagctcaccgtgcctaacttcagtaaccaaaccgcctatttatacaacgagtccgcagtctacgtgtgtagcaccggaaccggcaaattctcactgcctcaggaaaaaatagtcttcaacgcacagggagactcggttcttggcgccggagcctgcggcggtgtgcctattatcttctctcgaaattctggtctggtctctattaccagcagagaaaatgtcagcatattggccgaggatttggaagggagcctggcttcatccgtggccggtccaaatagcgagtccatgatctttgagacaacaactaaaaatgagaccatcgcccaagaagacaaaatcaagctgcttaaagcagcattcctccagtactgccgaaaggacttgggtcacgcccagatggtggtggacgaactgttctcctcacacagcgatctggatagcgacagcgaattggatcgggctgtcacacagatttctgtcgatctcatggacgactacccagcgagtgatcctaggtgggcagagtccgtgccagaggaagcccctgggttctctaacacctccctgataattctgcaccagctggaagataagatgaaagctcactcgttcctgatggactttatccatcaagtaggcttatttggaagactgggttccttccccgtccgtgggactcccatggctaccaggctgctgctttgcgagcatgccgagaagctgagcgcggccatcgtactgaagaaccatcatagcagattaagcgacctggtgaacacggcaatcctgatcgcccttaacaagcgtgaatatgaaatcccttctaacctcactcctgcggacgtgtttttcagagaggtgtcacaggtggatacgatctgcgagtgcttgttagagcacgaagaacaagtcctcagggacgcccccatggattccattgagtgggccgaagtggtgataaacgtaaataacatcctcaaggacatgctgcaggctgcctcccattacaggcaaaatcgtaacagtctttaccgtagggaagagtcgctcgaaaaagagcctgaatacgtgccttggacagctacatccgggccgggcgggatccgcactgtcatcatccgacagcatgagattgtcctgaaggtcgcttaccctcaagccgacagcaacctgcgcaatatcgtaaccgaacaactggttgctctcattgattgtttcctcgacggctatgtcagtcagctgaagtccgttgacaaatcctctaatagggagagatatgataatctagagatggaatatctgcagaaacgttctgacctactgtccccacttctgagcctgggccaatatctgtgggctgctagcctggctgagaagtactgcgattttgatattcttgttcaaatgtgcgagcagacggacaatcaatccagactccagcggtatatgacacagttcgcagatcagaatttctcggatttcctgtttagatggtacctggagaaaggcaagcgcgggaaacttctgtcacagcccatctctcagcacgggcaactggccaacttcctccaagcccacgaacacctcagctggctacacgagatcaacagccaggaattggagaaggcccatgctacccttctgggactggccaacatggagacccggtactttgctaagaagaaaacgctgctcggcctgagcaagttagcggctcttgcgtccgatttctccgaggatatgctccaggagaagatcgaagagatggccgagcaggaacggtttctcctgcatcaggagactctccctgaacagttactagcggagaaacagcttaaccttagcgcaatgcccgtgcttacggccccccagctgattggcctgtatatctgtgaagagaaccgaagagctaacgagtacgattttaagaaggcactcgatcttctagagtacattgacgaagaggaagatatcaacattaatgacttgaagctcgaaattctctgtaaagctctgcaaagggacaattggagctcttccgacggcaaggatgaccctatcgaggtgagcaaggactcaatcttcgtaaagatccttcagaaactgctaaaggacggaatccagctgagtgaatacttgcctgaagtgaaggacctgctccaggcagaccaattagggtcacttaagagtaatccctacttcgagttcgtccttaaggctaactacgaatattacgtgcagggccagatttag

SEQ ID NO: 197906 - DNA, 4428 bp, synthetic construct
  misc_feature 1..4428: note = Description of Artificial Sequence: Synthetic coding sequence
  source 1..4428: mol_type = other DNA
atggccagcggcgccggcggcgtgggcggcggcggcggcggcaagatcaggactcgtcggtgccatcagggcccaatcaagccataccaacaaggacggcagcagcaccagggcattctcagcagagtcaccgagtccgtgaaaaacattgtgccgggctggcttcagcgctactttaacaaaaacgaagatgtgtgtagctgcagcacagatacttccgaggtccctcgctggccagaaaataaagaagatcatctcgtttacgccgatgaggagtcttctaatattacagacggtagaattaccccagaacctgcagtatctaacactgaagaaccttctaccactagtacagctagtaactatccggatgtactaaccagaccctccctacatcgttcacacctaaatttctccatgcttgaaagtcctgctctacactgtcagccaagcacctcaagtgcttttccaattggctctagtggcttctcccttgttaaggaaatcaaagatagtacctctcagcacgatgacgacaacatctcaacgacaagcggctttagttcacgggccagcgataaggatattacagtgagcaaaaatacttccttgccaccactatggtctcctgaggccgagcgcagtcattctttgtctcagcacacggccacttcttctaagaaaccagcttttaatctgtctgcatttgggaccctctcaccatccttgggcaactccagcatccttaaaacatcccaacttggggattctcccttctacccgggcaaaactacatatggcggggccgcagcggccgtgagacaatcaaaactgaggaacaccccataccaggcacccgtgcgccggcaaatgaaggctaagcagttgtcagcacagtcatatggggtcacatcaagcaccgcccgcaggattcttcagagcctggagaagatgtcatcaccgctcgccgacgctaaacgcatccctagcatcgttagcagccctctcaatagccctctcgaccgatcaggtatcgatattacagatttccaggcgaagagagagaaggttgatagccagtaccccccagtacaacgtctgatgacacccaaacccgtgtctatcgccaccaataggagtgtgtacttcaagccaagcctgacgccttccggcgagtttcgcaagaccaatcagcggattgacaataagtgtagcactggctacgaaaagaacatgacacctggccaaaatcgggaacagagggaaagcggtttcagttaccccaatttttctctcccagctgccaatggcctcagcagtggcgtgggaggcggaggtggaaaaatgcgtcgggagaggaccaggttcgtagcatcaaagcctctggaggaggaggaaatggaggtcccagtactgcccaagataagcttgccgatcacatcctctagcttgcccacatttaatttttcgagcccggaaatcacaacatcatccccgtccccaatcaactctagccaggccctgacgaataaagtacagatgacctcgccatccagcaccggatctccaatgttcaaattttcctcacccatcgtgaaatccaccgaagccaatgttctgccccccagcagtatcggatttaccttttctgtcccagtagccaaaactgcagagctgtctggctcaagctctacgctcgaacccatcatcagttcgtctgcgcaccacgtgaccaccgtgaacagcaccaattgcaagaaaacacctccagaggactgtgagggtccctttaggcccgccgagatactgaaagaggggagcgttttggacatacttaagagccccgggttcgccagtcccaaaatcgatagcgttgccgcccagcctacagcgacaagccctgttgtgtataccagacccgcgatctcctcctttagctcttctgggattggatttggtgaatctctgaaggccggttctagctggcagtgcgacacttgcctgcttcaaaacaaggtgaccgataacaagtgcatcgcctgccaggccgccaaactgtctccccgcgataccgccaagcagactggcattgagactcctaacaagagcggcaagacgactttgtccgcttcaggcacaggatttggcgataagttcaaaccagttataggcacatgggactgcgatacctgtcttgttcagaacaagcccgaagccatcaaatgtgtggcctgtgagacaccaaaacccggtacctgtgtaaaacgcgctcttacactcaccgtggtcagtgaaagcgccgagacaatgacagcttcatcttcctcttgtaccgtgactaccggtactctaggctttggggacaagttcaaaaggccaatcggttcctgggagtgtagcgtctgttgcgtctcgaataacgccgaggataataagtgcgtgagctgtatgtctgaaaagcctggttcttctgtgcccgccagctctagcagcaccgtcccagtgtcattgcccagcggtggctctctaggcctggaaaagttcaagaagcctgagggaagttgggattgtgaactgtgcctggtccagaataaggccgacagcacaaaatgcctggcttgcgaatccgccaaacctggcacaaagtccggattcaaggggtttgacacatcgtcatcttcctccaactccgcagcaagctccagctttaaatttggcgtcagctcatcaagcagcggcccctctcagaccttaacctccacaggtaatttcaaattcggcgaccagggcggattcaagatcggggtgtcctctgactccggctcgatcaacccaatgagtgaaggctttaagttcagtaagccaatcggcgactttaagttcggggtgagcagcgaatctaaacccgaggaggtgaaaaaggattctaagaacgacaactttaagtttgggctgtcttctggattatctaatcctgtttcgctgacccctttccagtttggagtttccaacctgggccaggaggaaaagaaagaggaactgcctaaatcgtcctccgcaggattttccttcggaaccggggttataaacagtaccccagcgccggccaacacaatcgtaacatctgagaataagtcgagcttcaacctgggcaccatcgagacaaagagcgccagcgttgccccattcacatgcaagacgagcgaagctaaaaaagaggagatgccagcaaccaaaggggggttcagctttgggaacgtagaacccgcaagcctaccgtcagcctcggtgttcgtgctggggcgaaccgaagagaagcagcaggagcccgtcacctctacctccttagtcttcgggaagaaagccgataatgaggaacccaagtgtcagcctgtgttttcatttggcaactctgaacagactaaagatgagaattcatccaagagtactttttcttttagtatgaccaagccgtcggaaaaagaatcggagcagcctgccaaagctacttttgcatttggcgcgcagacgagtacgacagcggatcagggagcagctaagcccgtctttagctttctgaacaatagcagcagttcgagcagcacacccgcaacctcagctggggggggcatcttcggaagtagtacttcctcttccaatccaccagtggcaactttcgtgtttggacagtcctctaatcctgtatcgtcatccgccttcggaaacacagccgagagctcaacgtcgcaaagtctgctgttctcacaggacagtaaactcgccacaacttcttccaccggcactgccgtaacacccttcgtatttgggccgggggcctccagcaataacacaaccacttccggatttgggttcggtgcaaccaccacaagctcgagcgcaggctcatcatttgtttttggaacggggccaagcgcgccctctgcgtcccccgcatttggcgcaaatcagacacccacatttggccaatcgcaaggtgcctctcagccgaacccacccgggttcgggtctatttcgtctagtactgctctgttcccaaccgggtcacagccagctccgcctacctttggtacagtgtcttcaagctctcaacctcctgtgtttggccagcagccatcacagtcagcattcggatccggtactactcctaatagtagctccgcattccagttcggcagctctactactaactttaatttcacaaataactccccaagtggtgtgtttacctttggggccaattcttctacgcccgccgctagcgcgcagccatccggttcaggcggctttccctttaatcagtcccccgccgcttttacagtcgggtctaacggcaagaacgttttttcctcttcaggaacatccttcagtggcagaaagattaaaactgctgtgaggcgaaggaaatag

SEQ ID NO: 197907 - DNA, 4368 bp, synthetic construct
  misc_feature 1..4368: note = Description of Artificial Sequence: Synthetic coding sequence
  source 1..4368: mol_type = other DNA
ggcctgcggctgtgcctgagccggcccctgacccggcccggcgccggatccggaggcggctcagctatggccagtggcgccgggggagtgggaggggggggcggaggcaagattcgcaccagaagatgccaccagggtcccatcaaaccctaccaacaaggccggcagcagcaccagggaatattatcccgggttactgaatccgttaagaacattgtgccaggttggctacaacggtattttaacaagaatgaagatgtgtgtagttgcagtacagatacaagcgaggtacccagatggcctgagaataaagaagatcaccttgtgtacgccgacgaagaatcctccaatatcactgacggccgcatcactccggagccagcagtgagcaacacggaggagccaagtacaacttctacggcctccaactacccggacgttcttacccggccctccctgcaccgctctcacctcaatttctcaatgctggaatcgccagcactacactgtcagccaagcacatccagtgcattcccaataggcagttctggttttagcctcgtgaaggagattaaggacagcaccagccagcatgacgacgataatatatctactacctctgggtttagttcacgcgccagcgataaagacatcaccgtgagtaaaaatactagccttccgcctctgtggtctcccgaggccgaacgctctcattcgctctcacaacacacagcgacttcttccaaaaagcccgcattcaacctgtctgcatttgggaccctgagcccttcactgggaaatagcagcattttgaaaacctcacagctgggagactcccccttttatcctggtaaaacgacttacggcggcgccgccgcagctgtccgccaaagcaaattgcggaacacaccatatcaggctcccgtcaggagacagatgaaggccaagcagctgtcagctcagtcttacggtgtcacaagcagtactgcccgcagaatcctgcagagcttagagaagatgtcttccccactcgccgatgccaaacgcatcccgagcattgtgtcctccccgctcaactctcccctggatcggtctggtattgatatcacagattttcaggcaaagcgtgaaaaagtcgacagccagtaccctccagtgcaacgcttgatgacacctaagccagtgtcaattgccacaaaccggtcagtctattttaagccatctctgaccccgagcggcgaatttcggaaaactaatcagcgcatcgacaacaagtgctcaaccgggtatgagaagaatatgactcccgggcagaatcgcgaacagagggagtctggcttctcatatcctaacttcagcctgcccgctgctaatgggctctcatcgggagttggtgggggcggcggaaagatgcgcagggaaagaacaaggtttgtggcaagcaaaccccttgaagaagaggaaatggaagtaccagtgctgccgaaaatctcactgcccatcaccagcagctccctgccgacgttcaacttcagctctccggaaatcaccactagctctccatcccctatcaactccagtcaggcactgactaacaaggtccagatgacctccccatcatcgactggaagccctatgtttaagttcagtagcccaatcgttaaatcaaccgaggccaacgtactacccccctcctctatcggatttaccttctccgtccccgtggccaaaaccgcagagctttctggttcttcatccacactcgagcccattatctcaagttccgggtttgcaagtcccaagatcgatagtgtggctgcacaacctacagccactagcccagtggtgtatacccgcccggccatctcgtctttcagcagctccgggattgggtttggagaatcattgaaagctggatcaagttggcagtgtgatacttgcttgctgcagaataaagtgaccgacaacaagtgtatcgcttgccaggccgcaaaactgagccccagggacacagccaaacaaacagggatagagacccctaacaaatccggtaagacaactttgtctgcctccgggacgggatttggtgataagtttaaacccgtcataggtacgtgggattgtgatacctgcttggtgcaaaataaaccagaggccattaaatgtgtcgcctgtgagacccctaagccaggcacgtgtgtgaaaagggcgctgaccctaacagtggtttccgaaagcgctgagaccatgaccgcctctagtagtagttgcaccgttacaactggcacattgggattcggggataaatttaaaagaccaattggcagctgggagtgctctgtatgctgtgtgtctaacaatgccgaggacaataaatgcgtcagttgtatgagtgaaaagcccggctctagcgtacccgcatcctctagctctacggttcccgtctcgctccccagtggagggagtctgggtctcgaaaagttcaagaagcctgaaggatcatgggattgcgagctctgtctcgtccagaataaagctgattctacaaaatgtctggcctgcgagtctgccaaacctgggactaaatccggctttaagggattcgacacgtcgtcatcttcctcaaatagcgctgcttctagctcttttaagttcggggtcagtagtagttcaagcggtccaagtcaaacactcacttcaaccggaaacttcaagttcggagatcagggtggattcaagattggggtgtcaagtgacagtggttccataaatcctatgtcagaaggattcaaattcagcaaaccaatcggcgactttaaatttggcgtcagcagcgaaagcaaacctgaggaggtgaagaaggactctaagaacgacaatttcaaattcggcctgtcatctgggcttagcaacccagtctcgcttacgcccttccaattcggagtttcaaatttgggccaggaggagaagaaagaagagttgccaaaaagctcctctgccggcttttcatttggaacaggtgtgatcaattctactccagcaccagcaaatacaatcgttacctccgaaaacaagtcttcttttaatttggggaccattgagacaaagagcgccagtgtagccccttttacgtgtaagacttctgaagccaaaaaggaggaaatgccagcaacaaaaggcggcttttctttcggcaacgtggagccggcttcactgccctcagcctcggtatttgtcctaggtaggacagaagagaagcaacaggaaccagttacatcgacaagcctggtattcgggaaaaaagccgataacgaggagcccaagtgtcaacccgtgttcagctttggaaacagtgagcagaccaaggacgagaactcctccaaatccactttctcattttccatgaccaaaccaagcgagaaggagtctgagcagcccgccaaggccacttttgcgtttggcgcacagacctccactaccgcagatcagggagcggcaaaacctgtattttcctttctcaataactcatccagcagttcaagcacacctgccacaagtgctggcggaggcatttttggatcatctacgagctctagcaatccacccgtggccacattcgtgtttggacagagttccaatccggtctccagcagtgccttcggtaacacagccgagagcagcacctctcagtcactcctattctcccaggattctaaactcgctacaacctcgtctactggcacggccgttacccctttcgtttttggtcccggcgctagcagtaataacactacaaccagtggctttggcttcggtgcaaccacaacctcgtcaagcgccggctcatcttttgtcttcggcaccgggccatccgccccttcggcctccccagccttcggagcaaaccaaactcctactttcggacagtcccaaggagcttctcagcctaacccccccggctttgggtctatctcttctagtaccgcgctatttccaacaggaagccaacccgccccacctacattcggcacagtgagctccagctcccaaccgcccgtgttcggccagcagccctcccagtcagcatttggcagtggaacaacacctaactcatcctctgcatttcagtttggaagcagtacgacaaactttaatttcaccaacaattcacccagcggcgtgttcaccttcggagccaactcatcaactcctgccgcgtctgcccaaccctctggaagtggcgggtttccatttaaccagagtcccgccgcctttactgtggggagtaacgggaagaacgtctttagctctagcgggacctccttcagtggtagaaaaattaaaactgcagtccgacgccggaaatag

SEQ ID NO: 197908 - DNA, 4521 bp, synthetic construct
  misc_feature 1..4521: note = Description of Artificial Sequence: Synthetic coding sequence
  source 1..4521: mol_type = other DNA
atggccagcggcgccggcggcgtgggcggcggcggcggcggcaagatcaggacgcggcgctgtcaccaaggccctatcaaaccataccagcagggcaggcagcagcatcaggggattctctcaagagtaaccgaatcggtgaagaatattgtgcccggctggttacagcggtactttaataaaaatgaagatgtttgcagctgttccactgatacctctgaggtacctcgctggccggaaaacaaagaagaccacctggtgtatgcggatgaggagtcctcaaatatcaccgatggaaggatcaccccagaacccgcagtgtctaacacagaagagccttctactactagcaccgcgagcaattaccctgacgtcctcacgcgccccagcctgcataggagtcaccttaatttctctatgctggagtcaccagctctgcactgccagccaagcaccagctcagccttccctatagggtcatcagggttctctctggttaaagaaataaaggattctacaagccagcacgatgacgataatattagcaccactagcgggtttagtagtcgcgcttccgacaaagatatcacagtgagcaaaaacacatcactacctccactgtggtcccccgaggccgagcgtagccactcactctcacagcatacagcaacgtcgtcaaaaaaacctgcgtttaacctgtctgcatttgggacgctgagcccgtccctcgggaattcctccattctgaagacttcccaactgggggatagccccttctacccagggaaaaccacatacggcggagcagctgccgccgtaaggcagtctaaactccggaacacaccctaccaggctcctgtgcggcggcaaatgaaggcaaaacagctcagcgcacaaagctacggcgtgactagctccactgctcggcgcatcttacaaagcctggaaaaaatgagctctccactggctgatgccaaaagaattccaagcattgtctccagccccctcaactccccccttgacaggtccgggatcgatatcaccgatttccaggctaaacgcgaaaaggtcgatagccagtacccccccgtccagcggctgatgaccccaaagcctgtcagcatagcgacaaaccggtccgtgtactttaagccaagcttgacgcctagcggcgagttcaggaagactaaccagcggatcgacaataaatgcagcaccggctacgagaagaacatgaccccgggccagaaccgagagcagcgtgaatccggattttcttacccaaacttctccctgccggctgcaaacggactatcgtctggcgtgggcgggggcggaggaaagatgagaagggagaggactaggtttgtggcgtcaaaacctctggaggaagaacgccagggcctgacggtcttacctaaactcatcagtagctcatgtgcacaagccattatcccctcttggccactaaaggtgctgcgcttgcaagaaatggaagtaccggtcctcccgaagatctcactccctatcacatctagctctctgccgaccttcaacttctccagccctgaaatcactacttcttcacctagccccattaattctagtcaggcactaactaataaagtacaaatgaccagccctagcagcaccggttcaccaatgttcaagttcagctctcctatcgtgaagtcgacagaagccaatgtacttccccctagtagtatcgggttcactttctctgttccagtcgctaagaccgcggagctgtccgggagcagctccaccctcgagccaattatttcttcaagtgcacaccacgtgaccaccgtcaactcgaccaactgcaagaagacaccacctgaagactgcgaaggcccatttcgtccagcggaaatcctgaaagaggggagcgttttggacatcttgaagagtcccggcttcgcctcccccaagattgattctgtggcagcccaaccaaccgctacctcccccgtagtttatactcggccagcaataagctctttcagctcctcaggcatcggatttggcgaatccctgaaagctggatccagttggcaatgtgatacttgtctgctgcagaataaagtgacggacaataagtgcatagcgtgccaggcagctaagctctcaccacgggacactgccaagcagactggtattgagacgcccaataagtccgggaaaaccaccctctccgcttcgggtaccggttttggggataaatttaagcccgtgatcgggacatgggactgtgacacatgtctagtccagaacaaaccagaagctattaaatgcgtggcctgtgaaacgcccaagcccggcacatgcgtgaaaagagcactgacactgactgtagttagcgaatccgccgaaaccatgactgccagctcaagctcttgtactgtgactaccggcactcttggttttggagacaaatttaagagacctatcggcagctgggagtgcagcgtgtgttgcgtttcgaataatgccgaagacaataagtgcgttagttgcatgagcgaaaagcctggaagctccgtacctgcctcttcttctagcactgtgccggtgagtttgcccagtggaggtagcctcggactggaaaaatttaagaagcctgagggaagctgggactgcgagctctgcctggtccagaataaggctgactccaccaagtgcttagcttgtgaatctgccaaaccaggaaccaagagtgggtttaaaggtttcgatacatcatcaagctcttccaacagcgccgcttcctcctcgtttaaatttggcgttagcagttcttcaagcggaccctctcagaccctcaccagcacgggaaactttaaattcggggatcagggagggtttaagattggagtgtcctcagactcaggctcaattaacccgatgtccgaaggctttaagttctccaaaccaatcggagactttaaattcggcgtgagctctgaaagcaaaccagaggaggtgaagaaagattctaagaacgacaactttaaatttggtctcagctctggcctgtcaaatccggtgtctctaactcccttccaatttggcgtaagtaacctgggtcaagaagaaaagaaagaggagttgccaaagtctagtagcgctggcttctcgtttggtaccggagtaatcaattccacccccgcccccgccaacaccatcgtgacatccgaaaacaagagcagcttcaacttggggaccattgagacaaagtcagcctcggtggccccttttacctgtaaaacatcagaagcaaaaaaagaagaaatgccggccactaagggaggatttagcttcggtaatgtggaacccgcttctcttccatccgcttccgtctttgtgctgggccgaacagaagagaaacagcaggagccggtgaccagtaccagccttgtgtttgggaagaaagcggacaatgaggagccaaaatgccagcccgtgttcagttttggcaatagtgaacaaacgaaagatgagaattccagcaagtcaaccttctcctttagcatgaccaaacctagcgaaaaagagtcagaacagccggccaaagccacatttgccttcggggcccagacctccacgaccgcagaccagggtgcagccaaacctgtcttctccttcctgaataatagttcttcctcttctagtacccctgccacatcagccggaggcggcatcttcgggagttcaacgtcctcctctaatccccctgtagccactttcgtcttcggtcagtctagcaaccctgtgtccagctcagcctttggaaacaccgcagagagctccacttcacaaagtcttctgttttcccaagactctaaattagccacaacttctagtactggaactgccgtgaccccctttgtcttcggtcctggcgctagttccaacaacacaacgacctccggctttggattcggagccaccacgactagcagtagtgctggctcctcattcgtcttcgggaccgggcccagcgccccctccgcctcccccgcttttggggccaaccagacacccacctttggtcagtcacagggcgccagccagccgaaccctccaggattcggctcaatttcatcctctaccgcgctgtttcctacgggtagtcagccagctccgcccacattcggcaccgtctcaagctctagccaaccccccgtattcggacagcaaccttctcagtctgctttcggaagcggtacaactcccaacagctcaagcgcctttcagttcgggagctcgaccacgaatttcaatttcactaataactccccatctggcgtctttaccttcggcgcaaacagcagtaccccggctgcatctgcccagcctagcgggtcaggcggctttcctttcaaccaaagccctgccgcttttaccgtgggctctaatggcaagaatgtgttctcaagctctggaacaagttttagcggcagaaagataaaaactgcggttagacggcggaaatag

SEQ ID NO: 197909 - DNA, 3555 bp, synthetic construct
  misc_feature 1..3555: note = Description of Artificial Sequence: Synthetic coding sequence
  source 1..3555: mol_type = other DNA
atgatgcagctgctgcagctgctgctgggcctgctgggccccggcggctacctgttcctgctgggcgactgtcaagaggtgacaactcttacagtgaaataccaagtgtcagaggaagttcccagcggtacggtaatcggcaagctcagtcaagagctgggccgggaggagcgtcgccgtcaggcgggcgctgccttccaggtcctgcagctgcctcaagcgctgccaatccaggtggattcagaggagggtctgctctccaccggacgccgcctcgatcgcgaacagttgtgccgtcagtgggatccttgcctggtgtcctttgatgtgctggcgacaggggacctggccctcattcacgtggagattcaggtcttggatatcaacgaccatcagccgcgcttccctaagggtgagcaagagcttgagatcagtgagagcgcatcactgagaactcgcattcccctcgaccgcgccttagatcccgatactggtccgaacactttgcacacctacacactgagcccttcggagcacttcgccctggatgtcatcgtgggaccggacgagacaaagcacgcggaacttatagttgtgaaagagcttgatcgcgagatccactccttctttgatttagtcctcacagcttatgataacggaaaccccccaaaaagcggtacgtcattagtgaaggtcaatgtgcttgatagtaatgataattcccccgctttcgccgagtcttctttagctctggagatccaggaggacgccgccccaggtacactactcataaagcttacagcgaccgaccctgaccaaggtccaaatggggaggtggagtttttcttatccaagcatatgcccccagaagttctcgacacctttagtatcgacgccaagacgggccaggtcatcctccgccgcccacttgattatgaaaagaatccggcctacgaagtcgatgttcaagcccgggaccttggaccaaatcccatcccagcgcactgcaaagtcctcattaaggtgcttgatgttaacgataatatcccctccatccatgtgacgtgggcttctcagccaagtctggtctcggaagctctgccaaaagatagctttatcgccctggtcatggccgacgatctggacagtggccataatggcctggtacactgctggctgtcacaggagcttggccacttccgcctgaagcggactaatggcaatacctatatgttactgacaaatgccacccttgacagagagcagtggccaaagtacacattaactctgctggcgcaggaccagggactccagcctttaagtgcaaagaagcagctgagtattcagataagcgacatcaatgacaatgcccctgtgttcgagaaatcgagatatgaggttagcactcgcgagaataatttaccttctctacacctcattaccattaaagctcacgacgctgatctcggtatcaatgggaaagtctcctaccgcatacaagatagtcccgtggcacaccttgtggcgattgactccaatacaggagaagtgactgcacagcggtccctaaattatgaggaaatggccggatttgagttccaggttattgcggaggattctggccagcccatgctggcctccagtgtcagcgtatgggtctccctcctggacgctaacgacaatgccccggaagtggtgcagccagtcttgtccgacgggaaggcatccctgtccgtcctcgtcaatgcctcaactggccatttattggttccaattgagacccccaatgggctaggtcccgcgggaactgacacaccaccattagccacacattcttcaagaccctttctgcttactaccatcgtcgccagggatgctgactctggcgcaaatggcgagccgctgtactccatccgttccgggaatgaggcacaccttttcattttgaatccccacaccggacaactttttgtgaacgtaaccaacgcctcgagcctgataggcagtgagtgggaactggaaatagtcgttgaggatcagggcagccctcccttgcagaccagggcactgctgagggttatgtttgttacatctgtagatcacttacgggactcggccaggaaacccggcgcgttaagtatgagtatgctgaccgttatctgcctcgcagtgctcctcggaatattcggactgatactcgcccttttcatgtcaatatgtaggacagagaagaaagataacagggcttacaactgtcgcgaagctgagtccacctaccggcagcagccaaagaggccacaaaagcacattcagaaggccgatatccatctcgtccccgtactgcgggggcaggccggcgagccatgcgaggtcggccagtctcacaaggacgtggataaggaggccatgatggaggccggatgggacccctgtctccaggcccctttccacctgacacccacactgtacaggacactgcggaaccagggtaaccagggagcccctgccgaatcaagggaggtgcttcaagacacggtgaacctcctgtttaaccaccccaggcagagaaatgcctcccgcgagaacctgaacctgccagagccgcaaccagcaaccggccaacccagatcaaggcctctgaaagtggctggtagcccaactgggcgcctggctggagaccaaggaagcgaggaagccccccagcgcccaccggcatcatctgctacccttagacgacaaagacatctcaacggcaaagtctctccggagaaagagtctgggcccaggcaaattctgcgatccttggtacggttgtccgtcgccgcgttcgcagagagaaatcccgtcgaggaactgaccgtggactctcctccagtgcagcagatttctcaacttctgagcttactccatcagggccagttccagccaaaacctaaccataggggcaataaatacctggctaagcctggcggcagtagaagcgcgattcccgataccgacgggccttccgccagggcagggggtcagaccgacccagagcaggaggagggcccattagaccctgaggaggatcttagtgtgaagcaactgctggaggaggagctctcctccctgctagaccccagcaccggcttagcgctggatagattgagtgcccctgatccagcttggatggcacggttgagccttcctctcaccactaactaccgggacaatgtcataagtccagacgctgctgctacggaggaaccccggacttttcaaacctttggtaaggccgaagcgccagaattgtccccgacaggcactagattagctagcacctttgttagcgaaatgtcaagcctcttggaaatgctgctggagcagcgttctagcatgccagttgaggccgcttccgaggccttgcgccggctgtcagtgtgcggtcgcacattaagcctggacctggctacatctgccgcaagcgggatgaaagtacagggggatccaggaggcaaaaccggaactgaaggaaaatctcgtggaagcagcagcagcagccggtgcttgtag

SEQ ID NO: 197910 - DNA, 3999 bp, synthetic construct
  misc_feature 1..3999: note = Description of Artificial Sequence: Synthetic coding sequence
  source 1..3999: mol_type = other DNA
atgagcgacatggactaccccctgcagggccccggcctgctgagcgtgccaaatctgcccgagatctcctcaattcgccgtgtgcccctccccccggagttagtcgagcagtttggacatatgcaatgcaattgtatgatgggtgtgtttccgcctatctcaagggcatggctgacaatcgactctgatatctttatgtggaactacgaagacggcggcgacctagcttattttgacggccttagcgaaaccatactggctgtcggcctggttaagccgaaggccggcatctttcaacctcacgtccgacatttactcgtcttggccacccctgtggatatcgtcatcctaggcttgtcctacgccaatctacaaacagggtccggagtgttgaacgatagcctcagcggcggtatgcagctgctgcctgatcccttgtattccctgccaactgacaatacatacctcttgaccattacatctacagataacggccgcattttcctagcaggcaaagatggatgcttgtacgaggtcgcatatcaagcggaagcgggctggttttcacagcgttgtcggaagataaaccactcgaagagtagcctgtcttttcttgtgccgtccctgctgcagttcaccttctcagaggacgaccccatcctccagattgccatcgacaatagccggaatatcctttacacaagaagtgaaaaaggggtgatacaggtctacgacctcggacaagatgggcaagggatgagccgggttgcctcagtgagtcagaacgccatagtgagtgccgcgggcaacatcgccagaactatagaccgcagcgtctttaaacccatcgtccaaatagccgtcatcgaaaattcagagtctttggactgtcaactgcttgccgtgacccatgccggtgtgcggttatatttcagtacctgtccttttcggcaaccgctggccaggccaaacaccctgactctggttcatgtgcgtttaccacccggtttctctgcatcatccaccgtggagaagccttcaaaggttcaccgagccctgtacagtaaaggcatcctcctgatggctgctagcgagaacgaggacaatgacatattatggtgtgtcaaccacgatactttccccttccagaaaccaatgatggagactcagatgacagctggtgttgacgggcactcgtgggctttgagcgcaattgatgagttgaaggtagataaaattatcacacctctgaataaggatcatattcccatcacagactcccctgtggtagtacaacagcatatgctgcccccgaagaagttcgtgctactcagtgcccaaggttctctcatgtttcacaagctgaggccagtggaccagcttcgtcatcttcttgtgtctaacgttggtggggatggagaggagatcgaaaggttcttcaagctgcaccaggaggaccaggcttgtgctacttgcctgattctcgcatgctccacggccgcctgcgatcgggaagtgagcgcgtgggccactcgtgcatttttccgatatgggggcgaagcacagatgcggtttcctaccactttaccccctcctagtaacgtggggccgattcttgggagcccagtgtattcatcttctcctgtgccgagtggtagcccctaccctaatccaagcttcttaggcactcctagccacggaatccagccacccgccatgtcgactccggtttgcgccctcgggaatcccgctactcaggctaccaatatgtcttgcgtgacagggcctgaaatcgtatattccggaaaacataacgggatctgtatctatttttcacgcatcatgggtaacatctgggatgcatcattggttgttgaacggatatttaagtctggcaatcgcgaaattactgctatcgagagttctgtaccatgccaacttctggaatctgtgctgcaggaactgaagggtctgcaggaatttcttgacagaaattcgcagtttgccggcggccccctcggaaatcccaatactacagccaaggtccagcagagactcatcggctttatgagacctgagaacggaaatccccagcaaatgcagcaggaattgcagagaaagttccatgaggcccagctgagcgagaaaatcagcttacaggctatccaacagctggtgaggaagagttatcaggcactcgcattgtggaaacttctctgtgaacaccagttcaccataattgtcgcagagttgcaaaaggagctgcaggaacagctcaagattacgacgttcaaggatctggtgatccgtgataaggagcttactggggcactgattgcaagcctgattaactgctatatccgcgacaacgccgccgtggacgggatatcactgcatttacaggatatctgtcccctgctctatagcaccgatgacgctatttgttcaaaagccaatgagcttctacagagatccagacaggttcagaacaagacagaaaaagaaagaatgctacgagaaagcctgaaggagtaccagaagatttctaatcaggtcgacctcagcaacgtgtgtgcacaataccgtcaggtcagattctacgagggcgtggtggaactgagtctgactgcagcagagaaaaaagaccctcaggggctgggcctgcacttctataagcacggcgaacccgaggaagacatcgtaggactccaggctttccaggaacgcctgaattcctataaatgtataacagataccctccaagagctggtaaaccagtccaaagccgcgccgcagtctcccagcgtgccgaagaagcccggaccccctgtgctgagttctgatcccaacatgctgagtaatgaggaggctggccaccactttgagcagatgctgaaactctcacagagatctaaagatgagctatttagtattgcattgtataactggctcatacaggtggacctcgccgataagttattgcaggtggccagtccttttctcgagccccatttagtgcggatggccaaagtagatcaaaacagagtgcgctacatggacttgttgtggagatattacgaaaaaaacaggagtttttccaatgctgcccgcgtcctgtctaggctagctgatatgcatagtacagagatatccttgcagcagaggcttgagtatatcgctcgcgctatcctgagtgctaagtcctcgaccgccatttcttcaattgctgcagatggcgaattcctccacgaattggaggagaaaatggaggtagcacgtatccagcttcagattcaggaaactctgcaacgccaatacagtcaccactcaagcgtccaggacgctgtcagtcagcttgactccgagttgatggacattaccaagctgtatggcgaattcgcagatccctttaagcttgctgagtgtaaactcgcgattatacactgcgccggttactctgatccgatactcgtgcagaccctgtggcaggatattatagaaaaggaattgtcagattcggtgacactttcaagcagcgataggatgcatgcccttagcctaaaaattgtcctcctaggaaaaatttacgccggaacccctcgcttctttccacttgactttattgtccagttccttgagcagcaggtctgcacattgaactgggatgtgggtttcgtcatacagaccatgaacgagattggggtgccattaccaaggcttctcgaagtgtacgaccagctgttcaaatcgcgggaccccttctggaatcgcatgaagaaaccattgcacctgctagattgtatccacgtccttctgatccgctacgtagagaacccatctcaggtccttaattgcgagcgccgcagatttacaaatctttgtctggacgccgtctgtggctacctggtggaactacagtcaatgtctagcagcgtggcagtacaggccatcacgggaaatttcaaatccctgcaggcgaagctcgagagactgcattag

SEQ ID NO: 197911 - DNA, 4062 bp, synthetic construct
  misc_feature 1..4062: note = Description of Artificial Sequence: Synthetic coding sequence
  source 1..4062: mol_type = other DNA
atgtaccccgacctgagcgagctgctgatggtgagcgcccccaacaatcccaccgtgtcgggcatgagcgatatggattaccccctccagggaccaggcctcctttctgtgcccaacctcccagagattagtagcatcagaagagttccactgccgccagaactcgtcgaacagttcggccatatgcaatgtaactgcatgatgggagtgtttccccctatcagtagggcctggttaacgatcgactccgacatcttcatgtggaattatgaggacggcggtgacctcgcctacttcgacggtcttagtgagaccatcctcgccgtgggactggtaaaaccaaaagcaggaatttttcagccacacgtgagacatctactcgttctggctacccccgtggatatagtaatcctaggcctgagttatgcaaacctgcaaactggaagtggtgtgctgaatgactccctctcgggcggtatgcagctactgccagacccactttactccttgccaaccgacaatacttatctcttaacaattacgtctaccgacaacggccggatatttctggcggggaaggatggatgcctctacgaggtcgcctaccaggctgaagcaggttggttttctcaacgttgcagaaagataaaccattcaaagagttctctgtccttcctggtgccttctctcctgcagtttacattctcagaggatgaccccattcttcagattgccattgacaactcccgcaacatcctttatacacgctcagaaaagggggtgatacaggtgtacgatctgggacaggatgggcaagggatgtcgcgggtggcctctgtaagtcagaatgccatcgtatcagccgctggcaatatagcccggacaatcgacagatccgtgttcaaaccaatcgttcagattgccgtgatcgagaatagcgagagtcttgactgccagttgctggccgtgacccatgcgggcgtacgcctctatttctcaacatgtccctttcgacaacctctggcgagacccaatacgctgacactcgtgcacgtcaggctgccccctggctttagcgcatcatccactgtggagaagcctagcaaggtacacagggctctgtactccaaggggatcttgctcatggcagcctcagagaacgaagacaatgatattctgtggtgcgtgaaccacgataccttcccctttcagaaacccatgatggagacacagatgacagccggtgtggacggacacagttgggccctgtccgctatcgacgaactgaaagtggacaagattattacccccctgaacaaggaccatattcctattaccgatagtccagtggtagtgcagcagcacatgctgcctcccaagaaattcgtactgctctcagcccaaggatccctcatgttccacaaattgcggcccgtggatcagctcagacacctgctcgtttcgaatgttggcggggacggagaagaaatcgagcggttttttaaattgcaccaggaggatcaggcctgtgccacctgcctcatcttagcctgctcaaccgctgcctgcgatcgcgaagtatctgcatgggccactagagcatttttccgctacggcggagaggcccagatgagatttccaacaacgctgcctcctccttctaatgtgggacccattctgggctcccctgtgtactcaagcagccctgtcccttccggttcaccgtatcctaatccatcgttcttgggcaccccctcacatggtatccagccaccagccatgtccacccctgtttgcgcattaggaaatcccgccacacaagcaaccaatatgtcatgcgtgaccggtcccgaaattgtgtactctggaaagcataacggaatctgtatctacttctctagaatcatgggaaatatttgggacgcaagcctggttgtggagcgcatttttaagtccgggaacagagagatcactgccatcgagtcaagtgtcccctgtcagctgctcgagagcgtattacaagagctaaaggggctccaggagttcctggatcgcaactcgcagtttgcgggggggcctttgggcaacccgaacacaacagcgaaagtgcaacagagactgatcggattcatgcgacctgagaatggtaatccacagcagatgcagcaggagctccagagaaagttccacgaagcgcagctctcagagaaaattagtctccaagccatccagcagcttgtgcgcaaaagctatcaggctcttgctctatggaagctcctgtgtgagcaccaattcaccatcatcgtggcagagctgcagaaggagctgcaggagcagctgaagatcactaccttcaaagatcttgttatccgagacaaggaattgactggcgccctcattgcctccctgataaactgttacatcagagataacgcggctgttgatggtatttcccttcacttacaggatatctgccctctactgtattctactgatgacgcaatctgttctaaagcgaatgagctactgcaaagaagtcgccaagtgcagaacaagactgaaaaagaacggatgctaagagagtctttgaaggaatatcagaaaattagtaatcaggtcgatctgtcgaacgtgtgtgcccagtacaggcaggtgcgtttctatgaaggggtagtggaattgagcttaacagcagccgagaagaaagacccccagggactgggtctccacttttataagcacggagagcctgaggaagatattgtaggactgcaagcttttcaggaaaggctgaactcatacaaatgtatcacagacactctccaggaactggtgaaccaaagcaaggccgccccccaatcgccctctgtgcccaaaaagccaggacctcccgtgctgtcctccgaccctaatatgctatccaatgaggaggcaggccaccacttcgagcagatgttaaaactgtctcagaggagcaaagacgagctgttctcgatcgcgctctataactggctgattcaggtggacctggcagacaaactgcttcaggttgcaagtccatttctggagccgcatcttgttcggatggcaaaggtggaccagaaccgtgttcgctatatggatcttttatggcgatattacgaaaaaaatagatcgttttccaatgctgcaagggtactcagcagactggctgatatgcactccaccgagatctccctgcaacagcggttggagtatattgctcgggccattctttccgcaaagtccagcacagccattagtagcatcgcggctgacggcgaattcttgcacgagctggaggagaagatggaggtcgctagaatacaactccaaatccaagagactctgcaaaggcagtactcccatcactcctccgtgcaggacgccgtcagccagctggatagtgagcttatggacataaccaagctgtacggcgaattcgccgaccctttcaagctcgccgagtgtaaactggctattatacattgcgcaggctattcagaccccattttggttcaaactctctggcaggatatcattgagaaggagctgtcagacagcgtcactctctcatcctccgatagaatgcacgcactatctcttaagatcgtgctgctagggaagatctacgcagggacgcctaggttctttcctctggattttatagttcagttcttggagcaacaggtgtgtacgctgaattgggacgtgggattcgttattcagactatgaatgaaattggcgttccactcccacgacttctggaagtgtatgatcaacttttcaaatctcgggacccattttggaaccgcatgaagaaacctctccacttgctggattgtatccacgttctgctcataagatacgttgagaatccatcccaggtgttgaactgtgagaggagacggttcacaaatctgtgcctggatgccgtctgcggttatttggttgagctgcaaagcatgagttcctctgtggccgtccaggctatcaccggcaacttcaagagcttacaggcaaagctcgaacgtcttcactag

SEQ ID NO: 197912 - DNA, 3984 bp, synthetic construct
  misc_feature 1..3984: note = Description of Artificial Sequence: Synthetic coding sequence
  source 1..3984: mol_type = other DNA
atgcccagcagcctgctgggcgccgccatgcccgccagcaccagcgctgcggcactccaggaagctctggagaatgcagggcgcctcatcgatagacaactgcaggaggatcgaatgtatcccgacctaagcgaactgttaatggtcagcgctcctaacaacccaacggtgagcggaatgtccgacatggattaccctctacagggtcctggtttattgtcagtgcccaacctgccagagattagttctatcagaagagtaccacttccgccggagcttgtggaacaattcggacatatgcagtgtaactgcatgatgggggtctttcccccaatatcaagggcttggttaacaatagattcagacatctttatgtggaactacgaagatggcggggatttggcctacttcgatgggctttcagagactatcctggccgtgggtttggtcaagcctaaggccgggatctttcagccccatgttaggcacctgctagttctggcaactcccgtcgacattgttattctgggattgtcttatgctaatctccagactgggtcgggggtgttgaacgactcgctgtctgggggtatgcagttgctgccggacccgctgtacagcctccccaccgacaacacttacctgttgacaatcacatccactgacaacggccggattttcttagcaggtaaggacgggtgtctgtatgaggttgcttaccaggcagaggcagggtggttctcccagcggtgccgcaaaatcaatcattctaaatctagtctgtcatttcttgtcccctcgctgctgcaatttacattctccgaggacgacccaattttgcaaattgcgatagataactctcgaaatatcctgtataccagatctgagaagggcgttattcaggtctatgatttgggccaggacggccagggaatgagtcgggtggctagtgttagccagaatgctatcgtctccgcagccgggaatattgccaggaccatagaccggtctgtctttaagcctatcgtacaaatcgccgtcattgagaatagcgagtctcttgattgtcagctgctggccgtgacccatgccggggtcagactctattttagtacatgccccttcagacagcccctcgctcgacccaatactctgactctggtacatgtgcgtctgccacctgggttcagtgcaagcagcaccgtagagaagccaagtaaggtgcacagggctctctacagtaagggaattctgctgatggctgccagcgaaaacgaggacaacgacattctgtggtgcgtgaatcatgacacatttccattccagaagcccatgatggagacgcagatgacggccggggtggatggccactcctgggccctctctgccatcgacgagctaaaagtggacaagattattactcctctgaataaggatcacatacctataacagacagccccgtggttgtgcagcaacacatgcttcctcctaaaaagttcgtccttctgtctgcccagggcagcctgatgttccacaagttgagacccgttgaccagcttaggcatctcctggtctcaaatgttggcggcgatggagaggagatcgagcgatttttcaaacttcatcaagaggaccaagcctgtgcaacctgtctgattttggcttgctctactgctgcatgtgatcgcgaggtgtcagcctgggcaaccagggccttttttagatacggaggggaggcacagatgcgctttccgacaacactgccccctccaagcaatgttggccccatcctaggttcgcctgtatatagttcttccccagtgcctagcggatcaccatatcctaacccctcatttttaggcacgccttcccacgggatccagccacccgcgatgagtacccctgtatgcgctttaggtaatcctgcaacccaggccactaatatgagctgcgtaaccggacctgaaatcgtgtactctggcaagcataatggaatatgcatctacttcagcagaattatgggcaatatctgggacgccagcctggtcgtagagcgcatcttcaaatctgggaatagggaaattactgccatagagagctcagtgccttgccagttgctcgagtctgtgctgcaggagttgaaagggctccaggagttcctcgaccgaaatagccagttcgcaggcggcccgctcgggaatcccaacacaaccgctaaggttcagcaacgcctaatcggcttcatgcggcctgagaacggtaatccacagcagatgcagcaggaactccaaagaaaattccacgaagcccaactctctgaaaagatttccctgcaggccattcagcagctggtccgtaaatcttatcaggccttagcactgtggaagctgctttgcgaacatcaatttactatcatcgtcgccgagcttcagaaggccaacgaactgcttcagcgaagtaggcaagtgcagaataaaacggaaaaggagcggatgcttagagaatcgctgaaagaatatcagaagatcagcaaccaggtagatctgagcaacgtttgtgcccagtaccgccaggtgcgtttctacgaaggggtcgtggagctgtccctgaccgctgccgagaagaaggacccacaggggctgggcctccatttctacaaacatggggagcctgaggaggacatagtggggcttcaggcgtttcaggagcggctaaattcctacaagtgtatcacagacacactgcaagaactagtaaatcagagcaaagcagcaccccagtcacccagtgtccccaaaaaacctgggccccccgttctgtcatccgatccaaacatgctctccaacgaggaagccgggcaccatttcgaacaaatgctgaaactgtcccagaggagcaaggacgagttgttcagcatagccctctacaattggctcatccaggtggatctcgccgataaattactgcaggtggcctcaccatttttggagccacatctcgttagaatggccaaggtggaccaaaaccgggtcagatacatggatcttctctggcgttattacgaaaaaaataggtcctttagcaatgcagccagagtgctcagccgcctggcagacatgcactcaacggagatttctctgcagcagagactggagtacatcgcaagggctatcttatctgctaaatcttccaccgccatatctagtattgccgccgatggggagttcctccatgaactggaagaaaagatggaggttgctaggattcagctgcagatccaagagaccttgcaacggcaatactcccaccattcttcagtacaggatgcagtttcacagctggactctgaattgatggacatcactaaactttatggggagtttgccgacccgttcaagctcgctgagtgtaagttagccatcattcattgtgccggctactctgaccctatcctggtccaaactctatggcaagacataatcgagaaagagctgtcagacagtgtaaccctgtccagcagtgatcgaatgcatgccctttccctgaaaatcgtgctgctggggaagatatacgcgggtaccccccgattctttcctttagactttattgttcagttcctggaacagcaagtctgcactcttaattgggatgttgggttcgttatccagactatgaacgagatcggagtccccctgccccgcctgctggaagtgtacgatcagttgttcaaatcacgcgacccattttggaatagaatgaaaaagcccctgcacctgctggattgtatacatgtccttctcatcaggtatgtagagaatccatcacaggtccttaactgtgagaggaggcgatttacaaacctgtgccttgatgccgtttgcggctacctggtggagctccaatcgatgtcttcatctgttgcagtccaagctattaccggcaatttcaagtcgttgcaggcgaagctcgaacggctacactag

SEQ ID NO: 197913 - DNA, 4311 bp, synthetic construct
  misc_feature 1..4311: note = Description of Artificial Sequence: Synthetic coding sequence
  source 1..4311: mol_type = other DNA
atgctgcacctgagcgccgccccccccgcccccccccccgaggtgaccgccacagcacgaccttgtttgtgttctgtggggcgccgcggcgacggtgggaaaatggctgccgctggcgcgctggaaaggtcttttgtggaactgagcggtgccgaaagggaacgcccgcggcatttccgcgagtttaccgtgtgttccattggaaccgcaaatgctgttgcaggcgccgtcaaatattcggagtctgccggcggcttttactacgtcgaatcgggcaagctgttcagcgtgactaggaatcgatttattcactggaaaacaagcggggataccctggagttgatggaggagtcactcgatataaatctgctgaataatgccatacgattgaagttccaaaactgctcagtgctgcccgggggcgtttatgtatctgaaacgcagaatcgagtgatcatcctgatgttgacaaaccagacggttcacaggctcctcctcccccatccctccaggatgtatcggagcgagctggttgtagacagccagatgcagtcaattttcactgacatcggaaaggtggactttacagacccgtgcaattatcagttaattccagccgtccctgggatctctcccaactctactgcttcgacagcctggctgagtagcgatggagaggcgcttttcgcgctaccatgtgctagcggcggtatcttcgtcctcaagctgcctccatatgacattcctggaatggtgtccgtcgtcgagctgaagcagtcctcagtgatgcaacgcttgctcacgggatggatgcccactgccattcggggagaccaatccccctccgaccgcccgctcagcttagccgttcactgcgtcgagcacgacgcattcatcttcgctctctgccaggaccataaactgcgcatgtggtcttacaaagaacagatgtgccttatggtggccgatatgctggagtatgtgccagtgaagaaggatttgaggctgactgcgggtacaggtcacaagctccggctggcctattcacccaccatgggcctgtacttgggcatctatatgcatgctccaaaaagaggccaattctgcatttttcaattggtgagcacagagtcgaacagatactcccttgatcatatatcttctctctttacttctcaggagaccctgatcgacttcgcattgaccagtaccgacatttgggctctgtggcacgatgctgaaaatcaaactgtagtgaagtacatcaatttcgagcacaatgtggctggccagtggaacccggtcttcatgcagccactcccagaggaggagattgtgatccgggatgaccaggatccacgggagatgtatttgcagagcctctttacccccggacagttcaccaatgaggccctatgcaaagcacttcaaattttctgccgaggaaccgaacgtaatctggacctttcatggtcggaactgaagaaagaggtcacgctagccgtggagaacgagcttcaaggatcggtgacagagtacgagttctctcaagaggagttcagaaatctccagcaagagttttggtgcaaattctacgcatgctgcctgcagtatcaggaggcccttagtcacccgctggcactccacttgaatccccacacgaacatggtgtgcctgcttaaaaaaggctacttgagcttccttataccttcctctctggttgatcacctgtacttgttaccctacgagaatctcctaaccgaagacgagactaccattagcgatgacgtagatatcgctagagacgtaatctgcctgatcaagtgtttgaggctaatagaggaaagtgtaacagtcgatatgtccgtcatcatggaaatgagttgttacaatttgcaaagccctgagaaagctgcagagcaaatcctggaagatatgatcacaattgatgtggagaacgttatggaagacatttgcagcaaactccaggagattaggaatccaatccacgcaatcggattgttaattcgcgagatggattatgagaccgaggtcgaaatggagaagggctttaaccccgctcagccgctgaatatccgtatgaatttgacacaactctacggatctaatacagccgggtatatagtttgcaggggcgtgcataaaatcgcaagtactagattcttgatttgccgtgacctccttatcctgcaacagctgctgatgagactgggtgatgcagtcatctggggtacaggccagcttttccaagctcagcaggatctcctccaccgcaccgcgcccctgctcctgtcttattacctgatcaagtggggttcagagtgcctggccaccgatgttccattggacactctggaatcgaatctgcaacatctcagcgttctcgagttaacagattcaggtgccctcatggctaatcggttcgtgagcagtccacaaacaattgtggaactgtttttccaagaggtggcacgtaagcacatcatctcacatctcttttcacaacctaaggccccactctcccagacaggccttaattggcccgagatgattaccgcaattacctcttatctactgcaacttctatggccctctaatcccgggtgcttgttcctcgagtgtttgatgggaaattgccagtacgttcaactccaggactatatccagttgctccacccatggtgtcaagtgaatgttggttcctgtagattcatgctgggccgatgctatctggtaaccggggaggggcaaaaagcactggaatgtttttgccaggcggccagtgaagtggggaaagaggagttcctggatcgtttgatcagatccgaggatggcgagatcgtaagcacgcctagactccagtattacgataaggtactaagactgctcgacgtcattggtctccctgagctcgtgatccagctagctacctccgcaatcacagaagctggggatgattggaaaagtcaggcaacgctgcggacctgcatattcaaacaccacttagacctcggacataactcacaagcttacgaggcccttacacaaattccggatagcagtcgtcagctggattgtttgaggcaacttgtggttgtgctatgtgagcgttctcagctgcaggacctggttgagtttccttatgtgaacctgcataacgaggtcgtcggcattatcgagagtcgggctagagccgtcgatcttatgacacataactactacgaactcctctatgcatttcatatctacaggcacaactacagaaaggcgggtacagttatgttcgaatacggaatgagactgggaagggaggtgaggaccctccgcggactcgagaaacaaggaaactgttatctggccgctctgaattgccttcgccttatcaggcctgagtacgcctggattgtgcagccggtgtcaggagcagtctacgatcgaccaggtgcttctcctaaacgcaatcatgacggagagtgcaccgcagcaccgactaaccggcagatcgaaattctggagctcgaggacctcgagaaagaatgttccttggcccgcatacgcctgactttagcccaacacgacccaagtgcagtcgctgtcgcagggtcctccagtgccgaggagatggtgacactgttggttcaggcaggcttgttcgacactgccatatccctgtgtcagacattcaaactgcccctgacacctgtttttgaaggactcgcatttaaatgcatcaagctgcagttcggaggcgaggccgctcaggctgaggcctgggcttggcttgcagcaaatcaacttagctctgtgatcactactaaagagtctagcgctaccgatgaagcctggaggctgttgagtacatacttggagcgttacaaagttcagaataatctgtaccatcactgcgtcattaataagctgctctcccatggcgtgcctctgcccaactggcttatcaacagctataagaaggttgacgccgctgaactgctgcgtctgtatctcaactatgacttattggaagaggccgtggacttggtcagtgagtacgtggatgctgttctaggaaagggccatcagtacttcgggatcgaatttcccctatccgctactgctcccatggtgtggttgccctattccagtattgatcagctcctgcaggcactgggcgagaattcagcaaactctcacaacattgcgctttcacagaagatcctggacaagctggaggactatcaacagaaagtggacaaggctacgcgagacctgctatatcgacggactctgtag

SEQ ID NO: 197914 - DNA, 1452 bp, synthetic construct
  misc_feature 1..1452: note = Description of Artificial Sequence: Synthetic coding sequence
  source 1..1452: mol_type = other DNA
atggtgagcgtggtggagctgaagcagagcagcgtgatgcagcggctactcacagggtggatgccaaccgccatccgcggagaccagtcgccttctgacagacccctatccctagctgtgcattgtgtggaacacgacgcctttattttcgctctgtgccaagatcataagctaagaatgtggagctacaaggagcagatgtgtttgatggtggcagacatgctggaatacgtccccgtgaagaaggacctgcggctgactgccggaaccggccataaacttaggcttgcttattcacccacaatgggcctgtacctggggatttacatgcacgctccaaagcgggggcaacgtcgcggttttgctatgcttcctggactcaaacttttgagctcgtccagcccacctacaagcgctagtcagtgcgcaggaataaccagcgtaaaccacagcacacagcccgagttctttttctgtatttttcagctcgtaagtacggaatctaatcgatattcactcgaccatataagcagcctctttacctctcaagagactttaatagactttgcactgacaagcacagacatctgggcgctgtggcacgacgctgagaaccagactgtggtcaagtatatcaacttcgaacacaacgtcgctgggcagtggaatccggtcttcatgcaaccactgcctgaggaagagattgtgatcagagatgatcaggacccccgggaaatgtacctccaaagcctattcacacccggccagtttactaatgaggcgctttgcaaggctttgcagattttctgtagaggcaccgagcgaaacctggacctgagttggagcgaactgaaaaaagaggtcaccctggccgtcgaaaatgaacttcagggtagtgttacagagtacgagttctcacaagaggagttccggaatctacagcaagaattctggtgtaagttctatgcatgctgtctacagtaccaggaggcactgtcacatccactcgcgttacatctgaatcctcatacgaacatggtctgtctgctgaaaaaaggatatctatccttcctgatcccaagctcactcgtggatcacctttatctcctgccatatgaaaatctgcttacagaggacgaaacaacgattagtgatgatgtagatatagccagggacgtgatatgtctgatcaagtgcctgcggttgattgaggagagcgtcaccgtagacatgtccgtcataatggagatgtcttgttataatttgcaaagccctgagaaggccgccgagcaaatactggaggacatgatcaccatagatgtagagaatgttatggaagacatatgctctaagctgcaggagattcgaaatcctattcatgccatcgggctacttatacgtgagatggactatgaaacagaggttgagatggaaaagggattcaacccatag

SEQ ID NO: 197915 - DNA, 675 bp, synthetic construct
  misc_feature 1..675: note = Description of Artificial Sequence: Synthetic coding sequence
  source 1..675: mol_type = other DNA
atgctgcacctgagcgccgccccccccgcccccccccccgaggtgaccgcaacagcaagaccctgtctgtgctccgtgggccgcaggggcgacggcgggaaaatggccgccgccggggctctcgaaagaagttttgtggagctgtctggagccgagcgggagcgcccaagacacttcagggagttcaccgtctgctccatcgggaccgccaacgcagttgccggcgcggtgaagtactcagaaagtgcaggcggtttttactatgtggaaagtgggaaactgttttcggtgacccggaaccggttcattcattggaagacctcgggtgacacattggaactgatggaagagtctctcgacatcaatctgctgaacaatgccattcggctcaagttccagaattgctcggtgcttcccggcggtgtgtacgttagcgaaacacaaaatcgagtcataatattaatgttgactaaccagaccgttcatcgactgctcttgcctcatccaagcaggatgtacagaagcgtgtcttggctctctgccatcagcttcattagccagatcactctcggcgtgaccaatgtagtgttagagaggtgcttgcttgaactcaaagaaatatggattctggtcattccccaccaggcatatttcgattcgtacagattaaaatag

SEQ ID NO: 197916 - DNA, 6039 bp, synthetic construct
  misc_feature 1..6039: note = Description of Artificial Sequence: Synthetic coding sequence
  source 1..6039: mol_type = other DNA
atggccacccccctggccgtgaacagcgccgccagcctgtggggcccttacaaggacatctggcataaggtcggcaatgcactctggaggcggcagcctgaggccgtccaccttctggacaaaattctcaagaagcacaagcccgatttcatttcgttgtttaaaaatcctccgaagaatgtgcagcaacacgaaaaggtccaaaaggcttccacagagggggtggcaatacagggccagcaaggaactagactgctccccgagcaactaattaaagaagctttcatactttctgacttgttcgatattggcgagctggccgccgtagaattgctgcttgctggtgagcaccaacagccccactttcctggtttgactagaggccttgtcgcggtcctgctgtattgggatgggaagaggtgtattgccaactccttaaaggccttgatacaatccagacgtgggaagacctggacactggagctatctccagagctggcatctatgacaactcggttcacagatgagctgatggaacaggggctgacctacaaggtgctaacgctggtttcccagattgacgtgaacaacgagttcgagaaattacagcgcgaacgcggcttaggatctgagaagcacagaaaagaagtttctgaccttatcaaagaatgccgtcagagtctggcggaaagtctctttgcctgggcctgccagtccccactgggcaaggaggacacgttgcttcttataggacatcttgagcgagtcacggttgaagctaacggctctctggatgctgtgaacttggccttacttatggccctcttgtattgcttcgatatctcttttatcgaacagagcacagaagagcgagacgatatgatccaccagctgccactccttactgagaagcaatatatcgcgaccattcattctcggcttcaggactctcagctgtggaagctccccggacttcaggccactgtgcggctcgcatgggccctcgcactaagaggcattagccagctgccagatgtcactgccctcgctgaattcaccgaagccgatgaggccatggctgagctcgctattgccgacaacgtgtttcttttcctcatggagtccgtggtggtatccgagtacttttaccaggaagagttctatataaggcgcgtgcacaatctgattacagacttcttggcactgatgcctatgaaagtcaagcagctgcgcaaccgggcagatgaggacgctcggatgattcatatgtccatgcagatgggtaacgaaccccccatcagtttgagaagagacctcgagcatcttatgctgctgataggtgaactgtacaaaaaaaacccatttcacctcgagcttgctctggaatactggtgtcccacagaacctctgcagaccccgacaattatgggatcatatttgggtgttgcccaccagcgccctccccaaagacaagtggtacttagtaaattcgttcgacagatgggagatcttctaccccccacaatttacattccatacctcaagatgctgcagggactcgccaatggtccacagtgcgcccactattgcttctctctgttgaaagtgaacggctcctcccatgtggaaaatatccagggcgcgggcgggtcacccgtgtcctgggagcatttcttccacagtctcatgctttatcacgagcatctgcggaaggacctaccaagtgcagacagtgtccagtatagacatcttcctagtagaggcatcacacaaaaagaacaggacgggttgattgcctttctacaactgacaagcacgattatcacctggagcgagaatgcccgccttgccctgtgcgagcacccccagtggacccccgtggtcgtcatattgggactgttacaatgttccattccaccggtgttaaaagccgaactgctgaaaacactcgctgcctttggaaaatcccctgagattgcggcctccctttggcagagtctagagtacactcagattttgcagacagtgaggattccatcccagagacaggcaattggaatcgaagtcgagttgaacgagatagaatcgcggtgtgaggagtatccattgactcgggccttctgtcaattaatcagcactctcgtggaatctagttttcccagtaacctgggagctggcctgcgaccacccgggttcgatccttacttgcagtttcttcgcgactccgtgttcctgcgcttccggaccagggcctaccgccgggccgcggagaaatgggaggtggccgaggtggtgctcgaagttttctataaactgcttcgcgattatgagccccagctcgaagactttgtggaccaattcgtggaactacagggagaagaaattatagcgtacaaacctcccggcttttctctgatgtatcacctcctaaacgagagccctatgttggaactggcactgtctcttctggaagagggcgtgaaacagctggatacctacgctccttttccaggtaagaagcacttagagaaagccgtacagcactgtctggctctgctgaacctgacactgcaaaaggaaaatctatttatggacctcctgagagagtcacaactggccctcatcgtttgcccgctcgaacaacttctccaaggcattaacccccgcacaaaaaaggctgataatgtagttaatatagccaggtacctgtaccatggcaacactaaccccgaactggcatttgaatcagcgaaaatcctgtgttgtatctcatgtaatagtaacatacagatcaagctggtcggggatttcactcatgatcaatccatatcacagaaactgatggcaggcttcgtagaatgcttagattgtgaagacgctgaggagttcgtaaggctggaggagggatcagagctggagaagaagctcgtagcaataagacacgaaacccgcatccacatcctgaacctgcttatcaccagcttggaatgcaaccctcctaatctggccctgtatctcctgggctttgagctgaagaagcctgtgtcgactaccaacctccaggacccgggcgtgctgggctgcccccgaacctgtctgcatgccatcctcaatatcttggagaaggggaccgagggccgcacaggccccgtggcggtgcgagaaagtcctcaacttgctgagctgtgttatcaggtaatctatcaactctgcgcttgcagcgatacgagtgggcccactatgagatacctgcggacatcgcaggattttctgttctcccagttgcagtacctgccctttagcaataaggagtatgaaatatcgatgctgaatcagatgtcatggctcatgaaaacagcctccatcgaacttagagtgactagcctgaaccgacagcggtcccacacgcagaggctcctgcacctgcttctcgatgacatgcccgtcaagccctactccgacggcgagggcggcatagaagatgagaaccggtccgtgagtggattcctgcactttgatacagctaccaaagtgcgcagaaaaattctgaatattctggacagcatcgacttcagccaggaaatacccgagcccctccagcttgactttttcgaccgggcccaaatcgagcaggtgatcgcgaactgtgaacataagaatcttcgtggtcaaacagtgtgcaatgtgaaactactgcaccgggtcctcgtcgcggaggttaatgccctgcagggcatggcagccattggtcagcggcccttgcttatggaagaaatctcaaccgtgttacagtatgtggtgggacgcaacaagctgctgcagtgccttcacgccaaacgccacgccctggaaagttggagacaactggtagagattatcctgaccgcctgtcctcaggatctcatccaagcagaggacaggcagctgatcattagggacattctgcaggacgtgcacgataaaatcctcgacgacgaagctgcgcaggagcttatgcctgtggtggccggggcagtcttcaccctgactgctcatttgagccaagccgtgctgaccgagcagaaggaaactagcgtcctgggacccgcggaagcccattatgcgtttatgttggactcttgcttcacctctccgccgcccgaggagaatcctttagtggggtttgccagcataggcgattcatctctgtacattattttaaaaaagctgcttgactttatcctcaagacaggcggcggatttcagagagtgcgaactcacctctacggtagtcttctgtactatctccagattgcacaacgtccagatgagcctgacaccttggaagctgccaaaaaaaccatgtgggaacggctgacggcccccgaggatgtgttcagcaagctccaacgggagaacatagcaatcatcgaatcttacggcgccgcattaatggaggtggtgtgtagggacgcttgcgacggacatgaaattggacgcatgctcgcccttgccctgcttgatagaatagtttcagttgacaagcagcaacagtggctgctctatctatccaacagcggctatctgaaggtgctagtcgatagcctcgtggaagacgatcggaccctgcagtcccttttgacaccacaacctcccttgctgaaggccttgtacacttatgagtccaagatggcatttctaacccgggtggccaaaattcagcagggagccctagagctcctgcgatctggggtcatcgtccgactggcccagtgtcaggtgtatgacatgcggccggagacggacccccagtcaatgtttgggatgagggatcctccgatgtttattccaaccccagtggacagataccgccagatcttactgcctgccttacagctctgccaagtgatcctgacctcctctatggcccaacacctgcaggccgcaggacaagtgctgcaattcttaatctcccattctgacacaatccaggccatcctgaggtgtcaggacgtgtctgctgggagcttgcaagagctggctctgctcaccgggattatctcaaaggcagccctcccaggaattctgtctgagctagacgtggatgtgaacgaagggagcctcatggagctccaaggccacatcgggagattccagcgtcagtgcctgggcctcctgtccagatttggaggttcagatcgcctgaggcagtttaagttccaggacgataatgtagaaggagataaggtctcaaagaaggatgagatagagctcgccatgcagcagatttgcgctaatgtgatggagtattgccaaagcctgatgctgcagtctagcccaacgtttcagcacgctgtgtgcctgtttacccccagcttgagtgagacagtaaacagggacggccctagacaagatactcaggcacctgtggtgccttactggagattgccaggtctgggaataatcatctacctattgaagcagtccgccaacgattttttctcttattacgactcccatcggcagtctgtcagcaaactgcagaatgtggagcagttgccccctgacgaaatcaaggagctgtgccagtcggttatgcccgccggagtggataagatctcgaccgctcagaaatatgtgctcgctaggaggaggctggtgaaagtgataaataatcgggcaaagctcctgtctctgtgctccttcattattgaaacgtgcctgttcattctatggcggcatttagaatattatctcttgcactgcatgccgactgactctcaggattccctctttgcctcccgcactttgtttaaatcccggcggctgcaggatagcttcgcaagcgaaacaaatctagattttcgtagtggtctcgccattgtcagtcaacatgacctggatcagctccaggctgacgccattaacgcattcggtgaatccctccagaagaagttactggacattgagggactgtactccaaggtccgttcccgctacagctttattcaagcgctcgtgcgccggataagaggattactccggataagccgtaattag

SEQ ID NO: 197917 - DNA, 750 bp, synthetic construct
  misc_feature 1..750: note = Description of Artificial Sequence: Synthetic coding sequence
  source 1..750: mol_type = other DNA
atgagcctgcggaactacagcgagcgggaggtgagcgacctgatcaaggagtgtagacagagtctcgccgaatcactgtttgcgtgggcctgtcaatctcccctcggcaaagaagatacgctgttgctgatcggtcatctggagagagttaccgttgaagccaatgggtcattagacgcagtcaacctggctctccttatggcgctgctgtattgcttcgacattagtttcatcgaacagtccactgaagagcgcgacgatatgatccatcagctgccactgctgacggaaaagcagtatatcgccactattcactcgcggctgcaggatagccagctctggaaattgcctgggctccaggcaacggtccggttagcctgggccttggcgttgcggggtattagtcagttgccggacgtgaccgcgctggctgagttcacggaagcagacgaggccatggctgagctggctattgcagataacgtttttctgtttctcatggagagcgtagttgtcagcgagtacttctaccaggaggagttctacatacgacgcgtccacaatttgatcacggacttcctcgcacttatgcctatgaaggtaaagcagctgcgcaaccgagccgacgaggatgcgaggatgattcatatgtcaatgcagatgggaaatgagccacctatctcactgcgccgggaccttgagcatcttatgcttttagtttcgaaattactggtgctgagactcaattag

SEQ ID NO: 197918 - DNA, 5664 bp, synthetic construct
  misc_feature 1..5664: note = Description of Artificial Sequence: Synthetic coding sequence
  source 1..5664: mol_type = other DNA
atggccgcccggggccggggcctgctgctgctgaccctgagcgtgctgctggccgccggtccatcagctgctgccgcaaaactaaatatcccgaaggtcttgctgccttttacaagagccacgcgggttaatttcacattggaagcctctgaaggatgctacagatggctgagtaccaggcccgaagttgcatccattgagccccttggcctcgacgagcagcaatgcagccagaaggccgtggttcaagcccgcctcactcagcctgcccggctgacttccattatctttgccgaagatattacaaccggccaggtgttgagatgcgacgccatcgtcgatctgatacatgatatccaaatcgtatcgacaacgcgggaattatatttggaagattctccactcgagctcaaaattcaggcacttgacagtgaaggcaacaccttttctacactggccggcctggtgtttgagtggacaatagtcaaggacagcgaggccgatagattctctgacagtcataatgccctgaggatcttaaccttcttggagtcaacatatatccctccatcctatatttctgagatggaaaaagccgccaagcagggagacacaattctggtcagcggaatgaaaacaggcagttctaaattgaaggcccgaattcaggaagccgtgtacaaaaacgttaggccagccgaagttcgattgctgatcttagaaaatatactgttgaaccccgcatatgacgtgtatctcatggtcgggaccagtatccactataaagtccagaaaatccgccaaggcaaaatcaccgaactgtcaatgccttccgaccagtacgagctgcagctgcagaacagcatccccggccctgagggagacccagccaggcctgtggctgtccttgcccaggacactagtatggtgacagcactgcaactgggccagagctcacttgtactggggcacagaagcatcagaatgcagggcgccagtcgattacccaacagcactatatacgtggtggagccagggtatttagggtttactgttcacccaggtgaccgctgggtgctagaaacaggtcgactatacgagataaccatagaggttttcgataagttttccaataaggtatatgtttccgacaatatccgaatcgaaactgtcctgcctgccgaattcttcgaagtgttatctagtagccaaaacggttcttatcacagaattcgcgccttgaagaggggccaaacggctatcgatgccgcactgacctcggttgtagatcaagatggaggagtgcatatcttgcaggtgcctgtctggaaccagcaggaggtggaaatccacatccccattaccctttaccccagtatcctgaccttcccatggcaacctaagactggcgcctatcagtatactataagagcccacggcggatctgggaactttagctggtcttctagttcacatctcgttgcaacagttaccgtgaagggcgtgatgaccaccggctccgacattggattctcggtgatacaagcacacgatgtgcaaaaccctctacactttggggagatgaaagtctatgtgatcgaaccccattcgatggaatttgcaccatgtcaagtggaagctcgtgtggggcaagcactggaactcccgttaagaatatccgggttaatgcccggtggggcaagcgaagtcgtcactctgtccgattgtagccattttgatcttgctgtggaggtcgagaatcagggcgtcttccagcctctcccaggtaggctgccgcctggatcggagcactgttctggtattcgagtcaaggccgaggctcaaggctcgaccacattgctggtgtcctacagacacggtcacgtacacttaagtgctaaaattaccatcgctgcttacctccctctcaaggctgttgatccgagcagcgtggcacttgtgactctcggttcttccaaggaaatgctttttgagggtggacctcggccttggatactggagcctagcaaatttttccaaaatgtcacagccgaagacacagactccattggtctggctctcttcgcaccccattctagcagaaattatcagcaacactggatcctcgtgacctgtcaggccctcggagagcaagtaatcgccttgtcagtgggcaacaagcctagtctgacaaatccgtttccagcagttgaacctgccgtagttaagtttgtgtgcgccccaccaagtcgcctgactctggcacctgtgtatacttcaccccagctcgatatgtcttgcccgctgctacagcagaataaacaagtggttccagtgagcagccaccgcaatcctagattggacctcgccgcgtacgatcaagagggacgccgattcgataacttctcctctctttctatccagtgggagtcaaccaggccagtgttggccagtattgagcctgagttacctatgcagctggtatctcaggacgatgagtccggtcagaagaagctgcatggcctgcaggctattctcgttcatgaggcttcgggcacgacggccataaccgcgacagcaaccggctatcaagaatcccatttatcgtccgccaggacaaagcagcctcacgacccactggtgcccctgtcagcttccatcgagctcatcctggttgaggatgttcgcgtctcacccgaggaggtcacgatctataaccacccagggatccaggcagagctgagaattagagaagggtctggatatttctttctgaacacttctacagccgatgttgtgaaagtcgcctaccaggaagcacggggggtagcaatggtgcatccactcctccccggcagcagtaccattatgatccacgatttatgtctggtattcccagcgcctgccaaggcggtggtttacgtctcagatatccaggaattatatatacgcgtggtggacaaggtggaaatcggcaagaccgtgaaggcctatgtgagagtcctggatctccataagaagccctttctcgctaagtacttcccattcatggatcttaagctccgagccgccagtccgattatcacattggtcgccctggacgaggcactggacaactataccatcacctttctcatcaggggagtcgctattggtcagaccagcttgacagcctcggtgactaacaaggcaggccagcggattaactctgccccccagcagatagaggtcttcccgccattcagactgatgccacgcaaggtcaccctgctgatcggcgcaacgatgcaagtgacgtccgagggagggccacagccacaaagcaatatcctgtttagtatctctaatgagagtgtggcccttgtgagtgcagcaggtttagtgcaggggctagccatcgggaacgggacagtcagcgggttggtgcaggccgtagacgctgagaccggcaaggtggtgatcatctcacaggacctggtgcaggtcgaggtgctgctcttgagagcagtcaggattcgcgctccaatcatgcgaatgcggaccggtacgcagatgcccatttatgttaccggtataactaatcaccagaacccattcagtttcggtaacgccgtgccaggcttaacttttcactggtctgttacgaaaagagatgtcttggaccttcgggggaggcaccacgaggcgagcatacgactcccttctcaatacaatttcgcgatgaacgtgctcgggcgagtcaaaggtagaacagggctgagagtagtggtgaaagctgtcgatcctacaagtggtcagctctacggcctggcccgcgaactgtccgatgaaattcaggtgcaagttttcgaaaaattgcagctattaaatcccgagatcgaggcggagcagatcttgatgtctccgaattcttacatcaagcttcagactaacagagacggagctgctagtcttagttatagagtattggacggcccagaaaaggtgccagtggtccatgtcgacgagaaaggctttctggcatccggctccatgatcggtaccagcacaatcgaggtgattgcacaggagccctttggggcgaaccagacaatcatcgtcgccgtgaaagtttctcctgtaagctatttgagggtgtccatgagtccggtgcttcacactcagaataaagaggcactggtggccgtgccattaggcatgaccgtcactttcactgtccattttcacgataatagcggggacgtatttcatgcccattctagtgtgctgaatttcgccacaaaccgagatgactttgtgcagattggtaaggggcccaccaataatacttgtgtggtacgaaccgtcagtgtgggcctcaccttgttgagggtatgggatgccgaacatcccggactatctgatttcatgccgctgcccgtcctgcaagctatttcccctgaactatcaggcgctatggtggtaggggatgtgctctgtctcgcaaccgtcctgacaagcctggagggcctctccggaacctggtcctcttccgcaaattcgattttacacattgaccctaagacaggcgtggcggtggccagagctgtgggttcggtcactgtgtactatgaagtcgcgggccacctaaggacatacaaggaagtcgtcgttagtgtaccccagcggattatggctcgccaccttcaccctatccagaccagctttcaggaagctaccgcatccaaagtgatcgtggccgtgggtgacagatcctccaacctgcggggagagtgcacacctacgcagcgtgaggtcatccaggcactgcaccctgaaacacttataagctgtcagtcccaatttaagcccgcagtctttgactttccctcccaagatgtgttcacggtggagcctcagttcgacacagctttgggccagtacttttgtagtattaccatgcacagactgactgataaacaacgaaaacacctgtcaatgaagaagaccgcactggtcgtttcggccagtttatcaagcagccattttagtaccgaacaggttggggccgaagtaccgttcagccccgggctcttcgcagaccaggccgagatactgctgtccaaccattatacctcgagcgagatcagggtatttggcgcccccgaagtgctggaaaatctcgaagtcaagagcggatctcccgccgtgctggctttcgctaaggagaagtcctttgggtggccctcattcatcacatacacagtcggcgtactagatccagccgcagggtcacagggccccctgtctacaacattaactttctcgtcgcccgttactaatcaggcgatcgctatacccgttactgtagcattcgtggtggaccggcggggacctgggccttatggcgcatctctgttccagcactttctggatagctaccaggtcatgttcttcacactgtttgccctgctggcaggcacggcggttatgatcattgcttaccatacagtgtgtacacctcgtgacctagccgtgccagccgctctgacaccaagagccagtccaggtcatagtccacactactttgctgcttctagccccacctctcctaatgccctgccccccgctaggaaagcctcccctccttccggtctctggtctcctgcctacgcaagccactag

SEQ ID NO: 197919 - DNA, 6273 bp, synthetic construct
  misc_feature 1..6273: note = Description of Artificial Sequence: Synthetic coding sequence
  source 1..6273: mol_type = other DNA
atgggcgacgagatggacgccatgatccccgagcgggagatgaaggacttccagtttcgggccctcaagaaagtgcgcatttttgactccccggaggagttgccaaaggagcgatcatccctgctggccgtgtccaacaagtatgggctggtgttcgctggcggggcttccgggctgcagattttccctaccaagaatcttcttatacagaacaagccaggagatgatcccaacaagatcgtcgataaagtccaaggccttttggttcccatgaaattccctatccaccacctagccttatcctgtgacaacctaactctgagcgcatgcatgatgagcagcgagtatgggagcatcatcgctttcttcgatgtccggactttttcaaacgaggcaaaacagcagaagagacccttcgcttatcacaagttgcttaaagacgcaggtggtatggttatagacatgaaatggaaccctacagtgcctagcatggtggctgtttgccttgccgatggcagtatagccgtgctacaagtgaccgaaactgttaaggtgtgcgctacactgccaagcaccgtggcagtgacaagtgtgtgctggtcacctaagggaaaacagctcgctgttggcaagcagaacggcactgtggtgcagtacctcccaaccttacaggaaaagaaagtgattccgtgcccccctttctatgaatctgaccaccccgtgcgcgtgctggatgtcctctggataggtacctacgtattcgcaatcgtgtacgcagcagctgacggcacactagagacatctcccgatgtggtgatggccctccttcccaagaaggaggagaagcaccccgagatcttcgtaaatttcatggagccgtgttacgggtcatgcacagagcgacagcatcactactacttgagttatattgaagaatgggacctagtgttagccgcgagcgctgccagtacggaggtgtccatcctcgccaggcagtccgaccaaatcaactgggaaagctggttgcttgaagacagttcccgagccgaactgcccgtcactgataaaagtgacgatagcctgccaatgggagtggtcgtagattacacaaaccaagtggagattacaatctccgacgagaagaccctgccccccgcaccagtcctgatgctcttaagcactgatggagtgctatgtccattctacatgattaaccagaaccccggggtgaagagcttgatcaagacgccagaacggctcagccttgagggtgaaagacagcctaagtcaccaggatccacaccaacaacacctacctccagccaagccccccagaaactggatgcctcagctgcagcagctccggcatccctgcctccctcatcccccgctgcgcccatcgcgactttcagtcttctgcctgcagggggggcccccactgtgttttcatttggatccagctcactaaagtcaagtgctacagtgacaggcgagcccccttcctacagttccggctcagactcctcaaaggccgctcctgggccaggccccagcacgttttccttcgtccccccatctaaagccagtctggctcccaccccggctgcctcccccgtggccccgagcgccgcaagctttagctttgggtcaagtggcttcaaacctaccctggagtctaccccagtgcctagtgtttccgcccctaacatagccatgaagccaagtttccctccctccacctcagccgtcaaagttaatttgagcgagaagttcaccgccgctgctacatcaacccccgtgagcagctcccagtctgccccacctatgagcccattctcatcagcaagcaagccagctgcctctgggcctttgagccatcctacccccctgtctgcacctcccagcagtgtgccactaaagtcatccgtcctccccagcccaagcgggcggagcgcccagggtagcagttccccagttcccagcatggttcagaagtctcctcggatcactccaccggccgcgaaacccggctcaccccaggcaaagtcccttcaacccgctgtggccgaaaagcagggacatcagtggaaggacagcgaccctgtgatggctggaatcggcgaggagatagcgcactttcagaaggagttagaagagctaaaggcacgcacctctaaagcttgcttccaggtcggtacgagcgaagaaatgaaaatgctgcgcaccgaatccgacgacctgcataccttcctgttggagatcaaggagaccacagaatccctgcacggcgacatctccagcctgaaaacaaccctcctggaaggtttcgcaggggtggaggaagcccgagaacagaatgagagaaaccgggatagcggctatctgcacctcctgtataagcgccccctggatccgaaatcggaggctcagcttcaggagataaggagactgcaccagtacgtcaagtttgccgtgcaggatgtcaacgacgtgctggatctagaatgggatcaacatctggaacagaagaaaaagcagaggcacctgctcgttccggaacgcgaaacacttttcaatactcttgctaacaatcgggagattatcaatcagcagagaaaacgtctcaaccacctagtagactccctgcagcagctgagattgtataagcagacttccttatggtcactgagttctgctgtccctagccagtcgagtatccacagcttcgattctgatcttgagtcattgtgtaacgcccttttaaaaacgaccatagaatctcatacaaaaagcttgccgaaagtcccagccaagctttctccaatgaaacaggctcaactaaggaatttcctggctaaacggaaaacccctccggtcaggtcaactgcaccggcatcactgtcacgctccgcattcttatcccagcggtattacgaggatttagacgaggtgtcctctacgagttccgtgtcgcagtcccttgaaagcgaggatgctagaacctcttgcaaagatgatgaggccgtggtccaagcccctcgccatgcgcccgttgttaggacaccctctatccagcccagcctgctccctcacgccgcgcctttcgcaaaatcacacctggtccatggttcaagtcccggcgttatgggcacatcagtcgctacctcagcttctaaaattattccccagggtgctgactctacaatgctggcaacaaagaccgttaagcacggagcccccagcccctcacacccaattagtgcgcctcaggcagcagcagcggccgcactccggaggcagatggccagtcaggccccagcggttaatactctgactgagtccactttgaaaaatgtgccgcaggtggttaacgtgcaggaacttaaaaacaatcctgcaaccccgagcaccgcaatgggctcaagcgtgccgtacagtaccgccaaaactccgcatccggtgctcacccccgtggctgctaaccaggccaagcagggctcccttatcaatagcctaaaacctagcgggcctacccccgcatcgggacagctctccagcggtgataaagcgagtgggactgcgaagattgagaccgcagtcacctcgactccctcagcatccggccagtttagcaagccatttagtttctccccttctggcacaggctttaatttcggcattatcacgcccacccctagttccaacttcacggctgctcagggtgcaaccccctccactaaggagagctctcagccagacgccttttcctctggcgggggatccaaaccctcatatgaggctattccagaatcctctcctccctccggtattacttctgcttctaacaccacccccggcgaacctgccgcaagcagctcgaggcccgttgcaccttctggcacggctctttcgacaaccagcagcaagctcgagacccccccatctaaactcggcgaactgctcttcccaagctcattagcaggtgaaacactgggtagcttcagcggcctccgggtcggacaggcggatgacagcaccaaaccaacgaataaggccagttccacttcgctaaccagcacacagccaacaaagacatcaggggttccgagcggctttaatttcaccgccccacctgtgttaggaaaacacaccgagcccccggtaacatctagcgccacaacaacaagtgtcgccccccctgccgcaacttctacttccagcacagcggtttttggatcgctgcccgttacaagcgctgggtccagcggagttatcagtttcggcggtacaagtctgagtgcaggcaagacctcattttctttcgggtctcagcaaactaattctacagttcctccctctgcaccgccaccaacgacggcagccacgcccttacccacatcctttcccaccctgtccttcggcagcttactctcaagcgccaccaccccaagtctgccaatgtccgctgggagatctaccgaagaagctacttctagtgctttgcccgaaaaacctggagatagcgaagtgtcagctagtgctgcttccctgctggaagagcaacaatccgcacagctgccgcaggcaccacctcagacgtcagactcggtgaagaaggaaccagtgctagcacaaccagctgtttcaaattcaggcactgcggcatcatctacaagtctcgtggcactcagcgccgaggcaacccctgccactaccggagttcctgatgcacgcaccgaggctgtgcccccggcctcaagtttctctgtgcctggacagacagccgtgactgccgccgcaatctcatccgccggcccagtggctgtcgagacatcaagcaccccgatagccagcagtactactagcattgttgctcctggaccgtcagccgaggccgccgcctttgggaccgtgacatctgggtccagtgtgtttgcacaaccacctgcagcgtccagctccagcgcatttaaccaactcaccaacaacacagcaacagccccgtctgccacaccagtcttcggtcaggtagccgcttcaactgccccctctctgtttggtcagcagaccggatcaacagctagcaccgccgcagcaaccccccaagtttcctcatccggtttttcctcacctgccttcggcaccacggctcctggcgttttcggacagacaacttttggtcaggctagtgtgttcggacagagcgcttcttcagccgcgtcagtgttttcattctcccagcccgggttttcaagcgtgcctgccttcggccaacccgctagctccacacccacaagcacctcgggcagcgtgttcggagccgcgagtagtacttccagctcctcttcatttagctttggtcaatccagcccaaatactggggggggtctgttcggtcaaagtaacgctccagctttcgggcagagtcctggcttcggacagggagggtccgtctttggggggacttctgccgcaactaccacagcagccactagcggcttcagtttttgtcaggcatcggggttcgggtcatcaaatacgggatcagtatttggccaggcagcctccaccggcggcatcgtgttcgggcagcagtcaagttcttcctctggcagcgttttcggaagcggaaacactggccgtgggggcggctttttcagcggtctggggggcaaaccgtctcaggacgccgctaataagaaccccttctcttcggcaagtgggggatttggcagcaccgcaacatccaacacctcgaacttattcggtaattctggtgctaagacattcggggggttcgcctcatcctcatttggcgaacagaagcccacagggaccttttcttccggagggggttcagtggcttctcagggattcggcttcagctcacccaataaaactggagggtttggcgcggcgccagtttttggaagtccccccactttcgggggtagcccaggttttggcggcgtgcccgcctttggatctgcaccagcctttacctctccactgggttccacagggggcaaagtctttggcgaggggaccgccgcagccagtgcagggggttttggttttggcagctcaagcaacacaacctctttcgggacgttagcttcacagaacgcccctacattcggcagcctatctcagcagacatccgggtttggcacccagtcctctgggttctctggtttcgggagtggcacggggggcttctcgttcggcagtaataacagcagcgtccagggctttgggggatggcgaagctag

SEQ ID NO: 197920 - DNA, 6243 bp, synthetic construct
  misc_feature 1..6243: note = Description of Artificial Sequence: Synthetic coding sequence
  source 1..6243: mol_type = other DNA
atgggcgacgagatggacgccatgatccccgagcgggagatgaaggactttcagtttcgcgctctcaaaaaggtgcggatcttcgactccccagaagaactccctaaagaacgcagcagcttgcttgccgtgtcgaataagtacggcctggtatttgccggcggagcttctggcctacagatctttccgacaaaaaatctgttaatacagaacaagccaggggatgaccctaacaaaattgtcgataaggtacaggggctacttgtcccaatgaagttccccattcaccatctggccttgagctgcgacaacctgaccctcagcgcatgtatgatgtcttctgaatatggaagcatcattgcttttttcgacgtgcgcactttttccaacgaggccaaacagcagaaacgaccatttgcttatcacaaacttctgaaggatgctggcggcatggtgatcgatatgaagtggaacccaactgtcccttccatggtcgcagtctgcttggcagacgggagcatagctgttctccaagtgacagaaactgtcaaggtgtgcgcaacgctcccaagtactgtggctgttacctctgtctgttggtcccccaaaggtaaacagctggcagtggggaagcaaaatggaaccgtagttcaatatctccccacacttcaggagaaaaaagtcattccttgccctccattctacgagagtgaccaccctgtccgtgtcctggacgtgctgtggataggcacgtatgtttttgccattgtgtatgccgctgcggatggaaccctggaaacttcacccgatgtagtcatggcccttctcccgaagaaggaggagaaacaccctgagatatttgtgaacttcatggagccctgctatggctcctgcaccgagagacagcaccattactatttgtcttacatcgaggaatgggacctggtgctggccgcatcagcggcatcaactgaagtgagcatcttagcaagacagtccgatcagataaactgggagtcttggctgctggaagacagttctagagctgaattacctgtcactgacaagtctgacgactccctgccaatgggcgtggttgttgactacacaaaccaggtggaaatcaccatttccgacgagaagaccttgccgccagcacccgtgctgatgctactttcaacagatggcgtgctgtgccccttctatatgatcaaccagaacccgggtgtaaaatctcttatcaagacgcctgagaggctctctctggagggtgaacgacaaccaaaatcacctggatctaccccaacaactcccacaagcagccaagctccccaaaagcttgacgcatctgcagccgccgcgcccgcatcactgcccccgtcgtccccagctgcgcctatcgcaaccttttccttactccctgccggcggtgccccaacagtattctcgtttggaagtagctctctcaagagttcagctaccgtaactggggagccacccagctattcaagtggaagcgattcatccaaggcagccccaggccccggccctagcactttctctttcgtgcccccaagcaaagcgtcccttgcaccaaccccggctgcctctcctgtggcccctagcgccgctagtttttcattcggctctagtgggttcaaacctactctggagtcaacgcccgttccctccgtgtctgcgccgaatattgcgatgaagccttcattccccccttctactagcgctgtgaaggtgaacttatcagagaatagtagccagtctgctccccccatgagtccattcagcagtgcatcaaaacctgctgcctccggtcctctgtcacaccccacacctctttccgccccaccctcttccgtgccactgaaatcatcggttctgccatccccatcagctggcagaagcgcacaaggctctagctcccccgtcccttccatggttcagaagtccccgcggattacccccccagctgcaaaacccgggagccctcaggcaaaatccctgcagcctgccgtggcagaaaagcaaggacaccaatggaaagactcagacccggtgatggccggtattggtgaggagatagctcactttcagaaagagctggaggaacttaaagcaaggacctcgaaagcgtgttttcaggttggcacctccgaagaaatgaaaatgcttcgtacggagtccgacgatcttcacacgtttcttctcgagataaaggaaactactgagtcgctccacggcgatattagttcgctcaagacaacccttcttgaagggtttgctggagtggaggaagcccgcgagcagaatgagagaaatagagatagtgggtacctacacctgctgtacaaaaggcccctggatcccaaaagtgaggcacaattgcaggagatacggagactgcaccagtacgtcaaatttgcagtgcaggatgtgaacgatgtattagatttggagtgggaccaacacctcgagcagaagaaaaaacagagacaccttctcgtgcctgagagggagaccttgtttaacacattagccaacaatcgggagattatcaaccagcaaaggaagcgactgaatcacctggtagattccctccagcagctgcgcctctataaacaaacgtcactctggtccctgtcatctgctgtgccttctcagtctagcatccattcatttgactctgatctcgagagcctctgcaacgccttgcttaagactaccattgaaagccacaccaaatcgctccctaaagtacccgctaagctcagtccgatgaaacaagcccaactgcgcaacttcctcgcgaaacggaagacgccacctgtgagaagcactgccccggcatccttatcacgtagcgcatttttaagccagagatattatgaagacctggacgaagtttcttctaccagctctgtgtctcaatcgctggaaagcgaagatgcgagaactagttgtaaagacgacgaagcagttgtgcaagccccgcgacatgctccggtcgttcgaacccctagcattcagccctctctgctaccccacgccgcacctttcgctaagtctcatttagtccacggatcatcaccgggcgttatggggaccagtgtggcaactagtgcctctaagatcatcccacagggcgccgactctacaatgctggcaaccaagacagtcaaacacggagccccctctcccagtcacccaattagtgcacctcaggccgccgccgccgccgccttgagaaggcagatggcaagtcaggctcctgccgtgaacactttgacagaatcaacactgaagaatgttcctcaagtcgtcaatgtgcaagaattaaagaataatcccgcaactcccagcaccgctatgggaagctccgtcccttactctacagctaaaaccccacatcccgtgctgacacccgtagcagccaatcaggccaaacagggcagcctcattaactcattgaaaccgtctggcccgacaccagcctctgggcaattgagctctggagacaaggcaagtggaaccgccaaaatcgagaccgcagtaacatccaccccctccgcctcagggcagttctccaagccattctcattttcccccagcggcacaggatttaactttggaattataactcccactccaagctctaattttaccgcagcccaaggagccaccccctcgacaaaagaaagttcgcaacccgatgcttttagttccggagggggtagtaaaccctcttatgaggccatcccagagtcatcccctccatcaggcattacaagtgcctccaacactactccaggagaacccgcggcctctagtagccgacccgtggccccctcaggcaccgccctaagcaccaccagctcgaagctggaaacgccgccgtcaaagctgggtgaactcctgttcccatcatcgctggcaggagagaccctgggcagtttctccggcctgcgggttggccaggctgacgatagcactaagcctacgaacaaggcaagctctacttcactgacaagcactcagccaacaaagacgtccggcgtgccttcaggtttcaacttcaccgctcctcccgtcctcggcaaacacactgagcccccagtcacatcctccgctacaacaacctcagtagcaccccctgctgcaactagcacatcttctaccgccgtgttcggctcactacctgtgaccagcgccgggtcttctggagtgatttccttcgggggcacgtctctgagtgctggtaagacctccttttcctttgggagccagcagacgaattcaacagtcccaccttcagctccacctcccacaacggcggccaccccacttccaacttcctttccaacattgtcatttgggtctttgctgtcttcagccacgacgccatccctgccaatgtccgcaggcaggtctaccgaagaagccacctcgtctgccttgccggaaaagcccggcgactccgaagttagtgcgtccgccgccagcctgctggaagagcagcagagtgcccaactaccccaggcacccccacagacaagcgatagcgtgaaaaaggagccggtacttgcacagccagccgtcagcaacagtggcactgccgcgtcatccaccagtctagtagctctctctgccgaagcgacccctgcgaccacaggcgtacccgacgctcgcaccgaagccgtgccccctgcgtctagcttcagcgttccagggcagacagctgtgacagctgctgccattagcagcgccggtcccgtcgctgtagagacctcctccaccccgatagccagctctacaacaagtatcgtggcccccggccccagtgcagaagcagccgctttcgggaccgtgacctcagggtctagtgtgtttgcccagccacccgctgccagttcctcaagcgcgtttaaccagttgacaaacaatacagccacagccccaagcgcaactcctgtgttcggccaggtcgctgcctcaaccgccccctcgctctttggccaacaaacaggctctaccgctagcacggcagccgctacaccccaggtgtccagtagtggcttcagtagtcccgcatttggcacaactgctcctggagtatttggtcaaacgacattcggtcaagcaagcgtattcgggcagtctgcgagctcggccgccagtgtattttctttctcacagcccggtttttccagcgtcccggcattcggccagccagcttccagcactccaacctccactagcggtagtgttttcggcgctgccagttctactagctcgagtagctcctttagcttcgggcaatctagtcccaatactggtggcggactgttcggccaatccaatgctcctgcttttggtcaatcgcccggtttcggccaggggggtagcgtcttcgggggaacctccgcggccaccaccacagcggcaaccagtggcttcagcttctgccaggcttcagggtttgggtcaagcaacaccgggtctgtgttcgggcaggctgcatccaccggcgggatcgtcttcgggcagcagagtagcagcagcagtggtagcgtgttcggcagcggtaacacaggacgcggcgggggctttttttctggcctaggaggaaaaccaagccaagatgctgctaataagaatccattctccagtgcttccggggggtttgggagcaccgccacatcaaacacctctaacctgttcggcaattccggtgctaaaacctttggcggtttcgcctcatccagcttcggcgaacagaaaccaaccggcactttttcatccggcggtggctctgtggcttcccaggggttcggatttagttcgcctaacaaaactgggggattcggtgcagctcccgtgtttgggagccccccaacctttgggggaagccccggctttggaggtgtacccgctttcgggtccgctcccgcttttacaagccccttgggtagcactggtggcaaggtctttggcgagggtaccgcggctgcaagtgcagggggatttggctttggttcaagttctaacactaccagtttcgggaccctggcttctcaaaatgctcccacctttgggtcgttatctcagcagacatcgggctttggaactcagtccagcggattcagtggtttcggctcagggacaggcggctttagctttggctctaataattcctccgtccaaggttttggcggttggcgatcttag

SEQ ID NO: 197921 - DNA, 4560 bp, synthetic construct
  misc_feature 1..4560: note = Description of Artificial Sequence: Synthetic coding sequence
  source 1..4560: mol_type = other DNA
atgaagcccagcttcccccccagcaccagcgccgtgaaggtgaacctttctgagaagttcaccgcagctgctacttcgacaccagttagctcctctcagtccgcccctcctatgagtccattcagttctgcatctaagccggccgcctctggaccactttcccatcctacccccttatcggcgcccccctcctctgttccactcaagagtagcgtgctcccatctccatccggcaggtctgcacagggatcgtcaagtccggttccctccatggtccaaaaaagtccccgtatcacccctcccgcagcgaaacctgggtcccctcaggcaaaaagcttacagcccgccgtcgcagaaaaacagggtcaccagtggaaggactccgacccggttatggccgggatcggtgaagaaatcgcacactttcaaaaggagctggaggaattgaaggctaggacatcaaaagcttgcttccaagttggcacctcagaagaaatgaaaatgctgagaacagagagtgatgatctccataccttcctcctggagatcaaggaaaccaccgagtcccttcacggtgacatttcttctctgaagactactctgctggaaggcttcgcaggggtggaggaggcgcgggagcagaatgagcgcaatagagactctgggtacctgcatctactttataaacgaccactggatcctaaatcagaagcccagttgcaggagattcggcggctccatcaatacgtcaagttcgctgttcaggatgtcaacgacgttctcgacttagaatgggaccagcatttagagcagaagaagaaacaacgacacctgctcgttcccgagcgagagaccctgttcaacacacttgcaaataatcgggaaattatcaaccagcagcgcaaaaggctcaatcacctcgttgactcactccagcagctcagactctacaagcagacctccctgtggtccttgagttccgctgttccttcccagagctcaatccactcattcgacagcgatttggaatctctgtgtaatgctctgctcaaaacaacaattgagtcacacaccaaatctttacctaaggtgcccgccaagctttcgcctatgaaacaggcccaattgaggaactttctggccaaaagaaaaacacctccggtgcggtctaccgccccagctagtctgagccgaagtgctttcctctctcaacggtactatgaggatctcgatgaggtgagttctactagtagtgtctcccagagtctcgagagcgaggatgcccgtacctcctgcaaggacgacgaagctgtggtgcaagcaccccgccatgcaccagtcgttcgcacaccctctattcaaccctcccttctaccccacgcagcgcctttcgcaaaatcccatcttgtccacggctcctcacccggcgttatgggcacatcggtggccacaagtgcttctaagatcattccacagggagcagactccacaatgcttgcaaccaaaacagttaaacacggggctcccagcccatcccatcctatctccgccccccaggctgctgccgccgccgccttacgaagacagatggcaagccaggcaccggccgtgaataccctcactgagagcactctcaagaacgttccccaggtggttaatgtccaggagctcaagaataaccctgctactcccagtaccgcgatgggctcaagcgtaccatacagcaccgccaaaaccccccaccccgttctcacccctgtcgccgcaaatcaggctaaacagggttcactgataaattctctaaaacccagcggtccgacccctgcttcaggacagctatcaagtggagacaaagctagcggaacagccaagattgaaactgcagtaacaagcactccatcggcctcagggcaattttcaaagcctttcagtttttccccctccggcactggcttcaacttcgggattattactcccacaccaagctctaatttcactgccgcacaaggcgcaaccccttctaccaaggagtcatcccaacccgatgcgttcagcagcggcgggggctccaagccctcctacgaagcaatcccagaatcctctcctccttcagggattactagtgcctctaatacaactcctggagagcctgccgcctcttctagcagaccagtggctccttcaggtacagcactaagcaccaccagctctaaactggaaaccccccctagtaagttgggagagcttctgtttccgtcgtctcttgccggcgagaccctgggatcttttagcggtctcagggtgggtcaagccgacgactctaccaagccaaccaacaaagcctctagtacgagcctgacttctactcagccaaccaagacgtccggagtaccgagtgggtttaatttcacggctccccctgtgctggggaagcatacagaacctcctgtgacctctagtgcaaccacaacatctgtagcccctcccgctgctacaagcacctcttccactgcagtcttcgggagcctgcctgtgacgtctgcaggatcgtccggggtcatcagcttcggcggtacctcactgagcgctggtaagactagcttcagttttggatcacagcagaccaactccactgtgccacccagcgcaccgccccctaccaccgccgcaaccccgcttcctacaagttttcctacactgagctttggtagcctgctcagttccgcaactaccccctcactgccgatgtctgctggaaggagtaccgaagaggctacctcttccgccttgcccgagaagcctggcgattctgaggtgtctgccagcgctgcgagccttctggaggaacagcagtcagcccagctgccacaagctccgccacaaacatccgactccgttaagaaggagcctgtgctggctcagcctgctgtctctaacagtgggactgccgctagtagcacctcccttgtggcgctcagtgcagaggctaccccagccacgacaggagtccctgatgcgaggacagaggccgttccccccgcgagttctttctctgtgcccggccaaactgctgtaaccgccgctgctatatcaagcgctgggccggttgctgtggaaacctcctcaacaccaattgcttcgtcaactacaagcattgttgctccaggcccatcagccgaggccgccgcctttggaacagtcacaagcggatcttcagtgttcgcacaacctccagccgctagtagctcatctgcgtttaatcagcttacaaataataccgcgacagcacccagtgctaccccagtttttgggcaggtggcggccagcacggcaccttcacttttcggccagcagacgggttccactgcctccactgccgcggcgacaccacaagtgtctagcagcgggtttagctcacctgcctttggcaccacagcccccggcgtgtttggccaaacaacttttgggcaggcttccgttttcgggcagagcgcatcatctgccgcctcggtttttagcttctcccaacctggcttctcttccgtgccagcgttcggtcagcctgcctcatcgaccccgacaagtacttccgggagtgtgttcggcgccgccagctccacctctagcagttcctccttctcctttggccaatcatcaccaaataccggagggggcctatttggccagagcaatgctccagcctttggacaaagtccaggttttgggcagggcggaagtgtttttggtggcactagcgcagccacaaccacggccgcaacatcagggttttccttttgccaagcttctggcttcgggagtagcaatactggaagtgtttttgggcaggcagcgtccaccggagggatcgtgttcggccagcagtctagctcatctagtggatctgtgtttggctcaggaaacacagggcgtggcggcgggttttttagcggactcgggggcaaaccctcacaggacgccgctaataagaatcctttttcttccgctagcggcggatttgggtccactgcaacctccaatacgtcaaatctgttcggcaattcaggcgcaaagacctttggcggatttgccagctcgtcctttggcgaacagaagcctactggcactttcagctccggcggtgggtctgtggcttcacagggtttcggcttctcatcaccaaacaagaccggcggcttcggcgctgctccagtgtttggtagtccaccaacgtttggtgggtcaccgggattcggcggggtccctgcgttcggaagcgccccagcttttactagtccactcgggagcactggagggaaggtgtttggggagggaaccgcggccgcttctgctggaggtttcgggtttggctcttcatccaataccaccagcttcggtaccctcgctagccagaacgctcctaccttcgggagcttatcccagcagaccagcggctttggtacccagagctcaggcttttccgggtttggcagcggtacaggagggttctcattcgggtcaaataacagcagcgtgcaaggatttggcggttggcgcagctag

SEQ ID NO: 197922 - DNA, 6276 bp, synthetic construct
  misc_feature 1..6276: note = Description of Artificial Sequence: Synthetic coding sequence
  source 1..6276: mol_type = other DNA
atgggcgacgagatggacgccatgatccccgagcgggagatgaaggacttccaattccgtgccctgaaaaaggtgagaattttcgacagtcctgaggaactgccaaaggaaaggtccagtttacttgcagtgtccaataagtacggactggtgttcgccggaggggcttcggggttgcagatattccccaccaaaaacctcctgatccagaataaacccggtgatgacccaaacaagattgttgataaggtgcaggggttgttggtgccaatgaaatttccaattcaccacctggctttgtcatgtgataacctcaccctgagcgcctgcatgatgtccagcgaatacggatccatcatcgccttcttcgacgtgcggacattttcgaatgaggctaaacaacagaaacgtccctttgcataccataaattgcttaaagacgctggaggcatggttatagatatgaagtggaacccaacggttccttcaatggtggcagtctgtctggccgacggatccattgctgtgctccaggtgaccgagaccgtcaaagtgtgtgccaccctcccgtcaacagttgctgtgactagcgtgtgctggtcgcctaaagggaagcagctggcagtgggcaaacaaaacgggacagtcgttcaatacctgcctacccttcaggagaaaaaggttattccgtgcccaccattctacgagtcagaccaccccgtaagagttttggatgtgttgtggatcggtacctacgtgttcgcgattgtatacgctgccgctgatggaacgctggaaaccagtcccgacgtggtgatggctctgctcccaaaaaaagaagagaaacatcccgaaatctttgtaaacttcatggaaccgtgctacggaagctgtacagagcgccaacatcattattatttgtcatatatcgaagaatgggatctggttcttgccgcatccgccgcatcaaccgaagtgtcaattttggcccggcagtctgatcagatcaattgggagtcttggctgctggaggatagttctcgggccgagctcccagtgactgataaatctgacgattcactgcccatgggggtggtggtggattacactaaccaggtggaaatcacaatctctgacgagaaaacattaccacccgctcctgtattgatgctgttgtcaacagatggtgttctgtgccccttttatatgataaatcagaaccccggcgtgaaaagtcttattaagactccagaaaggctgtcactggagggcgagcggcagcccaaaagcccaggcagcacccccacaaccccaacaagctcacaggcccctcaaaaactagatgccagcgcagccgccgctcccgctagcctgcccccgagctcacccgccgcaccgattgcgacatttagtcttctgccagccggcggcgccccaaccgtgttcagcttcggctcctcttcattgaagtccagtgctactgttactggcgaaccgccaagctactcttcagggagcgattcctctaaggcggcacctggcccaggacccagcacgtttagctttgtgcccccttcgaaggcttctctggcgcctactcccgccgcttctcctgtggctccttccgccgccagtttcagcttcggatccagcgggtttaaaccgacactcgagtcgacaccagtgccatcagtttccgccccaaacattgccatgaagccgtcattcccccccagcacttccgctgtaaaagtcaacttgagtgagaagtttacggccgccgcgacctctacaccggtctcttcgtctcagagcgctcctccaatgtcacccttcagttcagctagcaaacccgctgcttctgggcccctgagccatccgacgccactgagcgcacctccctcctcggtgcctctaaagtcatctgtgctgcccagcccatccgcgggtaggtcagcccaaggctcatcatccccagttccatccatggtgcagaaatctccacgcatcacacccccggctgcaaagcccggttctcctcaggcaaagtccctccagcctgccgtggccgaaaaacagggacaccagtggaaggactctgaccccgtcatggccggtatcggcgaggagatcgctcacttccaaaaagagctggaggaattgaaagcaagaacctctaaggcgtgcttccaggtcggaacgtccgaggaaatgaagatgctacggaccgaatccgatgatcttcacacattcttgttggagatcaaggagacaaccgaaagcctccacggagacatcagctccctgaaaacgaccttactggaggggttcgcaggagtcgaagaggctcgcgaacaaaacgagcgaaaccgggactcaggttatttgcaccttttatacaaacgtcccctggatcccaaatccgaggcacaactgcaggaaattcgacgcctgcaccaatacgtcaagtttgcagtgcaggatgtgaatgatgtgctggacttagagtgggaccagcatctggagcagaaaaaaaaacagcggcacctgctcgtaccagagcgcgagactctgttcaacacactggccaacaatcgagagattataaatcaacagaggaagcgcctaaaccatttggtggattccctgcagcagctgcggctttataagcagacctccttatggagcttatcctccgctgtgccctcccaatcttccatccatagcttcgattccgacctggaaagcctttgtaacgctctgctcaagactaccatcgagtcacacaccaaatccttgcctaaggtgcccgctaaactgagccctatgaagcaggctcagttgcggaattttctagctaaaaggaagaccccaccagtaagatcaacggccccagctagcctctccagaagcgcgttcttgtcacagcggtactacgaagacctagacgaggtttcctcgacctcttctgtttctcagtccctggaatccgaggacgctcgcacatcttgcaaggatgacgaggcagttgtgcaagctccccggcacgcaccagtggtccgaaccccctctatccagccgtcattgcttcctcacgcggcaccgtttgccaaaagccatctggtgcatggctcaagtcctggggtcatgggcaccagcgtggcaacgtcagcctccaaaatcatccctcagggagccgattctaccatgttggccaccaaaaccgttaaacacggtgcccctagcccatcgcatcccatctctgctccacaggccgcagccgctgccgcccttaggcggcagatggcttcacaggcaccagccgtgaacacactgacagagtcaacactgaaaaacgtcccacaagtagtgaatgtccaggagctgaagaataatcccgcaaccccctccacagcaatgggctcatccgtgccatactccacagccaagaccccacatccggttcttactccggtcgccgcaaatcaggccaaacaagggtccctgatcaactcgctgaagccctctggccccactcctgcgtccgggcagctatcatcaggtgataaagcatccggcacagccaagatcgagactgctgttacaagtacaccatcagcatcgggtcagttctctaaacccttttctttctctcccagtgggaccgggttcaatttcgggataattaccccaactccctcttcaaacttcactgcggcccaaggcgcgacgcccagcacaaaggagtcctcacagcccgacgcatttagtagcggaggcggatccaagccctcgtacgaggcaattcccgaaagtagccctccttctggcataacttccgcaagtaataccactcccggagaacccgccgcatcttctagtaggcccgttgcccctagcggtacagccctgtctaccacctcttctaagctagagactcctcctagcaaactcggagagctgctattcccctccagtctcgcgggcgagactctggggtctttttcaggcttgagggtggggcaggccgacgattccaccaagcccaccaataaagccagtagcaccagcctgaccagtacacagccaacgaaaaccagcggagtaccatcaggcttcaattttaccgcacctccagtgctgggaaagcataccgagcctcccgtcacgtcatctgccaccaccacgtcggttgccccccccgctgctactagtacatcaagtacagcagtattcgggtccctacctgtgacatctgctgggtcttcaggagtgatctcattcggtggaactagtctatcggctggcaaaacgtccttcagctttggctcccagcaaactaactctactgtgcctccatcagcccctccccctactactgctgcgacaccactgcctacgtcattccccactctgagctttggtagccttctgagctctgcgaccacaccatcactgcccatgtcggctggccggagcaccgaggaggcaacgagcagtgcactgcccgaaaagcctggcgactctgaagtttctgcaagtgccgcttcccttctcgaggaacagcaatctgctcagctgcctcaggcccccccacagacttctgactcagttaaaaaggagcctgtactggcccagcccgcagtgagtaatagcgggactgccgcgtcctccacgtcacttgttgctcttagcgcagaagcgactcccgccacaacgggcgtcccagacgccaggaccgaggcggtgcccccagcaagctccttctctgtgccgggccagactgccgtaacagctgcggcaatctcatcagctggtccagtggcagtcgagaccagcagcacacctatcgccagtagcacaacctcaatcgtggccccgggaccctccgccgaagcggccgcctttggcactgtgacaagcggcagctccgtgtttgcacagccccctgcagctagctcatcaagtgcatttaaccagctcaccaataacaccgcaaccgccccctcagctacacccgtgttcggtcaagtggcagccagcactgctcccagtctgttcggacaacagacaggcagtactgcctcaaccgccgcagcaacaccccaagtcagttccagtgggtttagcagtccagccttcggtacgactgcaccgggggtctttggacaaactaccttcggacaggctagcgtgttcggacagtcggctagcagcgcagcgagtgtttttagtttcagccagccaggcttttcctccgtacccgcctttggacagcccgcaagctccacacctaccagcacttcaggctcagttttcggggcagcctcaagcacaagctcatccagttctttctcattcggacaatcttcgcccaacaccggcgggggccttttcggacagagtaatgcgccagcgtttggccaatctccagggtttggccagggaggaagtgtgttcggaggaacctctgcagccaccactactgctgccacatccggtttttcattctgtcaagcgagcgggtttggaagcagtaataccgggagcgtgtttgggcaggcagcctctaccggaggcattgtgttcggccagcagtcatcgagtagcagtggtagcgtgttcggctccggcaatactggaagaggtggcggctttttttcgggactcgggggtaaaccgagccaggacgctgccaataagaacccctttagttccgcttccggcggctttggaagcacagccacgtcaaacacatctaatttgtttggaaactccggcgccaagacatttgggggtttcgcctcttcttcctttggcgagcagaagcctacaggaactttctcaagcggaggcggaagtgtcgccagtcagggatttggtttcagcagtccaaacaaaacaggcgggttcggtgccgctcccgtattcggatcaccaccaactttcggcgggtcccccggtttcgggggcgtgcccgcatttgggagtgctccagcatttacatcaccattggggtccactggcggaaaggtgtttggggaggggaccgccgcagccagcgctggtggtttcgggttcggttcaagcagtaatacaacatcctttggtaccctggccagccagaacgccccaacgtttgggagcctctcccagcaaactagtggtttcggaacccagtcatcgggctttagcggcttcggatcgggtacaggagggttttcttttggatccaataatagttcagtgcagggtttcggcggttggcggtcctag

SEQ ID NO: 197923 - DNA, 237 bp, synthetic construct
  misc_feature 1..237: note = Description of Artificial Sequence: Synthetic coding sequence
  source 1..237: mol_type = other DNA
ggcgagggcaccgccgccgccagcgccggcggcttcggcttcggctcttcttcaaatacaaccagttttggaactctggccagccagaacgcccccacattcggttcccttagccagcagacaagcggcttcgggacacagtcctcaggtttctctggatttggttctggcacaggtggctttagttttggctctaacaattccagcgtccaaggttttggcggttggcgctcgtag

SEQ ID NO: 197924 - DNA, 5055 bp, synthetic construct
  misc_feature 1..5055: note = Description of Artificial Sequence: Synthetic coding sequence
  source 1..5055: mol_type = other DNA
ggcgccgagggccggaagttcgccgtggagcggcccggcttccggggacagggtcgcggcaggcaacgctggttgctaaggcacactacccctacctcctcacaggcacctcaaaagttggacgcctccgcagccgccgctccagccagtttgcctccctcttcgccagcagcaccgattgcgacattcagcctattacctgccggtggagcccccaccgtcttctctttcgggtcctcctctttgaaaagcagcgccacagtgacaggggaacccccctcctatagctctgggagcgatagctctaaagccgcgcccggacctgggcctagtacattctcctttgttcccccgtctaaggcctcattagccccgacgccagcagcttctccagttgctccatctgccgcatcattctcttttggctctagcggatttaagccaaccctagaatccactccagttccctctgtcagcgctccaaatatcgctatgaagcccagcttccccccatccacctccgcagttaaggtgaatctgagcgaaaaatttacagctgctgctacctccacaccagtcagctcttcacagagtgcgccccctatgagccccttctccagtgcgtcgaagcctgcagccagcggaccgctttctcaccctacacccctgtctgctcccccttcctccgttcctttgaagagttctgttctgccctcaccctcagccggtcgctctgctcagggttctagttcgcccgtgccaagcatggtgcagaaatcccccagaatcacccccccagccgccaaacctggcagtcctcaggcgaagagcttacagcccgctgtcgccgagaaacagggccaccagtggaaagatagtgatcctgttatggctggcatcggcgaggaaatcgcgcatttccagaaggagctggaggaattgaaagcccggacaagcaaggcttgttttcaagtcggcacttcggaagaaatgaaaatgcttcgtactgagagcgatgacctgcatacattcttgcttgagattaaggagactaccgaaagcttgcatggagatattagctctctgaagactacgctactagaaggatttgccggtgtcgaggaggcacgggaacagaatgaaaggaaccgggactctggctatctccatctgttgtataaaaggcctcttgatcctaagagtgaagctcagctgcaggagatacggcgactccatcaatacgtcaagtttgccgtacaggatgtgaacgacgttcttgacctagagtgggaccaacacctcgagcagaaaaagaaacagcgccacttgttggtgcctgagcgagaaacattgtttaacactctggccaacaatagggagataattaatcagcaacgcaaacgactcaaccacctggtggacagcttgcagcagctgcgactttacaagcaaacctcactttggtcgctttcttccgcggttccctctcagtcatcaatccacagttttgatagtgacctggagagcctgtgtaacgctttgctcaaaactaccattgagtcacacaccaagagcctgcccaaagtgcccgctaaactgagccctatgaaacaggcccaattgcggaacttcctggcgaagagaaagactcctccagtccggagtacagcacccgcatcactcagtcgttccgcattcctaagccaacgctactacgaggacctcgatgaggtgagtagtacgagcagtgtgagccagtcactcgagtctgaagacgcaaggacatcttgcaaggatgacgaggcagtggtacaggcccctaggcatgcaccagtggtccgcacccccagtatccaacccagcctactacctcacgccgcaccatttgctaagtctcatctcgtccatggttcttcccctggcgtaatgggcacctctgtggccactagcgcctcgaaaattataccgcagggggcagacagtactatgctggcaacaaaaactgtcaagcacggggctccctctccatcccaccctatctccgcaccacaggctgccgcagcagcagccctccgcaggcagatggcttcccaggcccctgccgtgaacaccctaacagagtctacactcaagaacgtgccgcaagtcgtaaacgtccaggagcttaagaacaaccctgcaactcctagtactgccatgggtagtagtgtcccttactcaactgctaagaccccgcatccagtgttaacaccggtcgctgccaaccaggccaagcagggctctttaatcaattcactcaagccttctggtccaacacccgcttctggacagctgtcatccggcgacaaggcctcgggaacagctaaaatagaaacggctgtgacaagtactccgtcggcctcaggacaattttctaagccattctctttcagcccaagcgggacggggttcaatttcggcatcatcacccccactcctagcagcaatttcacagccgctcagggagccactccttctacaaaggagagctcacagcctgatgccttttcaagcggtggcggctctaaaccaagttatgaggctattcctgagagttcgccaccatcggggataacctccgcgtccaacaccactccaggggagcccgcggcttccagctcccgaccagtcgccccaagcgggacagctttaagtacaactagttccaaactggaaacaccgccctcaaaattgggagagctgctcttcccgtcatctctggccggggaaaccctgggttcgttctccggtttacgagtggggcaggcagacgacagcactaagcccaccaataaggcgagtagtacatcactgacttccactcagcccacaaagacctctggggtgccaagtggatttaattttacagctcctcccgtgcttggcaaacataccgagcctccagttacttcttcagctacaacgacatccgtcgcccctccggcagcaacctcaacttcaagcactgctgtttttgggtcccttcccgtgacttccgccggttcaagtggcgtaatatcctttggagggacctcactgagcgctgggaagacttccttttctttcggatcccagcagacaaactctacggttcccccgagcgctccgcctcctaccaccgctgccactccactcccaaccagcttcccaaccttgagttttggtagcctgctcagtagcgccaccactccttccctgcctatgtctgcaggacggtccacagaagaggccacttcctccgccctccccgaaaagccaggggattccgaggtttctgccagtgctgctagcctgctcgaggaacagcagtcggcacagttaccccaagcccctccccagacttccgacagcgttaaaaaagagccagtgttagcgcagccggctgtgtctaattctggcaccgcggctagttccacatccctggttgcactctccgccgaggccacccccgctacaacaggtgtcccggacgccaggactgaggcagtgcctcctgcttcctcatttagcgtacctggacagaccgccgtgactgctgcagccatttctagcgccgggcccgtggccgtggagacaagttctacgcccatcgcatcatctaccacaagcatcgttgctcccgggccctcggccgaggccgcggccttcggcactgtgacttcaggctccagtgtctttgcccagcctccagctgctagctcttccagcgctttcaaccagctgacaaacaataccgccacggcccccagtgccacccctgtttttggccaggtggctgcctccacagctccatctctcttcggtcagcaaaccggatcaactgcctccactgccgctgctactccccaggtcagtagttcgggcttctccagccccgcttttggcactacagccccgggtgtgttcggccaaaccaccttcggacaggcctcagtcttcgggcagagtgcctcctctgcagcgtccgtctttagtttcagccagccgggattctccagcgtgcccgctttcggacagcccgccagctcaacccctacgtcaacgtccgggagcgtcttcggggcggcgagttccactagctctagcagtagcttttcctttggccagtcaagcccaaacaccggaggcggactgttcggtcagtctaacgcccccgccttcgggcaatctcccggcttcggacagggggggtcggtattcggcggtacctctgcggctactactacagctgctacaagcggtttcagcttctgccaggcttcaggatttggaagcagcaacacaggaagcgtgttcggccaagccgctagcaccggtgggatcgtgtttggtcagcagagctcttccagctctgggtccgtttttggcagcggcaataccggacgagggggcggattcttctctggattaggcgggaagcctagccaggacgccgctaataaaaatcctttttcttcggctagcggggggtttggtagcaccgccacctcgaacacttccaacctgtttggcaactcaggtgccaagacgttcggcggatttgcctcatcctcctttggcgagcaaaagcccacaggcacatttagtagtggaggcggatctgtggctagtcagggctttgggttcagctcccccaataaaacaggcggattcggcgctgcaccagtgtttggatccccacccacattcggagggagccccggctttggaggggtccccgcatttgggagcgctcctgcattcacctcgccacttggctctaccgggggaaaggtattcggagaaggtacagctgccgcctccgcaggcggcttcgggttcgggtcgtccagtaataccacgagcttcggtacactggcaagtcagaacgcccctacattcggtagcttaagtcagcagacatcaggatttgggacacaatcgagcggtttttctggatttggaagcggcacgggaggcttcagtttcggttccaataacagcagtgtgcagggctttggcggatggcgctcttag

SEQ ID NO: 197925 - DNA, 6282 bp, synthetic construct
  misc_feature 1..6282: note = Description of Artificial Sequence: Synthetic coding sequence
  source 1..6282: mol_type = other DNA
atgggcgacgagatggacgccatgatccccgagcgggagatgaaggatttccagttccgcgctctgaagaaggttcgtatttttgatagtcccgaagaactgcccaaagaacgctcttctttactggcagtgtccaataagtatggcctggtatttgcaggtggcgcctcgggcctgcaaatatttcccactaagaacctgttgatccagaacaagcccggggacgaccctaacaaaatcgtggataaggtacagggactactggtgcctatgaagtttcccattcaccacctcgcgctgtcttgcgataatctgacgctctccgcctgcatgatgtcctccgaatacggttctatcattgcattctttgacgtacgtacattttcaaatgaagctaagcagcagaagaggccgttcgcttaccacaagctgttgaaggatgccggcgggatggtgatcgacatgaagtggaatcctaccgtgccatccatggtagctgtttgtctggctgacggatcaatcgccgtgttgcaggtgactgagactgtcaaggtttgtgcgactctgccgtctacggtggccgtaacatctgtgtgttggtctcctaagggcaaacagttggccgttgggaagcaaaacggaaccgtggtccagtatctgccaaccttacaggaaaaaaaagttatcccttgtccacccttttatgaaagcgatcaccccgtccgtgtcctggatgtgctgtggattggcacctacgtgttcgccatcgtgtatgctgctgctgacggcaccctggagacaagcccagatgtcgttatggcccttctcccaaagaaagaggagaagcaccctgagatctttgttaacttcatggagccctgctatgggtcatgcactgaacgccagcaccattattacctcagctacatcgaggaatgggatctcgtgctggccgcctctgcagcttctacggaggtctccattcttgcgaggcaaagtgatcagattaactgggagagctggctcctggaggacagctcccgggctgaactgccggtgacagataagtcagatgattctctgccaatgggtgtcgtggttgattacacaaatcaagtggaaattaccattagtgatgaaaaaactctgccccctgcaccagtgttaatgctactgtcaactgatggtgtactgtgtcctttctacatgataaatcagaaccctggcgtaaaaagtctgatcaagacgcccgagaggttgagtctcgagggcgagcgtcagcctaagtcccccggatccactcctactacccctacaagtagccaagccccacagaaattggacgctagtgctgctgccgcccctgcctcgttacctccaagttctcctgctgcgccgattgccactttcagtctgctgcccgcgggtggggcccctacggtattcagttttggttcatcatctctcaaatcatcagccaccgtaacaggagaacccccgtcctattcttctggcagcgactctagcaaagctgcccccggccccggtccgagtacctttagcttcgttcccccaagcaaagcatccctggccccaactcccgccgcttcaccagtggcccccagcgcagcctctttttcgtttggtagttctgggtttaagcctactctggagtccacccccgtcccctctgtgagcgcccctaacatcgccatgaagccatctttcccccctagcacctcagcagttaaggtaaatttatcagagaattcttctcagtccgctccacctatgagcccatttagcagtgcttcaaagccggcggcaagcggcccattgagccatcctacacccctgagtgcccccccatcctcggttccactgaagagtagcgtgctcccaagcccaagtggcaggagtgctcaaggctctagttctccagttccaagcatggtccagaagtcccctaggataacacctcccgctgcgaagcctgggtcacctcaagcaaagtcacttcagccggctgtggcagagaagcaaggccatcagtggaaagactctgaccctgtgatggccggtattggagaagaaattgctcatttccagaaggagctcgaggaattgaaggcacgcaccagcaaggcctgttttcaggtggggacgtctgaagaaatgaagatgctcagaacagagagcgacgatctccacacatttctgctggagatcaaagagactacagagtctctgcacggggacatctcgagtctgaaaacaacactactcgagggatttgcaggggttgaagaggcccgggaacagaatgagcgcaacagagactccggttacctgcacctgctgtacaagagaccgcttgatcctaaatccgaggcacagttgcaagagattcgtaggttgcaccagtatgtgaaatttgccgtccaggacgtgaacgacgtgttagatcttgaatgggaccagcacttagagcagaagaaaaaacagcgtcatctcctggtgcccgagagagaaacgctcttcaacacactggctaataatagagaaatcatcaaccagcaacggaagaggctgaatcacctagtagattcactgcagcagctgcgcctgtataagcaaacctctctttggtcgctgagttccgctgtgccgagccaatcctcaattcattctttcgattccgatctcgagagtctgtgtaatgcccttctgaaaacaacaatcgagtcacataccaagtctttgccaaaggtccccgcgaaactgtctcccatgaagcaagctcagcttcgcaattttctcgccaaaagaaaaactcctcccgttaggtccactgctccggcctctctttcccggagcgccttcctctctcagagatattacgaagacctggacgaggtgtcttctaccagcagcgtgagccagtcactggagtctgaagatgccaggacttcttgtaaagatgatgaagctgtggtgcaggcccctagacacgcacccgtcgtgcgcacgcctagtattcaaccaagtctgttgcctcatgccgctccttttgccaaatcccaccttgtgcacgggagctctccaggggtcatggggacttcagtcgccaccagtgccagcaaaataattccccagggcgccgatagtacaatgctggctaccaagaccgtgaaacacggtgctccttcaccctcacacccaattagcgcccctcaggccgctgctgccgctgctctgagaagacagatggcatctcaggcacccgccgtaaacacacttaccgagtcgacccttaagaatgtgccccaggtggtcaacgtgcaggagctcaagaataacccagccacgccgagcacagctaaaacaccgcaccccgtgttaacacccgtggcagccaaccaagcaaagcaaggtagcctgatcaattccctcaaaccaagtgggcccacaccagctagtgggcagctcagctccggcgataaggcatcaggaacggcaaagattgagacagccgtaaccagcaccccaagcgctagtggccaattttcaaaacctttctccttcagcccctccgggaccggatttaacttcgggatcatcactcccacacctagcagcaacttcacagccgcccagggggctactcccagtacgaaagaaagctcacagcccgatgcttttagttcagggggtgggtccaagccaagctatgaggctattcccgagtcctcccccccgtctggtatcactagcgctagcaatacaacgcccggggagcctgcagcttcctcatcacgcccagtggccccctccggcacagccctctcaactacttccagcaaattggagactccacccagtaagcttggagagctcctgtttccgagcagtcttgccggcgaaacattgggctcattcagcggactccgcgtgggtcaggcagatgactccactaaacctactaacaaagcgtcaagtacatcactcactagtactcagccaacgaagacctccggagtccctagtgggtttaattttaccgctccgcccgtgctggggaaacacacagagccgcccgtgacatccagcgctacaactaccagcgtagctcctcccgctgccacgagcacctccagtacagccgtgtttggaagtttacccgttacgagcgctgggagctcaggcgttatcagcttcggaggaacatcacttagcgctggaaaaacttcattcagctttggaagccaacagacgaactcgacggttcctccctctgctcctccgccaactacagccgcaacccccttgccgacatcgttccctacactgtcttttggcagtctcttgtcaagtgctaccacaccttcactacctatgtctgccggcagatcaactgaagaagccacttcaagcgcactccctgaaaagcctggggatagcgaggtcagtgccagtgctgcgagtcttctggaggagcaacagtcggcacaactcccccaggctcccccccagaccagtgactctgtgaagaaagaacccgttttggctcagcctgctgtgtctaacagcggaaccgctgcgtcaagcacgtccctggtggcgctgagcgccgaagctacccccgcaacaacgggcgtacccgacgcccgtactgaggccgtcccacccgcctcttcctttagcgtccctgggcagactgcagtaaccgctgctgcaattagctctgccggcccagtggccgtcgagacatcttctacccctatcgccagttccaccacctcgattgtcgctccgggccccagcgcagaggccgcagcctttggcaccgtgacatctggtagctccgtcttcgcacagccacctgccgcctcaagctctagtgccttcaaccagctgaccaataacacagctacagctccatctgcgacacccgtgtttggccaggttgccgctagtactgccccctccctgtttggccagcagactgggagtaccgcatctacagcagcagcaaccccccaggttagttcatcagggttctctagtcccgcatttggaacaactgcccccggggtgtttgggcaaaccaccttcggccaggctagcgttttcggacagtcggcttctagtgcagctagtgtgttctcattttcacagcctggcttctcatcagtgccagcttttggacagccagcgagctctacccccacatccaccagcggctccgttttcggcgctgcctctagcacatcttcttcatccagctttagtttcggccaatcctccccgaataccgggggcgggctgttcgggcagtctaacgcccctgcttttgggcaatcccctggctttgggcagggtggatccgtgttcgggggaacttctgctgccactacgacagccgccacttccggcttctctttttgtcaggctagcggcttcggctcatctaacaccggcagcgtgttcggccaggccgcaagcacgggtggaatcgtgtttggccagcagagcagctcttccagcggaagcgtgtttgggtctggaaacactggtcgaggcggaggtttctttagcgggctggggggtaaaccatcacaggacgctgctaacaaaaaccccttcagttctgcatccggaggatttggaagcaccgctacctcaaataccagcaatctctttggtaactcgggtgccaagacttttggaggattcgccagttccagtttcggggagcaaaagccgacggggacgttttcttctggaggcggaagtgtggcaagccagggctttggattttcaagccctaacaaaacaggcggttttggtgccgcaccggtgttcggctctccgcccacattcggaggctcgccagggttcggcggtgttccggcctttgggtccgcgcccgccttcacatcgccccttggctccaccggggggaaggttttcggtgaaggaacagcggccgcctctgcaggggggtttgggagcttagctatgagtctgagtccgactctgaaaggccggctgctgctaatgcgcccaaaagctggcggaggaagagagcaggccgcacccggaaggaagtctaatgaatcccgttctctgggacatttatgtatggaacgcgcccttacaagtcccttaaaggtgtgggaacaacagcagcatcatatcttgcgccacgcacgcgaaagcgaatgcccacatttcaggatcacggtccctacagacttttggttttgggacccggagtag

SEQ ID NO: 197926 - DNA, 1308 bp, synthetic construct
  misc_feature 1..1308: note = Description of Artificial Sequence: Synthetic coding sequence
  source 1..1308: mol_type = other DNA
atgaagagcagcctgctgctgcggggcgtgcacttctgcttccacctacctggggcaaccccttctaccaaagagtctagccagcccgacgcattttcatcgggcggcggttctaagccctcatatgaggcaattcccgaaagctctcctccctccgggataacctccgccagcaataccactccgggcgagcctgccgcaagttcctctaggcccgttgccccaagcggcaccgcgctgtccaccacaagcagcaaactggagaccccgccctcgaagctcggtgaactgttgttccccagcagcctcgcaggggagactctgggttcttttagcggtttaagagttggtcaagccgatgactctacgaagcctacaaataaagcctcctccacctctttgacctccacgcaacccacaaagacttctggcgtgccaagtggctttaactttactgccccccctgtgctgggaaagcacacagagccacccgtcactagtagtgccactacaacctccgtcgccccacctgctgccacctccacatcttctactgcagttttcggatctttgcccgtgacctcggcaggatctagtggggttattagtttcggtgggacaagtctgagcgccgggaagactagcttcagtttcggatcacagcagaccaattcgacagtgcctcccagcgctccacctccaactaccgccgcaacccccttgccaacttcgtttccgactctgtcttttgggagtctcctgagctcagctacaaccccttcattacctatgagtgccggacgctcgaccgaggaggccacttcctccgctctcccggaaaagccaggtgattccgaagtatctgctagtgcggcctccttgttggaagaacagcaatccgcgcagctaccccaggccccgccccagacctctgatagtgtgaaaaaggagccggtgctcgcccagccagctgtgtcaaatagtggcaccgctgcctcatcaacttcactggtggcacttagtgctgaagctacacccgctaccaccggtgtgccggacgcaagaacagaggccgtccctcccgcctcgtctttttccgtgcctggccaaactgcggtgactgccgctgctatctcctcagctggacccgtggccgtggagactagcagcacacctattgcaagctcaaccacatctatcgtagctccagggcccagtgccgaagctgcagcttttggcaccgtcacatccggcagctcggtatttgcccaaccacccgccgcctccagctcatccgcgttcaactag

SEQ ID NO: 197927 - DNA, 981 bp, synthetic construct
  misc_feature 1..981: note = Description of Artificial Sequence: Synthetic coding sequence
  source 1..981: mol_type = other DNA
atggccgccttcgccgtggagccccagggccccgccctgggcagcgaaccgatgatgctggggtcaccgacctcgccaaaacctggtgtcaatgcccaatttcttcccggattcctgatgggcgatctgcctgcccccgtaaccccccagccgaggagcatttctggaccatccgtgggggttatggaaatgaggtccccactgctggcggggggatcgccacctcagcccgtagtgcctgctcataaagacaaaagtggtgcgccgcccgtaaggagcatttacgacgacataagcagtccaggcctcggctcaacccccctcacctcgcgccggcagcctaacatttcggtcatgcagagccctctcgttggagtgacatcaacgccgggtacagggcagagcatgttcagtcccgcctctatcggacagccccgcaaaactaccctgtcccctgcgcagttggaccctttttatacccagggagactcactcacctccgaagatcatttagatgattcatgggtcaccgtttttggatttcctcaagcttccgctagctacatcctgctacagtttgcccaatacggaaatatattgaaacacgtgatgtcaaatacggggaattggatgcatatccggtaccagtcgaagctacaggcccggaaagccctctccaaagatgggcgcattttcggggagtccatcatgattggggtcaagccctgtatcgataaatcggtgatggagagctccgacaggtgcgccctttcctcgccatcccttgcctttactccccctatcaaaactctgggcaccccaacccaacccggctcgacgcccagaatttcaacaatgagacctttggctaccgcttacaaggcttctactagcgattaccaggttatttccgaccgtcagacccccaagaaagacgagtctttggtgtccaaggcaatggagtatatgtttgggtggtag

SEQ ID NO: 197928 - DNA, 930 bp, synthetic construct
  misc_feature 1..930: note = Description of Artificial Sequence: Synthetic coding sequence
  source 1..930: mol_type = other DNA
atgatgctgggcagccccaccagccccaagcccggcgtgaacgcccagttcctgcccggctttttgatgggcgatctacctgctccagtaaccccacaaccgaggtcaataagcggacctagcgtgggagtcatggaaatgcgttctcctctcctcgccggagggagtccacctcagcccgtcgtgcccgctcacaaagacaagagcggagcacctccagtgcggtctatatacgatgatattagttcccccggattaggaagtacaccactgacctcaaggagacaaccgaatatctctgtgatgcagtctccactcgtcggtgtgactagcacccccggaacaggacagagcatgttttcccccgccagtatcggacaaccccgcaagaccacactcagcccagcccagcttgaccctttttacactcagggtgatagtttaacgagtgaggatcacctggatgacagttgggttactgtgttcggtttcccccaggcatccgcatcctatatcctcctacaatttgcccagtacgggaatattttgaagcacgtgatgtccaacactggaaattggatgcatatcagataccagagcaaactgcaggctcgcaaagccttgtccaaagacggacgtattttcggagagtctattatgatcggcgtgaagccctgtatcgacaagagcgtgatggagtcaagcgacagatgcgcactctcttccccctccttggcattcacccccccaattaagacgctgggaacccccacccagccaggaagcacccccagaatatcgactatgagaccactcgccacggcgtataaggccagcacctcagattatcaagtaatttccgaccggcaaacccctaaaaaggatgagagtttggtctcaaaggccatggagtatatgtttgggtggtag

SEQ ID NO: 197929 - DNA, 576 bp, synthetic construct
  misc_feature 1..576: note = Description of Artificial Sequence: Synthetic coding sequence
  source 1..576: mol_type = other DNA
atgttcagccccgccagcatcggccagccccggaagaccaccctgtcgcccgctcagctcgatcctttttatacgcaaggggactctcttacgtccgaagatcaccttgacgattcttgggtcacagtttttggtttcccccaagcatcagcatcttatattttgcttcaatttgctcagtacggtaacatcttgaagcatgtgatgtccaataccggcaactggatgcacataaggtaccagtcaaaattgcaggcaagaaaagccctgtccaaggatggcagaatattcggcgagagcattatgatcggggtcaaaccctgcattgataaaagcgtcatggaatcgtcggaccgctgtgcactaagcagcccaagtctggcatttacaccacccataaaaactctagggaccccaacccaacctggatcaaccccccgaatatctaccatgcgtcccctcgccacggcctataaggcaagtacctctgactaccaggtgatctcggataggcagacccccaaaaaggatgagagtctcgtgtccaaagcaatggagtatatgtttggctggtag

SEQ ID NO: 197930 - DNA, 981 bp, synthetic construct
  misc_feature 1..981: note = Description of Artificial Sequence: Synthetic coding sequence
  source 1..981: mol_type = other DNA
atgaagcaggacgccagccggaacgccgcctacaccgtggactgcgaagattacgtacatgtagtcgagtttaacccttttgagaacggcgatagcggcaatcttatagcttatggaggaaataattacgtggtgatcgggacctgcacgttccaagaagaagaggctgacgtagaagggatccagtacaaaactctgcggacttttcatcatggcgtgcgcgtggacggcatcgcctggtcaccggaaacacggctggacagcttgccccccgtgattaagttctgcacaagcgctgccgacatgaaaattaggctcttcaccagcgacctgcaagacaagaatgaatacaaggtgttggaaggtcacactgactttataaatggtcttgttttcgatccaaaggagggccaggaaatcgctagcgtttctgacgatcacacttgccggatctggaacctggagggcgtgcagacagcccacttcgttttgcattccccaggcatgagtgtttgctggcacccagaagagacattcaagttgatggtcgcagaaaagaacgggactatccgcttctatgacttgctagcccagcaggcgatcctctcccttgagtcagagcaggtaccgctgatgtctgcccactggtgtttgaagaataccttcaaagtgggggcagttgctggtaatgactggctgatctgggatataacccggagcagttacccgcagaacaagaggccagttcacatggatcgagcctgcttgttccgttggtcgaccatcagcgaaaatctgttcgcgacaactgggtaccctgggaaaatggcctctcagttccagatccatcatcttgggcacccgcagcccattcttatggggtctgtggctgtggggagcggcctttcctggcataggactctgccactgtgcgtgatcggaggtgatcataaactccttttctgggttactgaagtgtag

SEQ ID NO: 197931 - DNA, 156 bp, synthetic construct
  misc_feature 1..156: note = Description of Artificial Sequence: Synthetic coding sequence
  source 1..156: mol_type = other DNA
atgaagcaggacgccagccggaacgccgcctacaccgtggactgcgaggattatgtgcatgtggtcgagttcaaccctttcgagaatggggatagcggaaatctaatcgcgtatgggggcaataactatgttgtgatcggcacatgtactttctag

SEQ ID NO: 197932 - DNA, 981 bp, synthetic construct
  misc_feature 1..981: note = Description of Artificial Sequence: Synthetic coding sequence
  source 1..981: mol_type = other DNA
atgaagcaggacgccagccggaacgccgcctacaccgtggactgcgaggattatgtgcatgttgtggagtttaatccatttgagaacggagactctggtaatctgatcgcatatgggggtaataattatgttgtgattgggacctgcacattccaggaggaggaagcagatgttgaggggatccagtataagactctgcggacattccatcatggtgttcgggtggatggcatcgcctggtctcctgagaccaggctggacagcctcccaccggtgatcaagttctgcaccagcgccgcggacatgaaaattcgattgtttactagtgatctccaggataagaatgagtataaggtcctggagggacatactgactttattaatggactggtgttcgatccgaaggaaggccaagaaattgcctccgtgtcagacgaccacacgtgtcggatctggaatttagagggggtgcagacagcgcacttcgtcctccacagtcctggcatgtccgtctgttggcacccagaggagacatttaaattgatggtggcagagaaaaacgggaccataagattctacgacctactcgctcagcaagcaattctgtccctggagagtgagcaggtgccactgatgagcgcgcactggtgcctgaagaacacctttaaggtgggcgcggtggccggaaatgactggttgatctgggacatcacacggtctagctaccctcagaacaagaggccagtccatatggatcgggcttgtttgtttcgttggtccaccataagcgaaaacctcttcgctacaactggttacccaggcaagatggcctctcagttccaaattcaccatctcggtcacccccagcctatcctgatgggcagcgttgcagtcggcagcgggttgtcctggcacaggaccctgccactttgcgtcatcggtggagatcataaacttctgttttgggtgactgaggtgtag

SEQ ID NO: 197933 - DNA, 1143 bp, synthetic construct
  misc_feature 1..1143: note = Description of Artificial Sequence: Synthetic coding sequence
  source 1..1143: mol_type = other DNA
atggaggagatctacgccaagttcgtgagccagaagatcagcaagacccgatggagaccacttcctcccgggtccctccaaaccgccgagacattcgccacaggcagttgggataacgaggagaactacatttccctttggagtatcggagattttggcaatctggactccgatgggggctttgaaggcgatcaccagctgctctgcgacattcgccaccatggtgatgtcatggacctgcaatttttcgaccaagaacgcatcgtcgccgcgagctcaactggatgcgtgacggtgtttctgcaccatcctaacaatcagaccctgtcagttaatcagcaatggactacggcacattatcataccggacccggtagcccatcttacagttccgccccatgcacaggcgtggtctgtaacaacccagaaattgttaccgtgggcgaggacggcaggatcaacctgtttagggcagaccataaggaggccgttaggaccattgataatgctgatagttcaacgttgcacgccgtgacgttccttcggacgccagaaatcctgaccgtcaacagtattggccagctgaaaatctgggattttcgacaacagggcaatgaaccctcccaaattctcagcctgaccggggaccgcgtacctctgcactgtgtggaccgtcaccctaaccagcaacacgtggttgcaaccggcgggcaggatgggatgttatccatctgggacgtccgtcaagggactatgccagtgagcctcctgaaagcccacgaggcggagatgtgggaagtacattttcatccatccaatcccgagcacctattcacctgttccgaggacggcagcctctggcattgggatgcatccaccgatgttcctgagaaatctagcttgtttcaccagggggggcgttcctccacctttctgtcacattccatcagcaatcaggccaatgtgcaccagtctgtgatttcttcatggctgtccacagacccagctaaggaccgcattgaaatcacctcgctgctgcccagccggagtttgtctgtgaacactctggacgtgctggggccctgcctagtgtgcggtactgacgccgaggcaatatacgttactcgacacctcttttcctag

SEQ ID NO: 197934 - DNA, 747 bp, synthetic construct
  misc_feature 1..747: note = Description of Artificial Sequence: Synthetic coding sequence
  source 1..747: mol_type = other DNA
atgggcggccccctgagcctgggcaccgactgcgcccacaccggctatagacgggagttgaccctgtgtagccacaggctgagaccaaaagttccatctaatcaggggtctgcagggaggggtggggcagagcgacgggtcctctgcttgctcttcgccgtacccgccgccgcagctttcggtatggaggaaatctacgctaaatttgtgtcgcaaaaaatctctaagaccagatggagacctctccctcctggttctctacagacagccgagacttttgcaactgggtcttgggataacgaagaaaactatatcagcttgtggtcaatcggagacttcggaaacctggacagcgacggggggtttgagggagaccaccaactgctctgcgacatcaggcatcacggcgatgtcatggatctgcaatttttcgaccaggagagaattgtcgccgctagctcaacgggttgtgttacagtttttttgcaccatcccaacaaccagactctctcagtaaaccagcagtggaccacagctcattaccataccggccctggatcccctagctatagtagcgccccatgcactggcgtagtctgcaataaccctgagattgtgacggtaggtgaagatgggaggattaatctctttagagccgatcataaggaggccgtgagaacgatagggctggtgaccgagtgccattctactgtactgatcgatatccccactaactctatgttgtag

SEQ ID NO: 197935 - DNA, 1143 bp, synthetic construct
  misc_feature 1..1143: note = Description of Artificial Sequence: Synthetic coding sequence
  source 1..1143: mol_type = other DNA
atggaggagatctacgccaagttcgtgagccagaagatcagcaagacaagatggagacccttgccacccggcagtcttcaaaccgccgaaacgttcgcaaccggaagctgggataacgaggagaactacattagcctgtggagcatcggcgactttggcaacctggacagcgacggagggttcgagggagaccaccagttgctctgtgacattcgccatcacggcgacgtgatggacctgcagttcttcgaccaagaaagaattgtagccgccagctctacagggtgtgtcacggtgtttttacaccaccccaataaccagaccttgagcgtgaaccagcagtggaccactgctcactatcacacgggacccggctcgccctcttactcctccgccccttgtacaggggtggtctgcaacaaccccgaaatcgtcacagtcggtgaagatggacgcattaatctatttagggcagaccacaaggaggccgttagaaccatcgacaacgccgactctagcactttgcatgctgtgaccttccttcgtacgcctgagatactgaccgtgaatagcattgggcaactcaagatatgggactttcggcagcagggaaatgaaccatcccagattctgtccctcaccggtgatcgggtcccactgcactgtgtggataggcaccctaatcagcaacacgtggtggcaacggggggccaggacggtatgctatctatatgggatgtcagacagggtactatgccagtgtccctgctaaaggcccacgaagccgagatgtgggaagtgcatttccacccaagtaaccccgaacacctgtttacttgttcagaggacggttcattatggcattgggatgcctccacagatgtgccagaaaagagtagcctgtttcatcagggcggcaggtcctccacattcctgagtcattccatctccaaccaggcaaatgtgcatcagagtgtgatctcaagttggctgagtacagatccagctaaagatcgcattgagattacaagcctgctgcccagcagatcgctgagtgttaacacactcgacgtgctgggcccctgcctggtctgtggtacagatgctgaagctatctacgtcacccgacatctgttttcatag

SEQ ID NO: 197936 - DNA, 1407 bp, synthetic construct
  misc_feature 1..1407: note = Description of Artificial Sequence: Synthetic coding sequence
  source 1..1407: mol_type = other DNA
atggccaagcggaacgccgagaaggagctgaccgaccggaactgggatcaggaagatgaggccgaggaggtcggaacattcagcatggcgtcagaggaagtcttgaaaaatcgggccatcaagaaagcgaagcgcagaaacgtaggcttcgaaagcgacactggaggggctttcaaagggtttaaggggcttgtggtacccagtggaggcggacgtttttcagggttcggctctggtgccgggggtaagcccctcgagggcctatccaacgggaacaacatcacttcagccccacctttcgccagcgccaaggctgctgctgacccgaaggtggcgtttggctccctagccgctaatgggccaactaccctggtggacaaggtgagtaacccaaagacaaatggagattcacagcagccgtcttcttcgggtcttgcatcatcaaaagcatgcgtgggaaatgcgtatcataaacagctcgcggctctcaactgctccgtgcgagattggattgttaaacatgtaaacacaaaccctttgtgcgatctgacccccatattcaaggactacgagaagtatctagccaatattgaacaacaacatggtaactcagggcggaactcagagagcgagtctaataaagtggccgccgagacacagtcccccagcctattcgggagtactaagctgcagcaagagagtaccttcctcttccatggcaataagacagaggatacacccgacaagaaaatggaggtcgcatccgaaaagaagaccgacccatcgagccttggagctaccagcgcttcttttaactttgggaaaaaagtagatagcagcgtgcttggcagtctcagctcagttcctctgaccggcttctccttctcacccgggaacagttcactgttcggaaaggacacaacccagtctaagcccgtgtcaagcccattccctactaagccattggagggccaggccgagggtgactccggagaatgcaaaggcggcgatgaggaggagaacgatgagccacccaaggtggttgtgaccgaggtgaaagaagaggacgcattctatagtaagaagtgcaagctcttttataaaaaagacaatgaatttaaagagaaagggatcggcactctgcatcttaagccaacagccaatcagaagacccaattactcgtgagagccgacacaaatcttggaaacatcctgttgaacgtccttatccccccaaacatgccctgtacgcggacagggaagaacaatgtgctgatagtatgtgtccccaaccccccgattgacgaaaagaatgccacgatgcctgttactatgttaatcagggtgaaaacatcggaggacgccgacgagttgcacaagatacttctggagaaaaaagacgcttag

SEQ ID NO: 197937 - DNA, 1323 bp, synthetic construct
  misc_feature 1..1323: note = Description of Artificial Sequence: Synthetic coding sequence
  source 1..1323: mol_type = other DNA
atggccagcgaggaggtgctgaagaaccgggccatcaagaaggccaagcgccgtaatgtgggctttgagagcgataccgggggtgccttcaagggttttaagggactcgtggtaccctctggtggcggcaggttttctggttttgggagtggcgctgggggtaagccactggagggcctgtcaaacggaaacaatataacctcagccccacccttcgcaagcgccaaggctgcagcggatcccaaagttgcgttcgggtcactggctgccaatgggccgacgacgctcgtagacaaagtgtcgaatccaaaaactaatggggatagtcagcagccaagcagctcaggcttggccagctcaaaagcttgcgttggcaacgcttaccacaaacagctagcagctctgaattgttccgttcgagactggattgtgaaacacgttaacactaaccccttgtgcgacttgaccccaatttttaaggattacgagaagtatctcgctaatatcgagcaacagcacgggaatagtggcagaaacagcgagagtgagtctaacaaggtggctgcggagactcagagccctagcttatttggatccacaaagctccagcaggaatccactttcctcttccatggtaataagactgaagatacccctgataaaaagatggaagtggcttcagagaaaaaaacagaccccagctctctgggcgccactagcgcaagtttcaattttggaaaaaaggtggatagtagcgtgctggggagcttgtcttccgtgcctcttactggctttagcttctctcccggtaactcttctttgttcggaaaggataccacgcagtccaaacctgtgtcttccccgtttccgactaagcccctcgaagggcaggcggaaggcgacagtggtgaatgcaaaggaggagatgaagaagagaatgacgaacctccaaaggtggttgtgactgaggtaaaggaggaggacgccttctattccaagaagtgtaagctcttctataagaaagataacgaattcaaagagaagggtattggcaccctgcacctgaaaccaacggcaaaccaaaaaacccagttacttgtgcgagccgacacaaatcttggaaacatactgttgaatgtcttgataccccctaatatgccgtgcacacgcaccggtaagaacaacgttctgatcgtgtgtgtgcccaacccgccaattgacgagaaaaacgctaccatgccggtgaccatgttaatcagagttaaaacaagcgaggacgccgacgagctgcataagattttacttgaaaaaaaggacgcctag

SEQ ID NO: 197938 - DNA, 1323 bp, synthetic construct
  misc_feature 1..1323: note = Description of Artificial Sequence: Synthetic coding sequence
  source 1..1323: mol_type = other DNA
atggccagcgaggaggtgctgaagaaccgggccatcaagaaggccaagagacgtaacgtggggttcgagagcgacaccggcggcgcattcaaaggatttaagggccttgttgtgcccagtggaggcgggcgcttttccggctttggaagcggtgccgggggcaagcctttagagggactgtctaatgggaacaatataacctctgctccaccattcgcgagcgctaaggccgcagctgaccccaaggtggcctttgggagtctggcggctaatggtcccaccacattggtcgacaaggtatctaacccaaagacgaatggggacagccagcagcctagctctagtggcttggcatcaagcaaggcatgtgtgggtaacgcctaccacaagcaattggcagccttaaactgcagtgtgcgagattggatcgtgaagcatgtgaacaccaaccccctgtgcgatctgacccctatctttaaagattatgagaagtacctggctaacattgaacagcagcatggaaactctggccgtaactcagaatccgagagcaataaggttgcagccgaaactcagtccccatctctgttcggcagcacaaaattacaacaggaatcaacattccttttccatggtaacaagaccgaagacacgcctgataagaagatggaggtggcaagcgaaaagaagaccgacccctctagccttggcgccacatcagcaagctttaactttggcaagaaggtggactcctctgtgctaggctcactctcctctgttccattgactggattctccttctccccaggcaattcatccctcttcggcaaagacaccacacaaagtaaacctgtttcttccccattccctaccaaacccctggagggccaagccgagggtgactccggggagtgcaaaggcggagatgaggaggagaatgatgagcccccaaaggtggtggtcacagaagtgaaggaggaagacgctttttactctaaaaaatgtaagctcttttacaaaaaggataatgaattcaaggagaaaggcattggcaccctgcatctgaagcctaccgccaaccagaagacccagcttcttgttcgggctgacaccaaccttggcaacatcctgctgaacgtcttgattccacctaatatgccttgcaccaggacaggaaagaataatgtactgattgtatgcgtgcccaacccacccattgacgagaaaaacgccaccatgcctgtcactatgctcatccgagttaagacaagtgaggacgctgatgagttgcataaaatccttcttgagaagaaggacgcatag

SEQ ID NO: 197939 - DNA, 27 bp, synthetic construct
  misc_feature 1..27: note = Description of Artificial Sequence: Synthetic coding sequence
  source 1..27: mol_type = other DNA
atggccagcgaggaggtgctgaagtag

SEQ ID NO: 197940 - DNA, 537 bp, synthetic construct
  misc_feature 1..537: note = Description of Artificial Sequence: Synthetic coding sequence
  source 1..537: mol_type = other DNA
atggccaagcggaacgccgagaaggagctgaccgaccggaactgggaccaggaggacgaggcggaagaagttggtacttttagcatggcttccgaggaggtcctcaagaatcgggccattaaaaaggcaaagcgtcggaatgtaggcttcgaatcagacactggcggagctttcaaaggttttaaagggctggtcgtccccagcgggggaggaagattcagtgggtttggttctggcgcaggcggtaagccgttggaagggctgtccaacggtaacaacatcactagcgcaccgccgttcgcatccgccaaagccgccgccgaccctaaggtcgcgttcggcggcgatgaggaggagaatgatgagccacctaaagtggtggtcactgaagtgaaggaggaggacgctttctattcgaagaaatgtaaactgttctataagaaggacaacgagttcaaggagaagggaatcggcacccttcatctcaagccaactgctaatcaaaaaacccagctgctggtgagagccgacacatag

SEQ ID NO: 197941 - DNA, 138 bp, synthetic construct
  misc_feature 1..138: note = Description of Artificial Sequence: Synthetic coding sequence
  source 1..138: mol_type = other DNA
atggccaagcggaacgccgagaaggagctgaccgaccggaactgggatcaggaggatgaggccgaggaagtagggactttttcgatggcatccgaggaggtattaaagaacagagccatcaaaaaggcaaagagatag

SEQ ID NO: 197942 - DNA, 657 bp, synthetic construct
  misc_feature 1..657: note = Description of Artificial Sequence: Synthetic coding sequence
  source 1..657: mol_type = other DNA
atggaggtggccagcgagaagaagaccgaccccagcagcctgggcgcaacgtcagcatcatttaattttgggaagaaggtggattctagtgtgctggggagcctgtcgagtgtgccactgaccggcttctccttttccccaggaaattcttccctgttcggcaaagatactacccagagcaaaccagtgtcgtccccattcccaacaaaacccttagagggccaggccgaaggggatagcggagagtgcaaggggggcgacgaggaggaaaacgatgaaccccccaaggtcgttgtgaccgaggtgaaggaggaggacgccttttatagtaagaagtgtaagttattctataagaaagataatgaattcaaggaaaaagggatcggcaccctacacttaaaacctaccgccaaccaaaaaacacaattactggtcagggccgacaccaatctgggcaacatcctgttgaacgtcctgatccctccaaatatgccttgcacacggactggaaagaacaatgttttgatcgtatgtgttcctaatccccctatcgacgagaagaatgccactatgcctgttactatgctgatccgagtgaaaaccagcgaggatgcagatgagcttcataagatcctccttgagaaaaaggatgcatag

SEQ ID NO: 197943 - DNA, 231 bp, synthetic construct
  misc_feature 1..231: note = Description of Artificial Sequence: Synthetic coding sequence
  source 1..231: mol_type = other DNA
atggccaagcggaacgccgagaaggagctgaccgaccggaactgggaccaggaggacgaggccgaggaagtgggcaccttctcaatggcttctgaagaagtgttgaagaatcgggccatcaaaaaggccaagagacggaacgtgggctttgaagttctcctgctgcagatggctctgcctccctggctgattaagtttcaaattcccaagctaatgggtacagtgtcatag

SEQ ID NO: 197944 - DNA, 15 bp, synthetic construct
  misc_feature 1..15: note = Description of Artificial Sequence: Synthetic coding sequence
  source 1..15: mol_type = other DNA
atggccaagcggtag

SEQ ID NO: 197945 - DNA, 33 bp, synthetic construct
  misc_feature 1..33: note = Description of Artificial Sequence: Synthetic coding sequence
  source 1..33: mol_type = other DNA
atggccaagcggaacgccgagaaggagctgtag

SEQ ID NO: 197946 - DNA, 1524 bp, synthetic construct
  misc_feature 1..1524: note = Description of Artificial Sequence: Synthetic coding sequence
  source 1..1524: mol_type = other DNA
atggccttcaacttcggcgcccccagcggcaccagcggcaccgccgctgcgactgcagctcctgcaggcgggttcgggggcttcggcacgactagcacaacagccggttcagccttcagcttcagtgcacccacaaatactggcacaacaggtctgttcggaggtacccagaacaaggggtttgggtttggtactggattcggcacaaccacaggtacctcaacggggcttgggacaggactggggacaggacttggatttggaggatttaacacccagcagcagcagcaaacaacgctgggcgggctattttcccagccaacgcaggcacccacgcagtccaatcaattaattaatactgcgagtgccctgtctgcccccactctgcttggcgacgaaagggatgctatcctggcaaagtggaatcagctgcaggctttctggggaactggcaagggctatttcaacaacaacattccaccagtggaattcacccaagagaatcctttctgccggtttaaggctgtgggctattcttgtatgccttccaacaaagacgaggatggactggtcgtcctggtgtttaataagaaagaaacagaaatcagatcacaacagcagcagttagtggagtcactgcataaagtcctgggtgggaatcagacgcttactgtgaatgtcgagggaaccaaaacactgcccgatgaccaaaccgaggtcgttatctacgtcgtggaacgaagccccaatggcaccagtagacgggtccccgcaactaccctgtacgcgcattttgaacaagcaaacataaagacacagctgcagcaattgggggtgacactatctatgacccgaacggagctatcccctgcacagattaagcaactacttcagaacccacccgccggagttgatcccatcatctgggagcaggctaaagtggacaatcccgactctgagaaactaatacccgtccctatggtggggtttaaggagctactgcgcagactcaaagttcaagatcaaatgaccaagcaacaccagacgagattagatataatcagtgaagacatttccgagctccagaagaatcagactacctctgtggcgaaaattgcccagtataagaggaagctgatggacttatcccatagaactctgcaagttctgattaagcaggagattcagcggaagtccgggtatgcgattcaggccgatgaagagcaactgcgcgtacagctcgatactatacagggtgaactcaatgccccgactcaattcaagggccggctgaacgaacttatgtcgcagatcagaatgcagaaccactttggcgcggtcaggagtgaagagcgttactatatagatgcagacttgctccgggagatcaagcagcacctcaagcagcagcaagagggtctcagtcacctgatctcaatcattaaagatgatctagaagatatcaagctggtcgagcacggcctaaatgaaactattcacatcaggggtggcgtgttcagttag

SEQ ID NO: 197947 - DNA, 876 bp, synthetic construct
  misc_feature 1..876: note = Description of Artificial Sequence: Synthetic coding sequence
  source 1..876: mol_type = other DNA
atgcccagcaacaaggacgaggacggcctggtggtgctggtgttcaataaaaaagaaacggagattcggagtcagcagcagcaactggtggagagtctccacaaggtccttggcggaaatcagacgctgacagtgaatgttgaaggtacaaaaactctccctgacgatcagactgaggtcgttatatacgtcgtggaacgttcacctaacggtacaagccgccgggtgccagccaccactttatacgcccatttcgagcaggccaacatcaagactcaattgcagcagctcggcgtgaccctgagcatgacgcgaacggaactgtcacctgcacagataaagcagctcctgcagaacccacctgcaggcgtggatccaatcatttgggaacaggccaaggtagacaatcctgattccgaaaaattaattccagtccccatggtgggattcaaggaattgcttaggcggctgaaggtgcaagatcagatgactaaacagcatcagacgaggctcgatgttttgattaaacaagagattcagcgcaaatctggctatgcaattcaggccgatgaagagcagttgagggtacaacttgatactatccagggcgagctgaacgccccaacacaatttaaggggcgtttaaacgaactcatgagccagattcgcatgcaaaaccattttggggcggtgcggagtgaagagaggtattacatagatgccgacctgctgagggagattaaacagcacttaaaacagcagcaggaggggctctctcatcttatttcaattatcaaggatgaccttgaggatataaagctggtggaacacgggttgaatgagactatccacatcagaggcggggtgttctcatag

SEQ ID NO: 197948 - DNA, 984 bp, synthetic construct
  misc_feature 1..984: note = Description of Artificial Sequence: Synthetic coding sequence
  source 1..984: mol_type = other DNA
atgcccagcaacaaggacgaggacggcctggtggtgctggtgttcaacaaaaaggaaactgagataaggagtcaacagcagcagctggttgagagcctccacaaagtgctgggtggaaaccagacactcacagtcaatgtggaggggacgaaaacactgccggacgaccaaacggaggtggtcatttatgtggtcgagaggtcccccaatggaacttcgaggagggtacctgcaacaaccctctacgcgcattttgagcaggcaaatattaagacccagctccagcagctgggagttactttgtccatgacccgcaccgagctgagccccgcacagatcaaacagctactccagaatccccccgcgggtgtggatccaattatctgggaacaggccaaagttgataacccagattcagagaagctcatacctgtgccaatggtgggatttaaggaattactcaggcgtctcaaggtacaagaccagatgactaagcaacaccagacgcggctcgacattatctcagaggacatttcagagctgcagaaaaaccagacaaccagtgtggcaaagatcgcccagtacaagaggaagctgatggacctcagccaccggactttgcaagtccttattaagcaagagattcagcgcaagtccggttacgccatacaagcagacgaggaacagcttcgtgtccagctggacacgattcaaggtgagctgaatgccccgactcagttcaaaggaaggctaaacgaattgatgtctcaaattcgaatgcagaaccacttcggggcggttagatccgaagagaggtattacatcgacgctgatctgctacgtgagattaaacagcacctgaagcagcagcaagaggggctgagccatctgatttccatcatcaaggacgacctagaggacatcaagctggtggagcacggactcaatgagacaatccacattagagggggagttttctcgtag

SEQ ID NO: 197949 - DNA, 1380 bp, synthetic construct
  misc_feature 1..1380: note = Description of Artificial Sequence: Synthetic coding sequence
  source 1..1380: mol_type = other DNA
atggccttcaacttcggcgcccccagcggcaccagcggcaccgccgctgccactgctgcccctgcgggcggctttgggggcttcggcactacatccaccaccgctggaagtgcctttagtttttcagccccaaccaacaccggcaccacagctctagggggcctgtttagccagcctacccaagctccaacccagagtaatcaacttattaacactgcttccgctctcagtgctccgacactcctgggagatgaacgggatgccattttggctaaatggaatcagctgcaagccttctggggaaccgggaagggttacttcaataacaacatccctcctgtcgaatttacccaagagaatcccttctgtaggtttaaagccgttggatactcttgcatgccctccaataaagacgaggatggactggttgtgctagtgtttaataagaaagagactgaaattaggtctcaacagcagcagctagtagaatccctgcacaaagtgctgggtggcaaccagactctgactgttaacgtggaggggaccaaaacactgccagacgaccagacagaggtggtcatttatgtggttgaacggagtcctaacggaacttcccgcagggtgcctgcaacgacactgtatgcgcattttgaacaagcaaacattaaaactcaactccagcaactgggtgtgactctgtctatgacccgaacggaactatctccagctcagatcaagcaactgctgcagaatcctcccgctggtgtcgatcctataatctgggagcaggccaaggttgataacccggattcagagaaattgattcctgtacctatggtggggtttaaagagctgctcagaaggctgaaggtccaggatcagatgaccaagcagcatcaaacacgcctggatataatctccgaggatattagcgagctgcaaaagaaccaaacaaccagcgttgccaagatcgcacaatacaaaagaaaactgatggacctgtcgcatcggacactgcaggtcctgatcaagcaggagattcagagaaagtctggctatgccatccaggcggacgaggagcagctaagagtccaactggatacgatccagggagagcttaatgctcctactcaatttaagggacgtctgaacgagctcatgtctcagatccggatgcagaaccactttggcgcggtgagatccgaggaacgctattatatcgacgcagacctgctgagagagatcaaacagcacctcaaacagcagcaggaaggcttatctcatctgatttcaatcatcaaagatgacctagaggatattaagctggtggagcacggtctgaatgaaacaattcatatcagaggaggcgtgtttagctag

SEQ ID NO: 197950 - DNA, 582 bp, synthetic construct
  misc_feature 1..582: note = Description of Artificial Sequence: Synthetic coding sequence
  source 1..582: mol_type = other DNA
atgagcggcttcaacttcggcggcaccggcgcccccaccggcggctttaccttcgggactgctaaaacagccacaacaacacccgctaccggcttcagcttcagtacttccggaaccggcggtttcaattttggggcaccattccagccagctacaagcacaccatctaccggcctgttttctctggccactcagacaccagcaacccaaactacggggtttacctttggcacagcaaccctggctagtgggggaaccggtttcagcctcgggatcggagccagcaagctgaacctctccaacacagctgctacccccgccatggccaatccctccggattcggcctcggtagctctaacctgaccaatgcaataagcagcacggtcacctccagccaagggaccgctcccaccggattcgtcttcggacctagcaccacatctgtggcgcctgctaccacttccggtggctttagcttcacaggcggcagtaccgcacagccaagtggctttaacattggcagcgcaggaaactcagcgcagcccacggcgccggccacactcccctttacccccgcctag

SEQ ID NO: 197951 - DNA, 1569 bp, synthetic construct
  misc_feature 1..1569: note = Description of Artificial Sequence: Synthetic coding sequence
  source 1..1569: mol_type = other DNA
atgagcggcttcaacttcggcggcaccggcgcccccaccggcggcttcacattcggcaccgccaagaccgctaccactacgcctgccactggctttagcttctccacaagcggcacagggggatttaattttggcgcacccttccagccggcgacatcaacaccctccaccgggttgttctcccttgctacgcaaactcccgctacgcagacaaccggcttcacctttggcaccgcaactctagcctccggggggaccgggttttcactgggaatcggtgcgagcaagcttaatctctctaatacagcggccacaccagccatggccaacccgtctggctttggccttggctcatccaatctgaccaacgccattagcagtacagtcaccagctcccaggggaccgctcctacggggtttgtgtttggcccatctactacctcggttgccccggccaccacatcagggggcttctcattcactggcggatcaacagcccagccgagcggtttcaacattgggtccgccggcaattctgctcagcccaccgcgccagccacactgccatttacacccgccacccccgctgcgacaacagctggcgctactcagccagcagcaccaacacccacggcaaccataacctcaaccggcccgtctctgtttgcctcgatcgccaccgcgcctacatccagcgcaacaaccggtctctcactgtgtacgcctgtgaccactgcgggcgcacccacagcaggtacccagggttttagcctgaaggcccctggtgcagcaagcggcacaagcacaacaaccagtacagccgcaacggcgaccgccactacaaccagttcaagttctactaccggctttgcacttaaccttaaacctcttgcaccagcgggaatcccatctaacactgcggcagctgttactgcacctccaggtcccggagccgctgcgggcgccgcagcgtcctcagctatgacatacgctcagcttgagtcactgattaataagtggagcctggaacttgaagatcaggagcggcacttcttacagcaggccacccaggtgaatgcctgggatcgcacattgatagagaacggggagaagattacatcactgcaccgcgaagtggagaaggtgaagctcgaccagaaacggttggaccaggagcttgattttattcttagtcagcaaaaggagctcgaggatctcctctcaccactggaggagctcgtgaaagaacagtccggaacaatctatttgcagcacgcagacgaggaacgggaaaaaacgtacaagctggctgagaatatagacgcccagctgaaacgcatggctcaagacctgaaggacatcatcgagcacctgaacacctcgggggcgcccgcagacacctccgaccccttgcagcagatttgcaagatccttaacgcccacatggatagcttacagtggatagatcagaactccgcattactccagcgcaaggtcgaagaggtaacaaaggtgtgtgaagggcgacggaaggagcaggagagatcattccgaatcacctttgattag

SEQ ID NO: 197952 - DNA, 1569 bp, synthetic construct
  misc_feature 1..1569: note = Description of Artificial Sequence: Synthetic coding sequence
  source 1..1569: mol_type = other DNA
atgagcggcttcaacttcggcggcaccggcgcccccaccggcggcttcaccttcgggaccgctaaaactgcaactactacaccagctacaggtttcagctttagcacgtccggcactggcggattcaacttcggcgcaccgttccagcccgccacctccactcccagtactggtttgttttccttggccactcagacacccgcgactcagacaaccggctttaccttcggaaccgccacactcgctagcggcgggacaggcttcagtctcggaatcggcgccagcaaactcaatttgagcaacacagctgctacacctgccatggcgaacccatctggatttggcctgggcagcagcaatctcaccaatgctatatccagcacagtgacatcaagccagggcactgctccgactggattcgtctttggacccagcacaacatcagtggcaccagccaccacaagtggtggtttctctttcaccggtgggagcaccgcccagccaagcggatttaacattggctcggcaggtaattccgcccagcccacggcaccagcgactctcccattcaccccggcaacccccgcagcgaccactgctggagcaactcagcctgccgccccaactcccactgcaaccattacgtctactgggccctcactgttcgcatccatcgccaccgccccaacaagttctgcaacgacagggttgtccttatgcacacccgttacaactgccggcgccccaacggccgggacacaggggttttcactgaaagcgccaggagcagccagcggtacctcaacaactactagcacagcagcgactgcaaccgcgaccacaaccagcagctcgtcaactaccggctttgctctcaacctcaagccactagcgccagcaggtatcccatccaataccgcagccgcagtgactgctccccccggaccaggtgccgctgcaggggctgcagccagcagtgccatgacttatgcccagctggagtctctcatcaacaagtggtccctggagttggaagaccaggagcggcactttctgcagcaggcaacccaggtgaacgcttgggatcgaacgctcattgagaatggtgaaaagataacctccctccacagagaggttgagaaggttaaattagatcagaagaggttagatcaagaactcgattttatactgagccagcagaaggagctggaagatctgctgtctcctttggaggagctggtgaaagaacagagcggcacaatctacctgcagcatgcagatgaggagagagaaaagacttataaattggcagagaacatcgacgcacaactgaagcgtatggcacaggacctgaaagacatcatagaacacctcaacacctcaggtgcccccgcagatactagtgaccctctgcaacagatctgcaaaattctcaacgctcacatggacagtctacagtggatcgaccaaaatagtgccctactacagcggaaggtggaagaagtcactaaagtttgcgaggggaggagaaaagaacaggaacgttcatttcgaatcacattcgattag

SEQ ID NO: 197953 - DNA, 1569 bp, synthetic construct
  misc_feature 1..1569: note = Description of Artificial Sequence: Synthetic coding sequence
  source 1..1569: mol_type = other DNA
atgagcggcttcaacttcggcggcaccggcgcccccaccggcggctttacctttggcacggctaaaacagcaacaacgacaccagcgaccgggttttcattctccaccagtggaacaggcggcttcaatttcggagccccctttcagcccgcgacatcaactcctagcaccgggttattttcattggcaacccagacccccgcaacacagactaccggtttcacctttggcaccgccacattggcctccgggggtactggcttctcattagggataggcgcctcaaagttaaatcttagtaacaccgccgccacgcccgccatggcaaacccatcaggatttggactgggttccagtaatctgactaacgcgatcagctcaaccgtcacaagctcccaggggacagctccgacaggttttgtcttcggtccgtcaacaaccagcgtggctccagccactaccagtggtgggttttcttttaccgggggcagtactgctcagcccagcggcttcaatataggctcagcaggaaatagtgcccagccaacagctccagctaccctcccctttaccccggccaccccggcagctaccacagcaggcgccactcaacctgccgcccccacccccacagccacgattacatcaactggacctagcctgtttgcgagtattgctactgcgcccaccagcagtgcaactactggcctgtcactgtgtaccccagttacaacagctggagctcctacggctggtacacagggcttttccttaaaagcacccggcgccgcttccgggacatccacgactacaagtacagccgctaccgcaactgccaccaccacatctagttctagtacaacaggttttgctcttaacctcaaacctttagcccctgccggtatcccatcaaatactgcagctgccgtgaccgcccctccggggcccggagccgcggcaggtgccgccgcaagtagcgctatgacatacgcccaactggaaagtctcatcaacaagtggagtctcgagctggaagatcaggagcgacattttctccagcaggccacacaggtaaacgcatgggaccggacactgattgaaaacggcgaaaagatcacctcattgcacagagaggtggaaaaagtaaaattggatcagaagagacttgaccaggaactcgactttatcttatcgcagcagaaggaactggaggatttactgagcccattggaggaactagtaaaggaacagagtggtacaatttatctccagcacgccgacgaggagagagagaagacttataaattagcggagaatattgacgcacagttaaagagaatggctcaggacctaaaagacattattgaacaccttaacacctcaggtgctccagccgatacctccgacccccttcagcaaatttgtaagattctgaacgcacatatggactccttgcagtggatcgaccagaattcagcactgctccagaggaaggttgaggaggtgactaaagtgtgtgaggggcgccggaaagaacaggaaaggtcattccgaatcacattcgattag

SEQ ID NO: 197954 - DNA, 1971 bp, synthetic construct
  misc_feature 1..1971: note = Description of Artificial Sequence: Synthetic coding sequence
  source 1..1971: mol_type = other DNA
atggaggagctggacggcgagcccaccgtgaccctgatccccggcgttaacagtaaaaaaaaccaaatgtacttcgattggggcccgggcgagatgctggtctgtgagacctcctttaacaaaaaggaaaagtcagagatggtacctagctgtccattcatttacatcataagaaaggacgtggacgtttacagccagatcctgaggaagttattcaatgaatcacatggaatttttctcggccttcagaggattgacgaggaactgactggcaagtcacggaagagccagttggttcgggtgagtaagaactatcggtcagtgattcgcgcatgtatggaagaaatgcatcaagttgctatcgcggctaaagatcctgctaatgggcggcagttctccagccaagtgtcgattctaagcgccatggagctcatatggaatctgtgcgaaatcctgttcattgaggtggctcctgcaggtcccctccttcttcacctgctggattgggtgagattgcatgtttgcgaagtcgactccctgtcagcagacgttctcgggtcagagaacccaagtaagcacgacagcttctggaacctggtgaccatcctcgtgctgcagggtcgtctcgacgaagctagacaaatgctgagtaaggaggccgacgccagccccgcatccgcaggaatctgtcgcatcatgggggatcttatgaggacaatgcccatcctctcaccgggcaatacacagactctcacggagctggaactgaaatggcagcactggcacgaagaatgtgaacgctacctacaggacagtacattcgcgaccagtcctcacctggagtccctgctgaagatcatgctaggcgatgaagcagctctgttggagcagaaagaattactgagcaactggtaccatttcctggtgacaaggttgctctattctaatcctacagtcaagcctattgatctccactattacgcgcagagtagcttggacctgttcttggggggagagtcttccccagagcccctcgataacatcctgctggcagcctttgaattcgacatccaccaggtcattaaggaatgcagcatcgccctttcgaactggtggttcgtcgcccacttaactgacctgttagaccactgcaagctgctgcagagtcacaatctttacttcgggagtaacatgcgggagttcctgcttctggaatatgcatcaggcttattcgctcatccaagcctgtggcagctaggcgttgactacttcgactattgtcccgaattgggccgagtgtccctggaattgcatatcgagagaattcccctcaacacggaacaaaaagccttgaaggttctaagaatatgcgagcagaggcaaatgaccgaacaggtgcgttctatctgcaagattctggccatgaaggccgttcggaataataggctcggctcagctttaagctggtcaatccgagcaaaggatgccgctttcgccactctcgtctcagaccgttttctgagagattactgtgagagaggctgctttagtgacttggatctcatcgataaccttggccccgcaatgatgctgtcagaccgcctcacctttttaggcaagtacagggagtttcacagaatgtatggggaaaagcgtttcgcagacgcggcatcacttttgctcagtctcatgacctctcgtatcgcccctcggtcgttttggatgacgctgcttaccgatgccctgccattgctggagcagaagcaggtcatctttagcgcagaacaaacttacgaacttatgcgctgtttagaagacttgacttcccgacgcccggttcatggcgagagcgatactgaacagctccaggacgatgacattgagactacaaaggtggaaatgctccggctgtcccttgcacgcaatctggctcgtgccatcatcagagagggttctctggagggcagttag

SEQ ID NO: 197955 - DNA, 1389 bp, synthetic construct
  misc_feature 1..1389: note = Description of Artificial Sequence: Synthetic coding sequence
  source 1..1389: mol_type = other DNA
atggccgccagcagcgccgcccggagccccttctgccagcagtggtcttcaagcgggacatgtgtccgctttttcctgcttaagtggcctcaggtgactatcctggtgctccaggggagactcgacgaagcgcgacaaatgttatccaaggaagcagatgccagtcccgcttccgcagggatctgtcgcatcatgggagacttgatgagaaccatgcctatcctgtctccagggaacacacagacactgactgaactggagctgaaatggcagcattggcatgaagaatgtgagcggtatctgcaggatagtacctttgcgacatctccacatttagagtcactcttgaagattatgctgggggatgaagccgccttgctggagcaaaaagagctgttgtccaactggtaccattttctcgttacacgcctgctgtacagcaatccaacggttaaacctattgacttacactactatgcccagagcagtctggacctgttcctaggcggggaatccagcccagaaccattggataacattctgctggcagctttcgagttcgacattcaccaagtgatcaaagaatgcagtattgctttgagtaactggtggtttgttgcccacttaaccgacttgctcgaccactgtaaactgttacagtcccacaatctctatttcgggagcaacatgcgcgaatttctgctgctggaatacgcatctggcctttttgcgcacccatctctgtggcagcttggagtcgattattttgattactgcccagaactcggccgggtgagcttagagctgcacattgaacgaatccctctgaacaccgaacagaaggccctcaaagtcttacgcatttgtgaacagcgccagatgactgaacaggtgagatccatatgtaagattctggccatgaaagccgtcagaaataacagactgggatccgccctttcctggagtatcagagcaaaagacgctgccttcgcgactctggtgtccgaccgcttcctgagagactattgcgagcgcggctgcttctctgacctggatttaatcgacaaccttggccccgccatgatgctctcagatcgcctgacgtttttaggcaagtatagggaattccacaggatgtatggcgagaagcggtttgccgacgccgcttctctgctgctgtccctgatgacatctcggattgcccctcgatcattctggatgactctacttactgacgccctgcctcttcttgaacagaaacaggtcaaggtggctgcagctgtcgtcttctttgcctgccagagtttgcttgaattgtcatgtatagctgtggcggacgtgagagtttctagcttcgtggtgctgcccgtcagggtgtatagcccatag

SEQ ID NO: 197956 - DNA, 975 bp, synthetic construct
  misc_feature 1..975: note = Description of Artificial Sequence: Synthetic coding sequence
  source 1..975: mol_type = other DNA
atggtgcccagctgccccttcatctacatcatccggaaggacgtggacgtctactctcagatcttaagaaaactctttaacgaatcccacgggatattcctgggactgcagcgcatagacgaagaattgactgggaaaagtcggaagtcccagctcgtgcgtgtgtcaaagaactaccggtccgtgattcgcgcctgcatggaggagatgcaccaagtggctattgccgcaaaggatcctgcaaacggacgacagttctccagccaggtgtccatactgtccgccatggagctcatctggaacctgtgtgaaatcctgttcatcgaggtcgcacctgccggaccccttctcttacaccttctggattgggtgcgtctgcacgtctgtgaagtggatagcctgagtgctgacgtgttaggatccgaaaatcctagtaaacacgactccttttggaatttggtgacgatacttgttcttcagggccgccttgatgaagccagacaaatgctgtccaaggaggccgacgcaagtccagcctctgcaggcatatgccggattatgggggatctgatgagaaccatgcccattctatcccccggcaatacgcaaaccctgactgaactcgagctcaagtggcagcattggcacgaggaatgcgaaagatacctacaggactctacctttgccactagcccccatcttgagagtctgctgaagattatgctgggagatgaagccgccctcctggagcagaaagagctgctgagcaactggtatcatttcttggtcaccaggctgctatattccaaccccacagtaaagccaatcgacctgcactattacgcacagtcctcccttgacctctttttgggtggagaaagttcaccagaacccctcgacaacatcctactggctgcctttgagttcgacatccatcaggtgatcaaagagtgccgcgatgtgcaccttaagtag

SEQ ID NO: 197957 - DNA, 780 bp, synthetic construct
  misc_feature 1..780: note = Description of Artificial Sequence: Synthetic coding sequence
  source 1..780: mol_type = other DNA
atgcgggagttcctgctgctggagtacgccagcggcctgttcgcccacccatctttgtggcagctgggcgttgattactttgattattgcccggaactgggccgggtttcactggaacttcacatcgaacgcatccctctgaacaccgaacagaaagctcttaaagtcctgagaatatgtgaacagcgccagatgaccgaacaagttcgcagtatttgcaaaattctggcgatgaaggccgttaggaacaaccgtttgggaagcgctctgtcctggtctattcgcgcaaaagacgccgcatttgcaactctggtgtcagaccggttcttacgagattactgtgaacggggctgtttcagcgacctggacctgatcgacaacttagggccagctatgatgctcagcgacagactcacattcttgggaaaatatcgagagttccacaggatgtacggcgaaaagcgctttgctgatgcagcatccctcttgttgtccctcatgacatcaaggatcgcccctcgctcattctggatgactctactcacggacgccctccctctgctcgaacagaagcaggtaattttctctgccgagcaaacgtacgaactcatgcgatgcctcgaggacctgaccagccgccgccctgtgcacggagagtctgacaccgagcagctgcaggacgacgacattgagaccactaaagttgagatgctgaggctatcactggctaggaaccttgctagggccattatcagagagggatctctggagggatcctag

SEQ ID NO: 197958 - DNA, 1833 bp, synthetic construct
  misc_feature 1..1833: note = Description of Artificial Sequence: Synthetic coding sequence
  source 1..1833: mol_type = other DNA
atggtgcccagctgccccttcatctacatcatccggaaggacgtggacgtgtacagccaaattctgcggaaactgtttaacgagtcacatggtatattcctaggcctgcagcggatcgacgaggaactgaccggtaagtccaggaagtcacagttagtgcgggtgtccaaaaactatcggtctgtgatccgggcgtgcatggaagagatgcatcaagtggccatcgccgcgaaggatcctgcgaacgggagacaatttagtagccaagtgtccattctgtccgcaatggagctgatctggaatctttgtgagattctctttatcgaagttgcgcccgctggacctttgctcctccatctcctggattgggttcggttacatgtctgcgaagtggactcactgagtgctgatgtgctggggtctgaaaacccctctaagcacgacagtttctggaatctggtgacaattctggtcctccagggcagactagatgaggcacgacaaatgctgagtaaagaggctgatgctagccctgcaagtgctggcatatgtagaatcatgggcgaccttatgcggactatgccgatcctgagccccggcaacacgcagactctgaccgagctggagctgaagtggcagcactggcatgaggaatgtgagaggtatcttcaggactcaacgttcgccacaagcccgcatttggaatcattgctgaaaatcatgctcggcgacgaggccgccctcctggagcaaaaggaactcctgtccaactggtatcacttcttggtcacccgccttttgtactctaaccccacagtaaaacctatcgatctgcattactacgcccagtcctctctggacttgttccttggaggagaaagttctccagaacccctggacaacatactgctggccgcatttgagttcgacatccaccaggtcataaaggagtgcagcattgctctgtcaaactggtggttcgtcgctcacctgactgatctgctcgaccactgcaagctactgcagtcccacaacctatatttcggcagtaacatgagggagttccttctgcttgagtatgctagcggcctcttcgcacacccttccctatggcagttgggcgtggattactttgattattgtcctgaattagggagagtcagcctggagctgcacattgagcggatacccttgaacactgaacagaaggcgctcaaggtgttgcgcatttgcgaacagcgccagatgacagaacaggttagaagtatctgtaaaatcctggccatgaaagccgtccgaaataacaggttgggttcagctttgtcatggtctatacgcgctaaagacgcagccttcgccacgcttgtgtccgatcgctttttgcgagactattgtgagcgaggttgttttagtgacctggaccttattgataatctaggtcccgctatgatgctcagcgaccggctaacatttctcggcaagtaccgagagtttcatagaatgtatggcgagaagaggttcgccgacgccgcttctcttctgttaagccttatgaccagtagaatcgccccccgctccttttggatgacacttctcacggacgctctaccattgctggagcagaaacaggtaattttttctgcagagcagacatacgagcttatgaggtgtttggaggatctcacttctcgcaggcctgtacatggagagtccgacaccgaacagctccaggacgatgacatcgagacaaccaaggtggaaatgctgagactcagcttggcgagaaaccttgcaagagccataatcagagaggggagtttagagggctcctag

SEQ ID NO: 197959 - DNA, 846 bp, synthetic construct
  misc_feature 1..846: note = Description of Artificial Sequence: Synthetic coding sequence
  source 1..846: mol_type = other DNA
atgaagctggccgccatgatcaagaagatgtgccccagcgacagcgagctgtccatccctgctaagaactgctaccggatggtgatcctggggtctagtaaggtgggaaagaccgcaattgtatcaagattcctcaccggacgctttgaagatgcttatacccctaccatagaggactttcatagaaagttttatagtatacgaggagaagtctatcaattggacatcctcgacacatcaggtaatcacccattccccgcgatgcgacgattgagtatactcactggggacgtctttattctggtctttagcctcgacaacagggattcattcgaggaggtccaacgcctgcggcaacagatccttgacacaaagtcgtgcctgaaaaacaaaaccaaagagaatgtggacgtgcccctggttatctgcggtaacaaaggcgatcgcgatttctaccgggaagtggatcaaagggaaatagagcagctcgtcggggatgacccccaaagatgcgcctacttcgagattagcgcgaaaaagaattcctcgctcgaccagatgtttagggcacttttcgcaatggcaaagttgccttcggaaatgtctcctgaccttcaccgcaaagttagcgtacagtattgcgacgtgctgcacaagaaggcactgcggaacaagaagcttctacgggccggaagtgggggtggtggtggtgatcccggcgacgcattcgggatcgttgcccccttcgcccggcgtcccagcgtacactcagatctaatgtatatcagagaaaaagcatctgcagggtcccaggcaaaggataaagaacgctgtgtgatcagctag

SEQ ID NO: 197960 - DNA, 1881 bp, synthetic construct
  misc_feature 1..1881: note = Description of Artificial Sequence: Synthetic coding sequence
  source 1..1881: mol_type = other DNA
atggtgctggagctgcccaagcggtggggcaagaacagcgagttcgagggcggcaagagcacagtcaattgcagcacaacgcctgtggcggaacgcttttttacatcttccacctctttgactttaaaacatgctgcctggtatccatccgagatactggatccacatgttgtgctcctcacaagcgataatgtgatacggatttactctctccgcgagccgcagacacctaccaatgtgatcatcttatcagaagctgaagaagagtctcttgtgctcaataaggggcgagcatatacggctagtctgggtgagactgccgtcgcatttgattttggccccctggccgccgtgccaaagaccctttttggacagaatgggaaagacgaagtggtggcctacccactctacatactctatgaaaacggcgaaacattcctaacctatatttccctgctccactcacccggaaacatcggaaagttgctgggtcctttgccaatgcaccccgctgcagaggacaattacggatatgacgcctgcgctgttctgtgcctgccctgtgtgccaaatattctagtcatcgccaccgagtccggcatgttgtatcattgtgtcgttctggaaggcgaggaagaggacgaccacacttcggagaagtcctgggattcccgcatagatttgattccctccctgtacgtgtttgaatgtgtggagctggagctggcgcttaagctagctagcggcgaagacgatccatttgattccgacttcagttgccctgttaaactgcatcgggaccctaaatgcccttcacgatatcattgcacccacgaggccggcgtgcactcagtaggcctgacgtggatacataaactgcataaattcctggggagtgacgaggaagataaagacagcctccaagaattgagcaccgaacagaagtgttttgtggaacatatcctgtgtaccaaacccctgccttgccgtcaacccgcacctataaggggattttggatcgttcccgatatccttggacccacgatgatttgtatcacttctacatatgaatgtctgatttggccactcctgtcaacagtgcaccccgctagccccccactgttgtgcacgagggaagacgtcgaagtggccgagtcgcctctaagggtcttggctgagactcccgactcatttgaaaaacacatccggtcaattctgcagaggtccgtggctaacccagcatttctgaattgctttactcagctgcggaagatcaaggtggaaacactatttctcagagcaagtgagaaagacattgcccctcccccggaagaatgccttcagctgcttagcagagccacacaagtgttccgcgaacaatacatactgaaacaagacctggctaaagaagagatacagagacgagtgaagctactgtgcgatcagaagaagaagcagctggaggatctgtcttattgcagagaggagcgcaagagcctcagagagatggccgaacgactggctgacaagtacgaagaagctaaggaaaaacaagaagacattatgaataggatgaagaagctgcttcattcttttcatagcgagctgccagtgctttccgattccgaacgggatatgaaaaaggagctccagctgattcccgatcagcttcgacatctgggaaatgccataaagcaggtcacaatgaaaaaagattaccagcagcagaagatggagaaggttttgtccctccccaagccgacgatcatcctctccgcttaccaaaggaaatgtattcagagcatactgaaggaggagggggagcacattagagagatggttaaacagataaatgatataaggaaccatgtgaacttctag

SEQ ID NO: 197961 - DNA, 2226 bp, synthetic construct
  misc_feature 1..2226: note = Description of Artificial Sequence: Synthetic coding sequence
  source 1..2226: mol_type = other DNA
atggccgccgccgagggccccgtgggcgacggcgagctgtggcagacttggctgcccaatcacgtggtgttcctgaggcttcgcgagggcttaaaaaaccagtcgccgaccgaggctgagaaacctgcatcctctagtttaccatcatccccccccccccagttgctcacccgaaacgtggtattcggactgggaggagagttattcctgtgggatggcgaagactcatccttccttgtggtgcgtctccggggtccctcagggggcggcgaagagcccgcgctaagccaataccagcggctgctttgcattaatccacccttgtttgaaatctaccaggtcctgctctcgccaacgcaacaccatgtggctctcataggcatcaagggactcatggtgttagagctacctaagcggtggggtaagaatagtgagttcgagggaggcaaatcaacagtgaactgctccactactcctgtcgcagaacgctttttcacgtccagtacctctctcacccttaaacatgccgcatggtacccctcagagatactggatccacacgttgtacttcttacctctgacaatgtgatcagaatctacagcctgcgggagccccagactcccaccaatgtgattattctttccgaagccgaggaagaatcactagtgcttaacaaggggcgggcttacacagccagtctaggagagactgcggtcgcattcgattttggtccactggcggccgtgcccaagacattgttcggtcaaaatgggaaggatgaagtggttgcctatcccctgtatatcctgtacgagaatggcgagacttttctcacctacatatctttgcttcactcacctggcaacatcggtaaactgcttgggccactgccaatgcatcccgccgccgaggacaactacggatacgatgcgtgcgccgtcctctgtcttccatgcgtgccaaatatcctggtgatcgccactgaatcggggatgctataccactgtgtggttttggaaggcgaggaagaagatgaccacacttccgagaaaagttgggactctcgcattgacttaatacctagtttgtatgtcttcgagtgtgttgaattagaacttgccctgaaactggcttccggggaggatgatcctttcgattctgacttcagctgtcctgtgaagctccatcgggaccctaagtgcccttcacgatatcactgtacgcacgaagctggcgtgcactcagtaggattgacatggatccataagctccataaattcctcggatctgacgaggaggacaaggatagcttgcaggaattgtctacagaacaaaaatgttttgtagagcatatactgtgcacaaaaccactgccttgccgccagccagcacccatcagaggcttttggatcgtgcccgatatccttggccccaccatgatctgtatcaccagtacctacgaatgcctgatttggcccctgttgtcgactgtgcaccctgcatctcccccactgttatgcaccagggaggacgtggaagtggctgaatcacccctgcgggtcttagcagagactcctgattctttcgaaaaacacattagatctatactccaacggtccgtcgcaaatccggcttttctgaaagctagcgaaaaggacatcgcaccccctcctgaagagtgcctgcaacttttgagtcgggccacccaggttttccgcgaacaatatatcctaaagcaggatctggcgaaggaagaaatacagcgtcgcgtaaagttgctgtgtgatcagaagaagaagcagttggaagatctgagctattgccgcgaagagagaaagagtttgcgcgaaatggctgagaggctcgctgataaatatgaagaagctaaggaaaagcaagaagacataatgaatcggatgaaaaaacttttgcacagtttccacagtgagcttcccgtgctttcagactccgagcgcgacatgaagaaagaactgcaacttatccccgatcagctgcggcacttgggaaacgcaattaaacaggtcactatgaagaaagactatcagcaacaaaagatggaaaaagtgctctccctgcccaaaccaactatcattctgtctgcctaccagaggaagtgcatccagtcaattctcaaggaagagggagagcatatacgcgagatggtgaagcagattaacgacatccggaatcatgtgaacttttag

SEQ ID NO: 197962 - DNA, 2460 bp, synthetic construct
  misc_feature 1..2460: note = Description of Artificial Sequence: Synthetic coding sequence
  source 1..2460: mol_type = other DNA
atggacaccgagggcttcggcgagctgctgcagcaggccgagcagctcgcggctgagacagaaggaattagtgagctcccacacgttgaaagaaacctgcaggaaattcagcaggctggagagaggttgaggtcccgcactttgactagaacatcccaggaaactgcggatgtgaaggcttccgtgcttctcggtagccgcggcctggacatcagtcatatatcccagcggctcgaatcactctcggcagcaacaaccttcgaacccctagaacctgtgaaagacacagatatccaggggtttctgaaaaatgagaaggataatgctctgttatccgctattgaggagtctaggaagcggacattcgggatggccgaggagtatcacagagaaagcatgttggtcgaatgggagcaggtgaagcagcggatactacacacactgcttgcaagcggcgaggacgctttagattttactcaggaatcagaaccaagctacattagcgacgtggggcctcctgggcgtagctctcttgacaacatagaaatggcctacgctcggcaaatttatatctataatgaaaagattgtgaatgggcatttgcagcctaacctggtggatctttgcgccagtgtggccgagctcgacgataagagcatttcagacatgtggacaatggtcaagcagatgacggatgttctgctgacaccggctactgacgctctgaaaaatagatccagtgtcgaagtgagaatggagttcgtacgccaagcacttgcttacttggagcagtcctataagaattataccctcgtcaccgtttttggtaacctgcatcaggcccaactcggcggcgtgcctggaacctaccaactagtgcgatccttcctgaatataaagctccctgctcccctcccaggtttgcaggatggcgaagtagagggccatcccgtctgggctctgatctactattgtatgaggtgtggagaccttctcgcagccagtcaggttgtaaatcgagcccagcatcagctgggagagttcaagacgtggttccaggaatatatgaactctaaggatcgtagactcagccctgccactgaaaataagctccgcctacattacaggcgggctctgcggaacaatactgatccatataagcgggccgtttactgcatcattggccgatgcgacgtgaccgacaatcagagcgaagttgcagacaagaccgaagactatctgtggctcaaacttaatcaggtctgctttgatgacgacggtacaagctccccacaggacaggttgacactgagccagttccagaaacagttgttggaggattacggtgaaagtcatttcaccgtcaaccagcaaccattcctgtacttccaggtcctatttctgactgcccagttcgaggccgcggtggcctttctgttcaggatggaacgcttaaggtgccatgccgttcatgttgccttagtattgttcgaattgaagctgctgttgaaatcctcgggccagtccgcccagctgttgtcccatgaacctggggatcccccttgcctgagaaggctgaatttcgtaaggctgctcatgctgtatacccgcaaattcgagtctacggacccccgtgaagctctgcagtatttctattttcttagagacgaaaaggattctcagggcgaaaacatgttcctgcgatgcgtgtcggaactggtgatcgagagtagagagtttgatatgatcctggggaagctggagaacgacggcagtcggaagcctggcgtgatcgataagtttacctccgataccaagccaattattaacaaggtggcctcagttgcggagaacaagggactttttgaggaggccgcaaaactgtacgatctagctaaaaatgccgataaagtgctggaactgatgaataaactgctttcccctgtggtcccacagatcagcgccccgcagagcaacaaggaaaggttgaagaacatggccctttctatcgctgaaaggtatcgcgctcaggggatctccgcaaacaaatttgtagacagcacattttatttgctgcttgatttaatcacattctttgatgaataccatagtggacacatcgaccgggcgttcgacatcatagaaagacttaagctagtgcctcttaatcaggaatccgttgaggagcgcgtggccgcttttaggaacttctcagatgaaattcgtcataatctcagcgaggtcctgctagccaccatgaacattctctttactcagttcaaaaggttgaaaggcaccagcccaagcagtagttcaagaccacagagggtaattgaagatcgagacagccagttacgcagccaagcccgcactctgataacttttgcgggaatgattccctaccggacgtcaggtgatacgaatgccaggctggtccagatggaggtactgatgaactag

SEQ ID NO: 197963 - DNA, 2091 bp, synthetic construct
  misc_feature 1..2091: note = Description of Artificial Sequence: Synthetic coding sequence
  source 1..2091: mol_type = other DNA
atggccgaggagtaccaccgggagagcatgctggtggagtgggagcaagtcaaacaaaggattcttcacaccctcttggcttccggtgaagacgcactggactttactcaggaaagcgaaccttcttacatttccgacgtgggtcctcctgggcggagctccctggataatatagaaatggcctacgcccgtcagatatacatatataatgagaagattgttaatgggcacttgcagcctaacttggtcgatctctgtgctagtgtggccgagctggatgacaagtccatttcggatatgtggaccatggtgaagcagatgactgacgttctactgacacccgcaaccgatgccctgaagaaccgctcgtccgtggaagtgcgaatggagttcgttagacaggcacttgcctacctcgagcagagttacaaaaactacaccctcgttacggtcttcgggaaccttcaccaggcccagcttggcggcgttcctggaacatatcaactggtccggagttttctgaacatcaagctacctgcccccctgcccgggctccaagatggcgaggtggaggggcatccagtgtgggctctcatctattactgcatgagatgtggggacctgctggccgcttctcaagtggtcaaccgtgcgcagcatcagcttggggagttcaagacatggttccaggaatatatgaacagcaaggaccgccggctttccccagcaactgaaaacaagctcagactccattatagaagggccctacgcaacaataccgacccttataagagagctgtgtattgtatcattggaaggtgcgatgtgactgacaaccaatcagaagttgccgacaaaaccgaagattacctctggctgaagctgaatcaggtgtgtttcgacgacgacggaaccagcagcccccaagacagactgaccctctcccagttccaaaaacagctgctggaggattatggggagtcccactttacagttaatcagcagcccttcctatattttcaagttctgttcctcactgcccaattcgaagcggcagtggcattcctcttccggatggagagacttcgttgtcacgccgtccacgtagccttagttttatttgaactgaagcttcttctgaaatcatctgggcaaagcgctcaactgctcagccacgagcccggggaccctccatgcttgaggcgactgaattttgtaagactgctgatgctttataccaggaagttcgaatcgactgatccacgggaagcactccagtatttctattttcttagggatgagaaagacagccagggggaaaatatgtttctgcgttgtgtaagtgagcttgttatcgagtctcgggaattcgatatgatactcggcaagttggaaaacgacggttcccggaagccaggcgtgatcgacaagtttaccagcgacacaaaaccgatcatcaataaggtcgcatcggttgcagaaaacaaaggacttttcgaagaggctgctaagctttacgaccttgccaagaatgctgacaaagtgctagagttgatgaacaagctgttgtccccggtcgtgccccagatctccgccccacagtctaacaaggaaagattgaaaaatatggcactgtcaatagccgaacgctatagagcccaggggatctccgcgaataagtttgttgatagcacattctatttattgctcgatctgattacctttttcgatgagtatcattcaggacacatcgaccgcgcttttgatatcatcgagagactcaaacttgtcccgctgaatcaagagtctgtcgaggagcgcgtcgccgctttccgaaatttttccgatgagattagacacaatttgagcgaagtgctgctggctacaatgaatatcctgtttacacagttcaagcgcctaaaagggacctccccaagctctagcagccgcccccagcgagtgatcgaggatcgggacagtcaacttcgaagccaggcgcgaacattaattactttcgcgggaatgatcccttataggacaagcggagatactaacgcgagactagtacagatggaagtgcttatgaactag

SEQ ID NO: 197964 - DNA, 2091 bp, synthetic construct
  misc_feature 1..2091: note = Description of Artificial Sequence: Synthetic coding sequence
  source 1..2091: mol_type = other DNA
atggccgaggagtaccaccgggagagcatgctggtggagtgggagcaggtcaagcaacgtattctgcacactctgctggccagcggcgaggatgcactggactttacacaggaatcagagcccagctatatcagcgatgtggggccccctggaagaagttcccttgacaatattgaaatggcttatgcaagacaaatctacatatataatgaaaagattgtgaacggacatcttcagcctaatctcgtggatttgtgtgcctctgtcgcggaactcgatgacaagagtatctcagacatgtggaccatggttaaacagatgactgacgttctgctaacgcccgcaaccgatgcactgaagaacagatctagtgtggaagtccgcatggaattcgtgaggcaggccctggcttatctcgagcaaagctacaaaaattatacccttgtgaccgtgttcgggaacttgcatcaggcccagctggggggggtgccgggaacgtaccagctcgtccggtcctttctgaatattaagctgcctgctccactacctggtctgcaagatggcgaagtcgagggtcatccagtttgggcactgatctattactgcatgagatgcggcgacctgttggcggcttcacaggtcgtcaatcgcgctcagcaccaattgggcgaattcaaaacctggttccaggaatacatgaatagcaaggacaggcggctgtctccagcaaccgagaacaagctacgccttcactatagaagggctctgcggaataatacagatccttacaagcgggccgtgtattgtatcattgggagatgtgatgtcaccgataaccaatccgaggtggcagataagacagaagattacttatggttaaagttaaaccaagtctgcttcgatgacgatggcacaagcagccctcaggaccggctgactttgtcacagtttcagaagcaactgctggaggattatggcgagagccacttcacagtgaatcagcagccatttttgtatttccaggttctgtttctgaccgcacagttcgaagccgccgtggcatttctgttccggatggaaagactgaggtgtcatgcggtgcatgtggcccttgttttgttcgaactaaagctcctcttgaaatcaagcgggcaatccgcccagctcttatcgcatgagccaggcgacccaccctgcttgcggcgactgaatttcgtgaggcttctgatgctctacacgcgcaagttcgagtcaacagaccccagggaggccctccagtatttctacttcctcagagacgaaaaagactcccagggcgaaaacatgtttctgcgctgcgtaagcgagctggtgatcgagtcacgggaatttgacatgattctgggaaaactggagaatgatgggtctagaaagccaggcgtcatagacaaatttacctcagacaccaagcctatcatcaataaagtcgccagcgttgctgagaacaaaggactgtttgaggaggcggcgaaactctatgatttagccaagaacgctgataaggtgttagagctgatgaacaagctcctgtccccagtcgtccctcagatcagtgcaccgcaaagtaataaagagaggctaaagaacatggccttgtctatagctgaacgctaccgtgctcagggaatctcagccaataaatttgtggacagcacgttctacctgctgctcgacctcatcacattcttcgatgagtaccacagtgggcatatcgatagggcgttcgacatcatcgaaaggttgaagcttgtgccattgaatcaggagagcgtagaagagcgcgtggccgctttccgaaatttcagtgacgagattagacacaacttgtcggaagtgctcctggccaccatgaacatcctcttcacccaatttaaacggctgaaaggcacatctccttcctctagttctcgaccgcagagagtaattgaagacagagatagtcagttaaggtctcaggcacgcactctgattacattcgccggcatgatcccctatagaactagcggagacacaaacgctcgcctggtccagatggaagttctcatgaactag

SEQ ID NO: 197965 - DNA, 5403 bp, synthetic construct
  misc_feature 1..5403: note = Description of Artificial Sequence: Synthetic coding sequence
  source 1..5403: mol_type = other DNA
atgttcaacaagagcttcggcacccccttcggcggcggcaccggcggttttgggacgacttccaccttcggccagaacacagggttcggaactacttccgggggcgcgttcgggacctcagcatttggatcatctaacaatactggcgggctatttggtaattcgcagacaaagcccgggggtctattcggcacgtccagcttttcacagccagcaacatcaacgtccactgggttcggattcggtacttctactggaacagctaatactctgtttggaactgctagcaccggtactagtctcttttcatcccagaacaatgctttcgcacagaacaagccaacgggatttggcaatttcggaacttctacatccagtggtggccttttcgggactactaatactacatctaacccatttgggtccacttccgggtcgctgtttgggccctcctcttttactgctgctccaacaggaactaccatcaagttcaatcccccaacagggactgatactatggtcaaagctggggtttcgacgaatatatcaacaaagcatcaatgtataacagccatgaaggagtacgagagcaaatccctagaagagctgagattagaggactaccaagccaatcggaaaggtccacaaaaccaagtgggcgcaggaacaacaacggggctctttggctcatcacccgcaacatcttcagctacaggactcttcagctccagcacaactaactcaggctttgcctacggacagaacaaaactgctttcggcacatcgaccacagggttcgggaccaacccgggggggctatttgggcaacagaaccaacaaaccacctcactgttcagcaaacccttcggccaagctaccacaacccaaaatacaggcttctcttttgggaataccagcaccatcggccagcccagcaccaacacgatgggtttattcggagttacccaggcctcccagccgggcggattgttcgggaccgctactaacactagtacaggcaccgcctttggtaccgggaccggactttttggccagactaacaccggtttcggcgccgtgggatctacactgttcggcaataacaagctgaccacgtttggaagttccaccaccagcgcacctagcttcgggactacctctggtggactttttgggtttggcacgaacacttctggaaacagcatttttggaagtaagcccgcaccaggaaccctgggcacagggcttggggccggctttggcacggccctgggagccggccaggccagtctgtttggtaataatcagcctaagatcggggggcccctcggcaccggtgcctttggagctccagggtttaacaccacaacagctaccctgggttttggtgccccccaagcacctgtggccctgacggatccaaatgcttctgctgcccaacaggctgttctacagcagcacattaacagcctcacatatagccccttcggggatagcccactcttccgaaacccaatgagcgaccccaaaaagaaggaggagcgtctaaaacccactaaccctgcggcacaaaaagcactgaccacacccacacattacaagcttacaccacggcccgccactagggtcagaccgaaggcactgcagactacaggaactgccaagagccacctctttgacggcctcgacgatgacgagccttctctggctaatggagcatttatgcccaaaaaaagcatcaaaaaattggtactcaagaatctcaacaatagcaacctgttcagcccagtgaatcgagactctgagaacctggcctcaccatccgagtatcccgagaatggcgaacggttctctttcctcagcaagcctgtggatgaaaaccaccaacaggatggagatgaagacagtctggtcagccacttctatactaatcctattgccaaacctatcccacagactcccgaatcggctggtaacaaacactccaattctaattccgtggatgacaccattgtggccttaaatatgagagcagccctgcgaaacggtctcgaagggtcctcagaggaaacctccttccacgatgaatctctgcaggatgaccgcgaggaaattgaaaacaatagctaccacatgcaccccgcgggaattatactgaccaaagtcggatattacactattccttccatggacgatcttgcgaaaatcaccaatgagaaaggtgagtgtattgtcagcgattttaccatcgggcggaagggttacggctccatttactttgagggcgatgtgaacttaacaaatctgaaccttgatgacattgtgcacattaggaggaaggaagtggtagtgtatctagacgacaatcagaaaccaccagtcggggaagggcttaatcgtaaggccgaggtgacactagacggtgtctggcctactgacaagacgtccagatgtctcataaagagcccggacagactggccgatatcaactatgaaggccgcctggaggccgtgtccagaaaacagggggctcagtttaaagaatacaggccggagacaggttcttgggttttcaaagtgtctcacttttcaaagtatggacttcaagactctgacgaagaggaagaagagcatccctcaaagacatctaccaaaaagctgaaaacagccccgctcccaccagctagtcaaacaactcccctacaaatggccctgaacgggaaacccgcaccccccccccagtcccaatcacccgaggtggagcagctgggaagggtggttgaactcgactctgacatggtggatatcacgcaggaacctgtcctcgacactatgttagaagagtccatgccagaggaccaggagcctgtaagcgcttctacacatatagctagtagcctgggaattaacccacacgtgctgcagatcatgaaggcctcgctactgaccgatgaggaggatgtggatatggctctggatcaacgcttttcacggctgccatccaaagctgacacctcacaagagatctgttctcctaggctgcctatcagcgcctcccattcttcgaagactcgctccctggtgggtggccttctgcagtctaaattcacctcaggggcatttctgtcaccatccgtgtctgttcaggaatgccgcaccccccgtgcagcaagcctgatgaacattccaagtacctcttcatggtccgttccacctcctctaacctcggtgttcaccatgccttcaccagcacccgaggtacccttgaagaccgttgggacgagacgccagttaggattggtcccgagagaaaaatcagtcacctacggaaaggggaaactcttaatggatatggctctcttcatggggcgaagtttcagagttggatggggccctaactggactctcgcgaatagcggggagcaattaaatggttctcacgagctggagaaccaccagatagcagactcaatggaatttgggtttttacctaatccggtcgcagtgaagccactgaccgagagtccattcaaggtgcatctggagaagttgagtctcagacaacgcaaaccagacgaagatatgaaactgtatcaaacaccattagaacttaagttgaaacactcaacagtccacgtcgatgagctctgcccccttatcgtgcccaacctgggagtcgcggtcatccatgactatgcagattgggtgaaggaggcatccggcgacttaccagaggcccagattgttaagcactggagcctcacctggactctgtgtgaggctttgtggggccatctcaaggagcttgactcccagctgaatgagccacgagagtatatccaaattttggaaaggcgccgagccttcagcagatggttgtcctgcaccgccaccccacagattgaagaggaggtgtcgcttacacagaagaattcccctgtagaggccgtgtttagctacctgacaggtaaaagaatttctgaggcctgcagtttagcccaacagagcggtgaccaccggttagctttgctgttaagccagtttgttgggtcccagtcagtgcgggagctcctgaccatgcagttggtggattggcaccagctgcaggcagactcattcatacaggatgagcgcctgcggatatttgccctgctcgcaggcaagcctgtttggcaactgagtgagaagaaacagatcaacgtgtgctcccagctggattggaagcgcagccttgccatccacctctggtacctccttccacccaccgcatccatttcccgggcactttcgatgtacgaggaagcttttcagaataccagcgactcagataggtatgcctgctcgcctctgccctcgtatctggaaggctctgggtgcgtgatcgcagaggagcagaatagtcagacgcctcttagggatgtgtgctttcacctcctcaagttgtactctgacaggcattacgacttgaatcagttactagagccccgttccatcactgccgatcctcttgactacagactgtcatggcacctatgggaagttctgagagcattgaattatactcacctttcagcccaatgtgagggcgtgctgcaagccagctatgcaggccagctggaatctgaaggcctgtgggagtgggccatctttgtattgttacatatcgataacagcggcatcagagagaaagccgtgcgcgagttattgaccagacattgccagctcttagagacacctgagtcttgggccaaagaaaccttcctgacccagaagctgagagtgcccgccaaatggattcatgaggctaaggcagttcgggcccatatggagagcgataaacacctggaggccctctgcctgttcaaagccgaacactggaaccgttgccacaaactgattattcggcatctggcgtccgacgctattatcaatgaaaactacgattacctgaagggctttctggaggatctggcgcccccggagagaagctctcttatccaagactgggagacttcaggtctggtttacttagactacatccgtgtcattgaaatgctgcgacacatccaacaggtggactgctctggaaatgatctggagcagctccatatcaaagtaacgtctctttgctcaagaattgagcaaatccagtgctacagcgctaaagaccggctggcccagtcggatatggcaaagagagtcgcgaatctgctcagagtcgtcttaagccttcaccatcctcccgaccggacctcagactctactccagacccacagcgagtcccactgcgactcctagctccgcatattggtagacttcccatgcctgaggactatgccatggacgagctcagaagcctgacccagtcctacttgcgggagctggcggtgggatcactgtag

SEQ ID NO: 197966 - DNA, 5181 bp, synthetic construct
  misc_feature 1..5181: note = Description of Artificial Sequence: Synthetic coding sequence
  source 1..5181: mol_type = other DNA
atgttcaacaagagcttcggcacccccttcggcggcggcaccggcggttttggcaccactagtacttttggtcagaatacggggttcggaacgacctccggcggagcctttggcacttccgcattcggatcatctaacaataccgggggattgtttggcaactctcaaaccaagccaggcggtttgttcggtacctctagcttctctcagccagcaaccagcacatccaccggattcggattcgggaccagtactgggaccgccaatactttgttcggaacagcgagcactggcacatctctattctcaagccaaaacaatgccttcgcccagaacaagcccaccggctttggcaatttcgggacttccacatcaagcggggggctcttcggtacaaccaacactacatccaaccctttcggctccacctctggctcactgttcgggccaagttcgtttacagcggcccctactggtaccactatcaagtttaatcccccaacggggactgacaccatggtgaaagctggggtttctacgaacatctcaactaagcaccagtgtattaccgccatgaaggagtacgagagtaagtcgctggaggaactgcgccttgaagactatcaggcaaaccggaagggaccgcaaaatcaggtgggtgcagggactacaaccggcctattcggttcctcaccagccacatcttcggccaccggcctgttctcgagcagtaccaccaacagtggattcgcgtacggtcagaacaagacagcattcggcacgagcaccacagggttcggtaccaatccgggcggactgttcgggcagcagaaccagcagaccacctcactatttagcaaaccatttggacaggccactactacacagaacacgggattcagctttggcaacacatccaccattggccaaccttccacaaacaccatggggctgtttggcgtaacacaggcttcgcagcctggtggtcttttcgggaccgccacaaacactagtactggcacagcttttgggaccggaaccggtttgttcggtcagaccaacacagggtttggcgccgtgggctcgacactgtttggcaacaacaagctgaccaccttcgggtcctccacgacatctgctccgtctttcgggaccacatccggcggtctcttcggttttggtacgaatacgagtggtaacagcatttttggcagcaagccagctccaggtaccttagggaccgggctgggtgctgggttcggcaccgccctgggtgctggacaggcgagcctgtttgggaataaccagcccaagattggtggccccctcgggaccggtgctttcggagctccagggttcaacactacgactgcgaccttagggtttggtgccccccaggctccggtcgccctgacagacccaaacgccagcgcagcccagcaggccgtgctgcagcagcacattaacagcctcacatatagccctttcggcgattcgcccctgttcaggaatcccatgtcagatcccaagaagaaagaggagaggctgaagcctaccaaccctgctgctcagaaagccctgaccacacctacacactataagttgacacctcgaccagctacccgggtgcgaccaaaggcccttcagactaccggtaccgctaagagccacctgttcgatggcctagacgatgatgaaccatcactagccaacggtgccttcatgccaaagaaatctattaaaaaactagtgctgaaaaatttgaacaatagcaatctgtttagtcccgtgaatagagacagtgaaaatctggcctcaccctctgagtacccagagaatggggaacgatttagcttcctgagcaaacccgtggacgagaaccatcaacaggacggagatgaagactcactggtgtcccacttttataccaacccgatcgccaagcctattccccagactcccgagtcagccgggaataagcatagcaactctaacagtgtggacgacacaatcgtggcactcaacatgcgcgccgctctgcgcaacgggctggaggggtcctctgaagaaaccagcttccatgacgagagcctgcaggatgatcgggaggagattgagaacaatagttatcatatgcacccagccggcataatcctgacaaaagtcggctattacaccataccgtccatggacgatctcgctaagatcactaatgagaaaggtgaatgcattgtatcagactttacaataggtcgcaaaggctatggatcgatttatttcgaaggcgatgtgaatcttaccaatctgaatctggacgatatcgtccacattaggcggaaggaggtcgtcgtttacctggatgacaatcagaagccacccgtaggtgagggcctgaaccgcaaggcagaggtgaccctagatggtgtgtggcctacagataaaacaagtcgttgccttatcaagtcacccgaccggctggctgatattaactatgagggcagactggaggcagtgtcccgcaagcagggcgcccagttcaaggaatatcggcctgagacaggatcctgggtgttcaaagtgagccacttcagtaagtacggattacaggactctgacgaagaggaggaagagcacccatccaagacaagcacaaagaagcttaagacggcaccgctgccacctgcgtcacagacgactccgctgcagatggctctgaatggtaagcccgctccaccaccacagagccaaagccctgaagttgaacagctgggtcgcgtcgtggagctcgatagtgacatggtcgacatcacccaagagcctgtcctcgataccatgctggaggagtcaatgcctgaagatcaagagcccgtttccgcatcaacgcacatcgccagcagtttggggataaatccccacgtcctccaaattatgaaagcctctctcctgaccgacgaggaagacgttgacatggccctggaccaaagattctcccgcttaccttcaaaggcggacacatcccaggaaatttgctcccctagattgccaatctccgcatcccacagctcgaagacgcgcagtttggtcggcggactactgcagtccaaattcacctccggcgctttcctctcacccagtgtcagcgtgcaggagtgtcgcactccacgagctgcctccctgatgaatatacctagcacatcctcttggtcagttccacccccgctgaccagcgtgttcactatgccctcacccgcacccgaagtgccattaaagacggtaggcactagacggcaactgggtctcgtgccgcgagaaaagtcagtcacttatggaaaagggaagttactaatggacatggcactctttatgggacgctccttcagggttggttggggccctaactggaccctggcaaattccggagagcaacttaacggttctcacgagctggagaaccatcaaatcgccgacagtatggagttcggattcctgccaaatcccgtggctgtaaagcccttgacagaaagccctttcaaagtgcacttagagaagctgtccctgcgccagcgaaagccagatgaagatatgaaattataccagacccctctggagttaaagttgaagcactcaacggttcatgtcgacgagttgtgtcctctgattgtgcctaatctgggggtcgcggtaattcacgattacgcggattgggtgaaggaagcatccggcgacttacccgaagctcagattgtgaaacactggtcactgacttggacactgtgcgaggccctgtggggacacttaaaggaactggattcacagttgaatgagcctcgcgagtacatccagatcctagagcggaggagagcgttcagccgctggctatcatgtactgccacgcctcagatagaagaagaggtctccctgactcagaaaaattcacccgtggaggctgttttctcataccttaccggcaagcggatcagcgaggcatgttctctcgcacaacaaagcggtgatcaccgactcgccttgcttctgagccagttcgtcggttcacagagtgttcgggagcttctgactatgcagctggttgattggcaccaactgcaggcagacagtttcatacaagacgaacgcctgagaatttttgctcttctggcagggaaacccgtgtggcagttgagtgagaaaaagcaaatcaacgtgtgttcacaactagactggaaaagaagtctggcaatacacctgtggtatctgctgccacccaccgccagtattagccgggcactcagtatgtacgaagaggcttttcagaacacctccgactctgaccgctatgcgtgttctcctctgccctcttacttggagggttcaggttgcgtcatcgctgaggaacagaacagtcagactcccttgagggacgtgtgttttcacctgttgaaattatattccgactctatccgagaaaaagccgtgcgggagttgcttacaagacattgccagttactcgagactcctgagagctgggctaaagaaacctttctgacgcagaagctgagagtgcctgctaaatggatccacgaggccaaagccgtgcgagcccatatggaaagcgacaagcatctggaagctttatgcctgttcaaggccgagcactggaacagatgtcacaagctgatcattagacacttggcaagcgacgccatcataaacgagaactacgattatttgaaaggcttcttggaggacctcgcaccacccgagaggagctctctaatccaggactgggaaacatctggacttgtgtacctggattacatcagagtgatcgagatgcttcggcatatacagcaggttgattgctcggggaacgatctcgaacagttacatattaaggtcacgagtctctgcagccgtatcgaacaaattcagtgttattccgcgaaagataggctcgcccagtcagatatggctaaacgggtggctaacctgctgagggtcgtcctgagtctgcaccaccccccagacagaacaagcgattcaacccccgaccctcagcgggtgcccttgagactgttagccccccacattggccggctccctatgcccgaggactatgccatggatgaactacggagcttgacccagtcttacctgagggagttggccgtgggctcgttgtag

SEQ ID NO: 197967 - DNA, 4917 bp, synthetic construct
  misc_feature 1..4917: note = Description of Artificial Sequence: Synthetic coding sequence
  source 1..4917: mol_type = other DNA
atgttcaacaagagcttcggcacccccttcggcggcggcaccggcggattcgggaccacctccaccttcgggcaaaatacgggtttcggaacaacatctggcggcgctttcggtacctcagccttcggcagctctaataatactggcggattgtttggcaactcccagacaaagcctggaggccttttcgggacttcttctttcagccagccagcaacaagtaccagtaccgggttcggctttgggactagcaccggcacagcaaacacactgtttggaaccgccagtactggaacaagcctttttagtagccagaataacgcatttgcccaaaacaagccaacaggctttggcaactttggcacctccacatcatccggtggcctctttggcactaccaatacaactagcaatcctttcggctcaacctccggcagtctgttcggaccttcctccttcacagccgccccaaccggaactaccatcaaattcaatccccctactggaaccgataccatggtgaaagccggggtgagcacaaacatctcaactaagcatcagtgtataactgcaatgaaagagtacgaaagcaagtccttggaggaactacgtttagaggactaccaggcaaatagaaaggggccccaaaatcaggtcggggctggcactacaacaggactgtttgggtcttcccctgcgacaagttcagctactggcctgttcagcagcagcacgacgaactccggattcgcctacgggcagaacaagacagcgtttggaacaagtactaccggctttggcacgaatccgggcggcttatttggccagcaaaatcagcagaccacctcgctcttctcaaagccattcgggcaggctacaactactcaaaatacgggatttagttttggcaataccagtactatcggccagccaagcactaacaccatggggctgtttggtgtgactcaggcgtcacagccaggaggcttgtttggaaccgctaccaacacgagcactggcactgcctttggcacgggtaccggactctttgggcagaccaataccgggttcggtgcagttggaagtaccctcttcgggaacaacaaactaactacctttgggtcttccactacttccgctcctagtttcggcacgacaagcggaggcctgtttggtttcgggaccaacaccagcgggaactctatattcggctcaaaaccagcccccggtactttgggaactggactcggtgccggcttcggaactgcacttggagccggccaggcttcgttattcggaaataaccagcctaagatcggcggtcccctggggaccggcgccttcggagctcctggcttcaacactaccacggcaaccctgggctttggagctccgcaggcccctgttgcactgaccgacccaaacgccagcgctgctcagcaagcggtactccagcaacacattaactctcttacctactcacccttcggcgacagtccactgttccggaaccccatgtccgatccaaagaagaaagaggagcggctaaagccaactaatcccgcggctcagaaggcactgacaactcccactcactataaactgacgccaagacctgccacgagggtccggcctaaagcactgcaaacaacgggtactgctaaatctcacctgttcgacgggctggatgacgacgaaccctccttggctaacggggcattcatgccaaagaagtcaatcaagaaactcgtactgaagaatcttaacaattcgaatctgtttagcccagtgaatagagatagcgaaaatctggcatccccatcagaatacccagagaacggggagcggttttcattcctgtccaagcccgtcgatgagaatcaccagcaggacggcgacgaagactcgctggtgagtcatttctacacaaatcccattgctaagcccatccctcagacccctgagtctgccggaaataaacactccaatagcaattctgtcgacgatactatagttgccttgaatatgagagccgcgctacgcaatgggctggagggctcttcagaggagacatcatttcatgatgaatcgctgcaggacgacagggaggaaatagagaacaactcctatcacatgcaccctgccggcatcatactaactaaggtagggtactatactatccctagcatggacgatctggctaagatcacaaacgagaagggggagtgtatcgtcagcgattttactataggaaggaaagggtacggatctatttattttgagggtgatgttaatcttaccaacctgaatctggatgacatcgtgcacatacgccgcaaggaggtcgtggtatatctggacgacaatcagaagccaccagttggcgagggactcaatcgcaaagccgaagtgactttggacggggtgtggcctaccgataagacaagcaggtgcctgatcaagagcccagatagattagccgatatcaactatgaaggcaggctcgaagccgtttcaagaaaacaaggagctcagttcaaggaatacaggcccgagactggctcctgggtattcaaggtgagtcacttcagcaaatacggcctgcaggacagtgacgaggaggaggaagaacacccttctaaaactagcacgaagaaattgaaaacagcccccttgcctcccgcgtcccagaccacacctctccagatggcactcaatgggaagcccgcaccaccacctcagtcacaaagtccagaggttgagcagttagggagggtagtggaactggacagtgacatggtggacatcacacaggaaccagttctggatactatgctggaggagtctatgcccgaggaccaggagcctgtcagtgcctcgacccacatcgctagctcactgggaatcaacccccacgtgcttcagataatgaaagccagcctgctgactgatgaggaggacgtggatatggcattagatcagaggtttagtaggctgcccagtaaggcggacacttcacaggaaatatgcagcccacgcttacccatttctgcaagccactccagcaagactaggagcctcgttggcggactgttgcagtccaaattcacctcaggtgctttcctgtccccatcagtgtcagtgcaagaatgtcgcacacccagggccgcaagtctcatgaatatcccctctacatcgtcatggagcgtgccaccacctctaacttctgtcttcaccatgccttctccagctcccgaagttcctctgaaaacggttggtacccggagacagctgggtttggttcctagagaaaagtctgtaacgtatgggaagggaaagctgctgatggatatggctttgttcatgggccgctccttccgtgtaggatggggacccaattggaccttagccaatagtggggaacaactgaacgggagccatgagctggaaaaccaccagattgcagactccatggagtttgggttcttgcccaaccccgtggccgtgaagccactcactgagtcccctttcaaggtacatttagagaagctgagtctgaggcagcgcaaaccagatgaggacatgaagctgtatcagacacctctagaattgaaacttaagcatagtactgttcacgttgatgagctctgcccattgattgtgcccaatctgggagtggccgtcatccacgattatgccgattgggttaaagaggcatccggcgatctgcccgaggcccaaattgttaagcattggtcgttgacatggaccctttgcgaagctctgtggggtcatctgaaggagctcgattcacagcttaacgagccacgggaatacattcagatcctggaaagaaggcgagctttctcccgttggctgagttgtacagccactcctcagatcgaggaggaggtctctttgacccagaaaaactcacccgtggaagctgtgttttcctacctcacgggtaaaagaatcagcgaggcttgttctctcgcacagcaatctggagaccaccgactagcacttctgctgtctcagtttgtgggaagccaatctgtccgcgagctgctgaccatgcagctggtcgactggcatcagctccaagcagatagctttatccaagacgagcgcttgaggatcttcgctcttttggcaggcaagcctgtgtggcagctgtcagaaaagaagcaaatcaatgtctgtagtcagctcgattggaaacgatccctggcgatccacctctggtacttactccccccgacggcctcaattagtcgggctctgtccatgtatgaagaagcttttcagaatacctcagatagcgacagatatgcatgttctcctctacccagttatttggaaggatctgggtgcgttatcgcagaggagcaaaactcccagacaccgctccgggacgtttgctttcatctcctcaaactctattcagacagtataagggaaaaggccgtgcgcgagctcttgacacggcactgtcaactgctagagactcctgagtcctgggcaaaagagacgttcctgactcagaaactgcgagtaccggcaaagtggatccacgaagctaaggcagttcgcgctcacatggagtctgacaagcatctcgaggccctctgcttattcaaggccgaacactggaatagatgccacaagctcatcattaggcatctggcctccgatgcgatcataaacgagaactacgactacctgaagggctttctcgaggatttagctccccctgagaggtccagtctcattcaggattgggaaacatcaggactagtttatttggattatattcgggtcatagagatgttgagacacattcaacagatcgcactcttttgtgttgaatggattgcgcaagttatgacatggagctcttatacctcgaagtag

SEQ ID NO: 197968 - DNA, 2763 bp, synthetic construct
  misc_feature 1..2763: note = Description of Artificial Sequence: Synthetic coding sequence
  source 1..2763: mol_type = other DNA
atgttcaacaagagcttcggcacccccttcggcggcggcaccggcggtttcggtaccacatcaacattcgggcagaataccggtttcgggacaaccagcgggggggctttcggtacatctgctttcggctcttcaaataataccggagggctgttcggcaactcccagacaaagcctggtggactattcggcacttccagtttctcccagcccgctacctctaccagtaccggttttggctttgggacctccacaggaactgccaacacactctttggaactgcaagcacaggtacatctcttttctccagtcagaataatgcatttgcccagaataagcccacgggttttggcaactttggcacatctacttctagcggcggcttattcggcaccaccaatactacttccaatccctttgggtcaacttctggctcactatttggtccctcatctttcacagctgctcctaccgggaccaccataaagtttaacccacctacggggacggatacaatggtcaaggccggggtgtctacaaatatttctaccaagcaccagtgcattaccgcaatgaaggaatacgagagcaaatccctggaagaactccgcctggaggactatcaggccaaccgcaaaggaccgcagaaccaagtgggggcggggactacgaccggactgttcggcagctcacccgccacgtcttccgccacaggcctattctcgagtagcactacaaacagtggatttgcatacgggcagaacaaaacagcctttggcactagcacaacgggttttggcactaaccctgggggcctgtttggacagcagaaccagcagacaacatccctgttttctaaaccattcgggcaggccaccactacccagaataccgggttctcattcgggaatacttcaaccataggccagccctccaccaatacaatgggactgtttggagtgacccaagcttcacagcctggcggcttattcggcaccgctacaaatacaagcacaggcaccgcttttggaactggaacgggcctgtttggacagacaaatactggctttggggcagtcgggagcaccctcttcggcaacaataagttaaccactttcggatcttctactacatccgccccatcttttggtactacgtcaggcggcctctttgggttcggcacaaacactagtggcaactctatctttggttctaagcctgccccgggcacactagggacaggcttgggcgccgggtttggcaccgctctgggcgctggtcaggcatcgttatttggtaataatcagcccaaaatcgggggccctctgggaaccggggcattcggtgcacccggctttaacacaacaactgcaacactcggatttggcgcacctcaggcaccggttgctctcactgacccaaatgccagtgccgctcagcaggccgtcctccagcagcatatcaattccctgacatatagtcctttcggggattcacccctgttccggaatcccatgagcgacccaaagaaaaaggaagagaggctgaagcctacgaatccagccgctcagaaggctctaaccacaccaacacattacaagttgacgccccggccggccacacgcgtgagacctaaagcccttcaaactaccggaaccgccaaatctcatctcttcgacggccttgatgacgatgagccttctttagcaaacggggcctttatgcccaaaaaatccatcaaaaagctggtgctgaagaatctgaacaattccaatttattttcacctgtgaaccgggattccgagaacctggcttcacccagtgaatacccagagaacggtgagcgtttttccttcttgagcaaacctgtggatgaaaatcatcaacaggatggcgacgaagacagcctcgtcagtcacttttatacaaatccgatcgccaaaccgattccacaaactccagagtctgccggaaataagcacagcaactcgaatagcgttgacgatactatagtggctctcaatatgagggcggctctcaggaatgggctcgagggctcctctgaagagacatcctttcacgatgaatccctacaggacgatagagaggagatcgaaaacaattcttaccacatgcacccagccggtattatcctaactaaggtagggtactacactattcccagcatggatgacctggctaagatcaccaacgaaaaaggagaatgcattgtttctgactttactattggaaggaaaggctacggttccatctactttgagggtgacgttaatttaaccaacttgaaccttgacgatattgttcatatcaggaggaaagaggtggttgtgtatttggatgataaccaaaagcccccagtgggagaaggcctgaacaggaaagctgaagtgaccttggacggagtgtggccaacagataagaccagtcgctgcctgatcaagagcccagacagattagcggatatcaattatgaaggccgcctggaagccgtgagtaggaagcagggggcgcagtttaaggaataccgaccagagactggatcttgggttttcaaagttagccatttcagcaagtacggcctgcaggattctgatgaagaagaggaagagcacccctcgaagacttccacgaaaaagctgaagaccgcccccttgccgcctgcatcccagactaccccactgcagatggccctgaatgggaaaccagcccctcccccccaggtcgagaaaaaaggacaatag

SEQ ID NO: 197969 - DNA, 2814 bp, synthetic construct
  misc_feature 1..2814: note = Description of Artificial Sequence: Synthetic coding sequence
  source 1..2814: mol_type = other DNA
atgttcaacaagagcttcggcacccccttcggcggcggcaccggcggtttcggcactacgtccactttcggacagaatactggttttggcaccaccagtggcggcgcttttgggacatcagcatttggcagctctaataacaccggcggcctcttcggcaactcacaaacaaagccaggtggccttttcgggacttcatctttctctcagcctgccaccagcactagtacaggattcggcttcggcacatcaacaggcactgctaacaccctctttggcacggcttctacaggaacctcactgttctcctcgcaaaataacgccttcgctcagaacaaacctaccggattcgggaattttggtacctctacgtcatctggcggtttgtttggcaccacaaacacaaccagcaacccatttggctccacttcaggctcattgtttggaccctcaagtttcactgccgccccaaccggaactaccatcaagttcaacccaccaactggtactgacacaatggtcaaagccggggtgtccactaatatttctaccaagcatcaatgcatcaccgctatgaaagagtatgagtccaaatcactcgaagaattgcggctcgaggactaccaggccaacagaaagggcccccaaaaccaggtgggggccggcacgactaccggcctattcggaagcagccctgcaacaagtagtgcgacgggattgtttagcagctccaccacaaactccggctttgcatacggacagaacaagacggcgttcggcacctccaccaccgggtttgggaccaaccccggcggactttttggtcagcagaatcaacagacaacgagcctattttccaagcccttcggccaagctacgaccacccagaacacagggttttccttcggcaataccagcacaatcgggcagccatccacaaataccatgggcctgttcggcgtgacgcaggccagccaacccggtggccttttcggcaccgcgaccaacacatctactgggacggctttcggcaccgggaccggcctgtttggccaaacgaacactgggttcggagctgtcgggagtacgcttttcggaaacaataagctcaccactttcggatcttccaccacatcggctccctcattcggtacaacttcggggggactttttggcaataagcctaccttgacattagggaccaataccaatactagcaacttcggctttggcacaaatacgtctgggaatagcatctttggatctaaacctgctcctggaactctcgggaccgggctcggggcgggttttgggaccgcgctgggggctgggcaggcaagtctgttcggaaataatcagccaaaaatcggcggccctctaggcactggcgcattcggcgcacctggattcaacacgacaaccgccacactgggattcggggctccacaagcgccggttgctctcaccgatcctaacgcaagcgccgcccaacaggcagtgttgcagcagcacattaacagcctaacctatagtccatttggtgactcacctcttttcaggaatccgatgtctgatccgaagaagaaagaggagcgtcttaagcccacaaatcctgccgctcagaaggcactgaccactccgacccactataagctgactccccgccctgccacccgcgtgagaccaaaggccctgcaaaccaccgggaccgcgaagagccatctctttgacggcctggacgatgacgaaccttctctcgccaatggagcatttatgcccaaaaagtccatcaagaagctggtcctcaaaaatctgaacaacagcaaccttttctctcccgtcaaccgagattctgagaacctggctagtcctagcgaataccccgagaacggcgagcgctttagctttctgtccaagcctgtggatgaaaatcaccagcaggatggagacgaagattcccttgtcagccatttttacactaacccgattgcgaaacccatcccccaaaccccagaatccgccggcaataaacattcgaattccaactccgtggatgataccattgttgcactgaatatgcgggctgcactacggaacggattggaaggttccagcgaggagacctccttccacgatgagagcttgcaggatgaccgggaagaaatcgagaacaactcataccacatgcatcccgcaggcatcattttgaccaaggtgggttattatactattccctccatggacgacctggctaagattactaacgaaaaaggtgaatgcatagtttctgacttcacaatcggcagaaagggatatggatctatttacttcgaaggggacgtcaatctgaccaatttgaatctagacgacatcgtccatatccggcgcaaagaagttgtggtatacctcgacgataatcagaaaccgccagtcggagagggcttaaacagaaaagcagaggttaccctggatggagtgtggcccaccgacaagacatcgagatgcctgataaagagccctgaccggctggctgacattaattacgagggacggcttgaagctgtcagtaggaaacaaggagcccagttcaaggagtaccgccctgagactggtagttgggtcttcaaagtcagccatttctctaagtatggtctgcaggactcagacgaagaggaagaggaacatcctagcaagacttcaacgaagaagctgaagacagcacctctgccaccagcctctcaaacgactccactgcagatggctctgaacggaaagcccgcgcctccaccgcaggtcgagaagaaaggacagtag

SEQ ID NO: 197970 - DNA, 1731 bp, synthetic construct
  misc_feature 1..1731: note = Description of Artificial Sequence: Synthetic coding sequence
  source 1..1731: mol_type = other DNA
atgagcaccggcttcagcttcggcaccggcgccagcagcaaccccagtgtaggcctcaacttcggcaaccttggaagtacaagtacccctgccacgactagcgctccctcttctggcttcggcactggactgttcggctctaaacccgctacaggctttacactgggcggaaccaacacaggcatcgctacaacaataacgaccggccttacactgggcaccccagccacgacaagtgccgccacgaccgggttctccctgggctttaacaagccggcggcatctgccacccccttcgccctgccgattacctcaacttccgcctccggccttactttgtcctctgcattgactagcacaccagctgctagcacaggcttcacccttaacaaccttggagggaccacagcaaccacaactaccgctagtacaggactctccctgggtggggctctggccgggctgggcggcagtctattccagagcaccaataccggtaccagcggactaggacaaaacgccctgggccttacgctcggcactaccgcagcaacgtccactgcaggtaacgagggtctcggggggattgacttcagtagctcaagtgataagaagtcagataaaacaggcacccggcctgaagattcaaaggccctgaaggacgaaaatcttccccccgttatctgccaagatgtggagaatctccagaaattcgtcaaagaacagaagcaggtgcaagaggaaatatcacggatgtccagcaaggcgatgctcaaggtgcaagaggacataaaagctctcaaacaattacttagtctcgctgcgaatgggattcagcgcaacaccctgaacattgacaagctgaagatagagactgcccaagaactgaagaatgccgaaatcgctttgagaacacagaaaaccccccctgggttgcagcacgagtacgctgcacctgctgactattttagaatcctggtgcagcagttcgaagtgcagctacagcagtaccggcagcaaatcgaggaactcgaaaaccatctggctacgcaggcgaacaattcgcacattacaccgcaggacctgtcaatggccatgcagaaaatctaccagacgttcgtcgcgctggccgcccagctgcaatcaatccatgaaaacgttaaagtgctgaaagaacagtacctggggtatcgcaagatgtttctgggcgacgcagtcgacgtgtttgagacccggagggctgaggccaagaagtggcaaaatacccctcgggttacaaccggaccaacaccgtttagcacgatgccgaatgcagcagccgtcgctatggccgcaacattgactcaacagcagcagcccgcgaccgggccacagccgagtttgggcgtttcctttggaacaccctttggttcggggatagggacaggcctgcagtcatctggtttaggtagttctaatcttggcggcttcgggacctcctcaggtttcggatgctctaccacaggtgccagtacattcggcttcggtaccacgaacaaaccttccggatctctctcagcaggcttcggttcttctagtacatctggcttcaatttttcaaatcctggcatcactgccagcgcgggcttgaccttcggcgtttcgaatccagcatccgctgggttcggaactgggggccaactgttgcagttaaaaaagccccctgcagggaataagcggggcaaacggtag

SEQ ID NO: 197971 - DNA, 1764 bp, synthetic construct
  misc_feature 1..1764: note = Description of Artificial Sequence: Synthetic coding sequence
  source 1..1764: mol_type = other DNA
atgagcaccggcttcagcttcggcagcggcaccctgggcagcaccactgtggctgctggtgggacaagtaccggcggtgtctttagcttcggtacaggtgctagctctaacccttcagtcgggttgaattttggaaatctaggatccaccagtaccccagccactacttcagcaccttcgagtgggtttggcactggactgtttggatctaagcccgcgacagggtttacattgggcggaacaaacaccgggactcccgccacaaccagcgccgctacaaccggattcagcctcgggtttaacaagcccgcagcctcagccaccccttttgccctgccaattacaagtacctccgcctccggcctgacgctttcctcagcattgactagtacccctgctgcgtctactggatttacgttgaataacctgggggggacaacagcaaccactacgacagcatccaccggcctgtcgctgggtggagccttggccggactgggaggcagtctgtttcagtcaaccaatacggggacttcagggctcggacagaatgcactgggactcaccttggggaccaccgcagcgacgtccaccgcgggcaatgagggactcggggggatagacttcagctccagcagcgacaaaaagagtgacaagacggggacacgacctgaggactcaaaggccctgaaagacgagaacctgccccccgtcatatgccaagacgtagaaaacctgcagaaattcgtgaaggagcagaaacaagtgcaggaagaaatcagtcgcatgtcctctaaagccatgttaaaggtccaggaggatattaaagctctgaaacagctgctgtcactagcagcaaatggaatccagcgtaacacgctgaacatcgataagttgaagatcgaaactgcccaggagctgaagaatgccgagatcgcactgcgaactcaaaaaaccccacctggtctccagcacgaatatgctgcaccagctgattactttcgcattcttgtgcaacagttcgaggttcaattgcagcagtaccggcagcagatagaggagctggagaatcatctggccacccaggctaataacagccacatcacgccccaggacctctctatggccatgcagaagatctaccaaacttttgtcgctttggcggcacagctgcagtcgattcacgagaacgtcaaagtgctcaaagagcagtatctggggtatagaaagatgtttctcggcgacgcagtggacgtcttcgaaacaaggagggccgaagctaagaaatggcagaatactccacgggtcacgaccgggcccacgcccttctccacaatgcctaatgccgcagccgtcgcaatggccgctaccctcactcagcaacagcagccagcaacgggcccgcaaccatccctcggcgtctctttcgggacccccttcgggagcggcatcggcaccggcctgcagagtagtggactgggaagctcaaatctgggaggctttgggaccagctccggattcggttgtagcaccaccggagcatcaaccttcgggtttggaacaacgaataaaccttcgggttctctgtcagccgggtttgggagctcgtctaccagcggatttaatttttccaaccccggaattactgcaagcgctggtttgacattcggcgtgagtaacccggcatctgcgggatttggcacgggaggtcagttacttcaacttaaaaagccgcctgccggcaacaaaagggggaagcgctag

SEQ ID NO: 197972 - DNA, 1800 bp, synthetic construct
  misc_feature 1..1800: note = Description of Artificial Sequence: Synthetic coding sequence
  source 1..1800: mol_type = other DNA
atgagcaccggcttcagcttcggcagcggcaccctgggcagcaccactgtcgctgctggcggaacatctacaggcggggttttttccttcgggacaggggccagcagtaacccatcggtgggtctcaactttgggaacttaggctcaacctcgactccggcgaccacttcagctccttctagcgggtttggtactggcctgtttggatcgaaaccggcaactggctttacccttggcggtacaaacaccggaatcgcaacaacgattacaacaggcttgacattgggaacgccggcgacgacttcagccgctaccactggcttttctctggggtttaataaacctgctgcttccgccactcccttcgcactgcccattacaagcacgtccgcctcaggactgacactgtctagcgctctgacttccacccctgcagcttcaactggcttcacccttaacaatctcggtggcaccaccgccacaactaccacagccagcaccggcctaagcctggggggtgctctggccgggctcgggggatcactattccagagcaccaatactggtacttcaggattaggacagaacgctctcggactgacccttggcactaccgcagcgacatccacagcgggcaatgaagggctggggggaatcgacttctccagtagctccgacaagaaaagtgataagaccggcacccgccccgaggatagcaaggccctgaaggacgagaacttgccaccagtgatctgtcaagatgtggagaacctccaaaagttcgtcaaagaacagaagcaggttcaagaagagatttctcgcatgtcatctaaagccatgctcaaagtacaggaggatattaaggcactgaaacagctgttaagtctggcagccaacggcatccagaggaacacccttaatatagacaagctcaaaattgagacagctcaggagctgaaaaacgcggaaatcgcgctcagaacccagaaaacccctcctggacttcagcatgagtatgctgcaccagccgactacttccggatcctggtgcagcagttcgaagtccagctccaacagtaccgccagcagattgaagagctcgagaaccacctagccacgcaagccaataattcgcatattacgccccaagacctcagcatggccatgcagaagatctaccagactttcgtagccctggccgcccagctccagtctatccatgagaatgtgaaagtactgaaggagcaatacctgggttatcgcaagatgttcctcggggatgccgtagatgtctttgaaacacgaagggccgaagctaaaaagtggcagaatactcctcgggtgaccaccggccccaccccattctctacgatgccaaatgcagccgccgtagccatggcagccaccttgacccagcagcagcagccggccacggggccccagccgagcctgggggtgagtttcggcaccccttttgggtcaggaattggaaccgggctgcagtccagcggcttaggctctagcaacctaggtgggtttggaacgtcgtccggctttggatgtagtacaacgggagcttctaccttcgggttcggtactaccaataaaccctcaggctcactaagtgccggatttggatctagttccactagcggatttaacttctcaaatccagggattacagcatcagctggacttacgtttggcgtctcaaatcccgcatccgccggattcggaacaggcgggcagctgctgcagttgaagaaacccccagccggaaacaaacggggaaagaggtag

SEQ ID NO: 197973 - DNA, 1515 bp, synthetic construct
  misc_feature 1..1515: note = Description of Artificial Sequence: Synthetic coding sequence
  source 1..1515: mol_type = other DNA
atgagcaccggcttcagcttcggcagcggcaccctgggcagcaccactgtcgctgcagggggcacctcaacagggggggtgttttcattcggtacaggggccagcagtaatccctcagtagggctcaacttcggaaatctgggctctacatcaacccccgcaactacttctgcccccagctctgggttcggcacgggcttgttcggctccaaacctgctaccggcttcacactcggggggacaaacaccgggactccagccaccaccagtgctgccaccactggattttcacttgggtttaataagccagcagcaagcgctacaccttttgccttacccattacatctaccagtgcaagtgggctgacgctctcctccgcgcttacctcaacgccggccgcgtctactgggtttaccttaaataacctgggaggcaccaccgctaccacaacaacagcctctaccggtttgtccctgggtggagctctggcgggcctcggtggcagtctgtttcagtccaccaatactgggacttctggcttgggacaaaacgcccttgggttgacactaggcaccaccgctgctacatcgaccgcagggaacgaaggcttaggagggattgatttcagcagtagttccgacaagaagagcgataaaaccggaacccgacccgaagattccaaagccctgaaggacgagaacctgccacccgtcatttgccaggacgttgagaacctgcaaaaatttgtgaaagaacagaagcaggtgcaagaggagatctcccgcatgtccagcaaggcaatgcttaaggtgcaggaggacatcaaggctcttaagcagctgctcagccttgctgcaaatgggatccagaggaatactctgaacatcgacaaattgaaaatcgagaccgcccaggaattgaagaacgctgagatcgcactccggacccagaagactccgcccggcctccagcatgaatacgctgctcccgccgattactttcgcattctggttcagcagttcgaggtacaactccagcagtacagacagcaaatagaggagttggagaatcacctggccacccaggctaacaactcacatataacccctcaggatttatcaatggctatgcaaaagatttatcagaccttcgtcgcactggccgctcaattgcaatctatccacgagaatgtaaaggtacttaaggaacagtatctcggatacaggaaaatgttccttggggatgcggtcgatgtgtttgagactcgcagagctgaggccaagaagtggcaaaacactccaagagtgacaacagggcccacaccctttagtactatgcctaatgccgccgccgtggcaatggcagcgaccctgacccagcagcagcagcccgccactggagataaatggtgcaatgtggctgaacttaagaacaggactcagctgtctttgttcgtcaacaagcttgagttgtcatgctattgcgtcattgatctgctgtacaatgaacaatag

SEQ ID NO: 197974 - DNA, 1458 bp, synthetic construct
  misc_feature 1..1458: note = Description of Artificial Sequence: Synthetic coding sequence
  source 1..1458: mol_type = other DNA
atgagcaccggcttcagcttcggcagcggcaccctgggcagcaccacagtagctgccggtggtacatcgacaggcggagtgttcagctttggcaccggggcctcctcaaacccctcggtgggtctcaatttcggaaacttggggtctacttctaccccagcgaccacatccgccccgtccagcggctttggcaccggtctgtttgggtccaaaccggcaaccgggttcaccctgggcggtacaaatactggcatcgcgaccacaatcaccacaggactgacgctgggcacccctgctactacctccgctgccactacaggattttctctgggatttaacaaacctgctgctagtgcgacgccatttgccttacccatcacatccaccagtgcttctggactgacattgtcatcggcactgaccagcactcctgcagcgagcacaggcttcacactgaataacctggggggcactacagccactactaccaccgcctctacagggttgtctttgggcggcgcgctcgccggtcttgggggcagcctgtttcagtcaaccaacacaggtacttctggtctggggcaaaatgccctcgggctgaccctcgggaccacagcggccacctctactgccggtaatgagggtctcggaggaatcgattttagttcaagcagtgataagaaatccgataagaccgggacccggccagaggattctaaagccctgaaagacgaaaatctgccgcccgtgatttgccaggacgttgagaacctccagaaattcgtaaaggaacagaagcaggtacaggaggaaatcagccggatgagttccaaggccatgctgaaggttcaggaagacatcaaagccctcaaacagttgctctcactggcggccaatggcattcagcgcaatactctgaacatcgacaagctgaagatcgagacggcacaggagttgaagaacgcagagattgcactcaggacccagaagacccctccggggctgcagcacgagtacgcagcccccgccgactactttcgcatcttagttcaacagttcgaagtgcagcttcagcaatatcgccagcaaatagaggaactcgagaaccatctggcgactcaggccaataattctcacatcacaccccaggatctgagcatggcgatgcaaaagatttaccaaacctttgtggctctagccgcccagctccaaagcattcacgagaatgtcaaagtgctgaaagagcagtatctgggatatagaaagatgttcttgggcgacgctgtggatgtctttgagacgagaagagctgaggccaaaaaatggcagaatacccctagggtgacaaccggccctacgcctttcagtaccatgcctaacgctgcggccgtggcaatggcagctacattgacccagcagcagcagccagccaccgggctgaacgcattcaagctgtag

SEQ ID NO: 197975 - DNA, 1308 bp, synthetic construct
  misc_feature 1..1308: note = Description of Artificial Sequence: Synthetic coding sequence
  source 1..1308: mol_type = other DNA
atgagcggcttcctggaggagctgctgggcgagaagctggtgaccggaggcggcgaggaagtggacgtgcactctctcggggctcgggggatttcccttctcggcctgtactttgggtgttcactgtcagcaccatgtgcccaactgagtgcctcgttggcagcattctatggacgcctgcggggggatgccgcagcaggtccaggacctggagctggcgcaggtgctgccgcagagccggaacctagacgcaggctggaaatcgtgtttgtgagtagtgaccaagatcaacggcagtggcaggactttgtgcgggacatgccttggctggctctgccttataaggagaaacacagaaagctgaagctgtggaacaaatacagaatctctaacatcccaagcttgatcttccttgatgccacaactggtaaggtggtctgtcggaacggtctgctggtcataagggacgaccccgaagggctggagttcccgtggggaccgaagcccttccgcgaagtcatcgccgggcccctcctacgaaataatggccagtcgctggaaagttcaagtctagagggatctcatgtcggagtatatttctcggctcactggtgtcctccttgtcgatccctgacacgggtactggtggagtcctaccggaaaattaaagaagcaggccagaacttcgaaattatcttcgtgagtgcagataggagcgaagagtcctttaagcagtatttctcagaaatgccatggctggccgtaccatataccgatgaggcccggcgaagccggcttaatcggctgtacgggatacaaggaattcctaccttgattatgctcgaccctcaaggcgaagtgattactaggcaggggagggtggaggtgctgaacgatgaggactgtagagaatttccttggcacccaaagccagtgctggaactgagcgattctaacgccgcacagctgaacgaagggccatgtctcgtcctgttcgttgactctgaagatgatggcgagtcagaagccgctaaacaattaatccagcccattgccgagaagattatcgctaagtacaaggccaaagaggaggaggcaccactattattctttgttgccggtgaagacgatatgacggactccctccgagactataccaatctgcctgaggccgcaccactgctgaccattctagatatgtccgcccgtgctaagtacgtgatggatgtcgaggagattactccagctattgtagaggcctttgtcaatgattttctggccgagaaattaaagcctgagcctatttag

SEQ ID NO: 197976 - DNA, 984 bp, synthetic construct
  misc_feature 1..984: note = Description of Artificial Sequence: Synthetic coding sequence
  source 1..984: mol_type = other DNA
atggccgacgtgagcctgcaccggaaccccgccaccctgaagctgtggaataaataccgaattagcaatatccccagcctcattttcctggacgctacaacagggaaggtggtctgcaggaacgggctgcttgtgatccgggatgaccctgagggcttagagtttccttggggccctaagccttttcgcgaagtgatagcagggccgcttcttaggaacaatggccaaagtctggaaagcagcagcttagaaggatctcacgtgggagtttacttcagcgcacattggtgccctccctgccgaagtcttactcgagtgttggtagagtcttatcgaaaaataaaagaagcaggtcagaacttcgaaattatcttcgtgtccgcggaccgctctgaggaaagcttcaaacagtacttctctgagatgccctggcttgctgtgccatacacagacgaggccaggcgaagcaggctgaatagactgtatggtattcaggggatccccacactcataatgctggatccccaaggagaagtgatcactcgtcaggggagggtggaagtcctgaatgatgaagactgcagggaatttccctggcaccctaagcccgtcctcgaattgtccgatagcaacgctgcccagctgaacgagggaccttgcttagtcctcttcgtggatagtgaggatgatggcgaaagtgaggcggcaaagcagcttatccagcctatcgcggagaaaataatcgctaagtacaaagccaaggaggaggaagcaccgctgttgttttttgtggcaggcgaggacgacatgacggattccctgagagactacactaatctccccgaggccgctcccctcttaacgatcctggatatgagcgcccgggcaaaatacgtgatggacgttgaggaaatcacccccgctatcgtcgaggccttcgtcaacgacttcctcgccgaaaaactcaaacctgaacccatctag

SEQ ID NO: 197977 - DNA, 381 bp, synthetic construct
  misc_feature 1..381: note = Description of Artificial Sequence: Synthetic coding sequence
  source 1..381: mol_type = other DNA
atgccctggctggccgtgccctacaccgacgaggcccggcggagccgcctcaaccggttatacggcatccaagatagtgaggacgatggtgaatccgaagcagcaaaacagctcatacagccaatcgccgaaaagattattgccaaatacaaggctaaggaagaagaggcccccctcctgttttttgtggccggcgaagatgatatgacagattctctgcgcgattacaccaatctccccgaagcagcaccactcctcacaatccttgatatgtccgctcgagccaagtacgtgatggatgttgaagagataacacccgccatagtggaggcctttgtcaatgacttcctcgctgagaaactgaagcccgaaccgatctag

SEQ ID NO: 197978 - DNA, 984 bp, synthetic construct
  misc_feature 1..984: note = Description of Artificial Sequence: Synthetic coding sequence
  source 1..984: mol_type = other DNA
atggccgacgtgagcctgcaccggaaccccgccaccctgaagctgtggaacaagtaccgtatttctaatatacccagtctcatcttcctggacgctactacaggaaaggttgtttgtagaaatggcctgttggtgatcagagacgacccagagggcctggagtttccctggggtcccaagcccttccgcgaagtcatcgccggcccccttctccgtaataacggccagtcgttggaatcaagttcactggaggggtcccacgtcggagtgtatttttcagctcattggtgccccccatgccggagcttgacgcgtgtgcttgttgagtcgtaccgaaagattaaagaggccggacagaattttgagataatctttgtttctgccgaccgcagcgaagaatctttcaagcaatatttttccgaaatgccatggctggccgtgccctacacggatgaagctaggcgatcacggcttaatcgcttgtacggaatccaaggcatacccacactgatcatgctggatccgcagggcgaggtgattactcggcaggggcgcgtggaagttctgaatgacgaagactgtcgggagttcccatggcacccgaagccggtgttagagctctccgacagtaatgcggcacagcttaatgaaggaccatgtctggtgctgtttgttgattcagaggatgatggggagtccgaggctgctaaacagctgattcaacccatcgccgagaagattatagccaaatacaaggccaaagaggaggaggctcccctcctgttctttgtggcaggggaggacgatatgacagatagcctacgggattatactaacctgcctgaggcggcaccccttctgacaatacttgacatgagtgccagagcgaaatatgtaatggatgtcgaagaaatcactcctgcaatagtggaggcttttgtgaatgatttccttgccgagaagctgaagcccgagccaatctag

SEQ ID NO: 197979 - DNA, 1176 bp, synthetic construct
  misc_feature 1..1176: note = Description of Artificial Sequence: Synthetic coding sequence
  source 1..1176: mol_type = other DNA
atggccgacatcgacaacaaggagcagagcgagctggaccaggaccttgacgacgtggaggaggttgaggaggaggagacgggagaagaaaccaaattaaaagctcgtcagcttacagtgcaaatgatgcaaaacccccaaattctagccgccctgcaggaaagattagatggtctggtcgagactccaaccggctacatcgaatccctacccagggtcgtgaaacggagggttaacgccctgaagaatctccaggtgaaatgcgctcagattgaggccaagttctatgaagaggtacacgatctggagagaaagtatgcagttctttatcagccattattcgataagagatttgagatcattaatgcaatttatgagcccactgaagaagagtgtgaatggaagccagacgaagaggatgagatctctgaggagttgaaagagaaggcgaagattgaggacgaaaaaaaagatgaggagaaggaagacccaaaaggaatacccgagttttggctgacggtattcaaaaacgtggacttactgtctgatatggtgcaagaacatgatgagcccattttaaaacatctcaaggacatcaaggtcaaattttccgacgccggtcagccaatgtcgtttgtgcttgagtttcacttcgaaccaaatgagtatttcacaaacgaggttctaaccaaaacttacaggatgcgatccgaaccagacgactccgaccccttctcttttgatggtccagaaattatgggatgcactggatgccagatagattggaagaagggtaagaacgtgacgttgaagacgattaagaaaaaacaaaaacacaagggccggggcacagtgcgcaccgtcaccaagaccgtgtccaacgacagcttctttaacttctttgccccccccgaggtgccagagagtggcgacttggacgacgacgcggaagctatcttggctgccgacttcgagatcggacactttttgcgtgagcgaatcatcccccggtctgtcctgtactttactggggaggccattgaggacgatgatgatgattatgacgaggaaggagaggaggctgacgaagagggggaagaggagggggacgaagaaaacgatccggattatgatcccaaaaaggatcagaatcccgccgaatgtaaacaacagtag

SEQ ID NO: 197980 - DNA, 1176 bp, synthetic construct
  misc_feature 1..1176: note = Description of Artificial Sequence: Synthetic coding sequence
  source 1..1176: mol_type = other DNA
atggccgacatcgacaacaaggagcagagcgagctggaccaggacctggatgatgttgaggaagtggaggaagaggagactggcgaggaaacaaaactgaaggcccgccaactcacagtgcagatgatgcaaaatccacagattctggccgctctgcaggagcggttagacgggctcgtagagacacctacaggatacattgagtctctgcctagggtggtgaagagaagggttaacgcgttaaaaaacttgcaagtaaagtgcgcccaaattgaagccaaattttacgaagaggtgcatgaccttgaacggaagtacgcagtgctgtaccagcccctgtttgataaacgctttgagattatcaatgctatctacgagcccaccgaggaggagtgtgagtggaaacctgatgaggaagacgagatttccgaagagcttaaagaaaaagccaaaatagaagacgagaagaaagacgaagagaaggaggaccccaaaggcatacctgagttttggttgaccgtctttaaaaatgtcgacttactgagtgacatggtacaggaacatgatgaacccatactgaagcacctgaaggatataaaggttaagttttcagacgccggacagcccatgtcattcgtgcttgagttccacttcgagcctaacgaatatttcacaaacgaggtcctgaccaagacgtaccgtatgcggtccgagccggacgacagcgacccctttagcttcgatggtcctgagatcatggggtgtaccgggtgtcagatcgattggaagaagggtaaaaacgtgacattgaagacgattaagaagaagcaaaagcacaagggcagaggtacagtaagaaccgtgacaaaaactgtgtctaatgacagcttctttaacttcttcgcaccgcctgaagtccctgaaagcggagacctggacgatgacgctgaagcaatactcgctgccgattttgagataggccatttcttgcgtgaaaggatcataccccgtagtgtgctgtatttcaccggcgaggcaatagaagatgatgatgacgactatgatgaggagggggaggaagcagatgaagaaggagaagaggaaggggacgaggagaacgacccagattatgacccaaagaaggaccagaatcctgctgagtgtaagcagcagtag

SEQ ID NO: 197981 - DNA, 972 bp, synthetic construct
  misc_feature 1..972: note = Description of Artificial Sequence: Synthetic coding sequence
  source 1..972: mol_type = other DNA
atgatgcagaacccccagatcctggccgccctgcaggagcggctggacggtttggtcgagacacccacgggctatattgaatctctgccccgagtggtcaagagacgggtgaacgcactaaaaaacttacaagtgaaatgtgcacaaattgaagccaagttctatgaggaagttcatgacttggagagaaagtacgctgtgctgtatcagcctctgttcgacaaggaagagttgaaagagaaggccaaaatcgaagatgagaagaaggacgaggagaaggaagaccctaagggcattcctgagttctggctcactgtgttcaagaatgtagacttactgagcgacatggttcaggagcacgacgagcctattctcaagcatctgaaggatattaaagttaagttcagcgatgctggacagccaatgtcctttgttctcgagttccattttgaacctaatgaatactttacaaatgaagtcctgaccaaaacttatagaatgagatcagaacccgatgattctgaccctttctctttcgacggtccagagataatgggctgcactgggtgtcaaattgactggaagaaggggaagaacgtcacattgaagaccatcaagaagaagcagaaacacaagggaagaggcaccgtgaggaccgttacgaagacagtttccaacgatagtttttttaacttctttgcgcctccagaggtgccagagagcggagatctggatgacgatgccgaggccatactggcagccgactttgaaatcgggcattttctgagggaaaggattatccctcggtccgtgctttacttcaccggtgaagcaatcgaggatgatgacgatgactatgatgaggagggtgaagaagccgacgaagaaggggaggaggagggggacgaggagaacgaccctgactatgacccaaaaaaagatcagaaccccgcggagtgtaaacagcagtag

SEQ ID NO: 197982 - DNA, 1050 bp, synthetic construct
  misc_feature 1..1050: note = Description of Artificial Sequence: Synthetic coding sequence
  source 1..1050: mol_type = other DNA
atgatgcagaacccccagatcctggccgccctgcaggagcggctggacggactggttgaaacgcccacaggctacatagaaagtttacccagagtggtcaagcggagggtaaatgccctcaaaaacctacaggtgaagtgtgcacagatcgaggccaagttttacgaagaagttcacgatctggagcgcaagtatgccgtcctctaccagcccctgttcgacaagagatttgaaatcatcaacgcaatatacgagccgaccgaagaggagtgcgagtggaaacctgacgaagaagacgaaatcagtgaactgaaagaaaaggcaaagatcgaggacgagaagaaggatgaggagaaggaagatccgaagggcattccagagttttggctgactgtgtttaaaaacgtcgatctgttaagcgatatggtgcaggagcatgacgagcctatccttaagcatcttaaagatatcaaagtgaaattttccgacgcaggacagccaatgtcctttgtcctcgaatttcatttcgagccaaatgagtattttaccaatgaggtcttaactaagacatacaggatgaggtccgaacccgacgatagcgacccttttagtttcgatggccccgaaatcatgggctgcacaggttgccagatcgattggaaaaaaggcaagaatgtcacattaaaaaccatcaagaagaagcagaaacacaagggccgcgggaccgttaggactgttacgaaaaccgtgtccaacgattcattttttaatttctttgccccaccagaagtacccgaatctggcgatctcgatgatgacgccgaggctatattggccgctgatttcgaaataggccactttctgcgggaacgcatcatcccaaggtccgtgctctactttactggggaagccattgaggacgacgacgatgattatgacgaggagggggaggaagccgatgaagaaggtgaagaggaaggcgatgaggaaaacgatcccgattacgaccctaagaaagaccaaaatccagccgagtgtaaacagcagtag

SEQ ID NO: 197983 - DNA, 627 bp, synthetic construct
  misc_feature 1..627: note = Description of Artificial Sequence: Synthetic coding sequence
  source 1..627: mol_type = other DNA
atggtgcaggagcacgacgagcccatcctgaagcacctgaaggacatcaaggtcaaattctctgatgccggacagcctatgtcgttcgtactggagttccacttcgagccaaacgagtactttaccaacgaagtgctgactaaaacctaccgcatgagaagcgagcctgatgattcagatccgttttctttcgacggccctgagataatggggtgtacaggctgccagattgactggaaaaagggtaagaacgttacactaaagacgatcaagaagaaacagaagcacaagggccgggggactgtcaggaccgttaccaaaaccgtctcaaatgattctttcttcaacttcttcgcaccccctgaggttcccgagtccggagacctggacgacgatgccgaagccatccttgctgccgacttcgaaattggccacttcctgcgcgaacggattattccaaggagtgttctctacttcacgggcgaagctatagaggatgacgacgacgattatgatgaagagggcgaggaagccgacgaggagggggaggaagagggtgacgaggagaatgacccagactacgaccccaaaaaggatcagaacccggcggagtgtaagcaacaatag

SEQ ID NO: 197984 - DNA, 987 bp, synthetic construct
  misc_feature 1..987: note = Description of Artificial Sequence: Synthetic coding sequence
  source 1..987: mol_type = other DNA
atggccgacatcgacaacctgccccgggtggtgaagcggcgggtgaacgcactgaagaatctgcaggttaagtgtgcacagatagaagccaagttctacgaggaagtgcatgatctggagcgcaagtacgcagtcctgtaccagcccctattcgacaagagatttgaaattattaacgcaatctatgaaccgactgaagaggagtgcgaatggaaacccgacgaagaagacgagatctcggaggaactaaaggaaaaggcgaagattgaggacgagaaaaaggacgaggaaaaagaggatccgaaaggaattccggagttttggctaaccgtgttcaagaacgtggacttattgtccgatatggtacaagaacacgatgagcctatattgaagcatctgaaggatatcaaggtcaaattctccgatgccggacagcctatgtcctttgtgcttgaatttcacttcgagccgaacgagtatttcacaaatgaggtgctgaccaaaacctaccgcatgcggagtgagcccgatgactctgatccattctcttttgacggtcccgagatcatgggctgtaccgggtgccagatagactggaagaaggggaaaaacgtgactctcaagactatcaaaaaaaaacagaaacacaaggggcggggtaccgtcagaactgtgaccaaaacagtgtccaacgattctttctttaacttttttgccccacccgaggtgccggagtccggagacctggatgacgacgccgaggccatcctggcagccgattttgaaattggtcattttttgcgagaacgcatcattcccaggtcagtgctctattttaccggagaggccatagaagacgatgacgatgattacgatgaggagggagaggaggctgacgaagagggtgaggaagagggggacgaggaaaacgatccggactatgacccaaaaaaggaccaaaatccagctgagtgcaaacaacaatag

SEQ ID NO: 197985 - DNA, 1107 bp, synthetic construct
  misc_feature 1..1107: note = Description of Artificial Sequence: Synthetic coding sequence
  source 1..1107: mol_type = other DNA
atggccgacatcgacaacaaggagcagagcgagctggaccaggacttagacgacgtggaggaagttgaggaggaggagactggagaggagactaaactgaaggcccgccagctgactgtccagatgatgcagaatccccagatactggcggcgttgcaggaacggctcgacgggttagtagaaacaccaacaggctatatcgagtccctgccaagagtcgtcaagcggagagtcaatgccctgaaaaatctccaggtgaagtgtgcccagatcgaggccaaattctacgaggaggtgcacgacctcgaacggaagtacgccgttctgtatcaacccctctttgacaaacgttttgaaatcatcaacgccatctatgaacccacggaagaggagtgtgagtggaaacctgacgaggaagacgaaatttctgaagagttaaaggagaaggcaaaaatagaagatgaaaaaaaggatgaagagaaggaagacccaaaaggtatcccagaattttggttgacagtctttaagaacgtcgatttgttaagcgatatggtgcaagagcatgacgagcctatcctgaagcatctgaaagacattaaggtcaaattctcagacgctgggcaaccaatgagcttcgtgctggagttccactttgaacccaatgagtattttaccaacgaggtgttaaccaagacatacaggatgcgaagcgaacccgacgattccgacccgttcagcttcgacgggcccgagataatgggatgcacggggtgtcagatagactggaaaaaagggaaaaatgtaaccttgaagaccatcaaaaaaaagcagaagcacaagggtaggggtactgtcaggacagtaacgaagaccgtgagcaacgattcatttttcaactttttcgctcctccagaagttccagagtctggcgatctagatgacgacgctgaggcaatcctcgcagcagactttgaaattggccacttcttgcgcgaacggataattccccgatctgtcctgtatttcacaggcgaggcaattgaagacgacgacgatgactatgacgaggagggcgaagaggccgatgaagttatgttcaccaagtag

SEQ ID NO: 197986 - DNA, 795 bp, synthetic construct
  misc_feature 1..795: note = Description of Artificial Sequence: Synthetic coding sequence
  source 1..795: mol_type = other DNA
atggccgacatcgacaacaaggagcagagcgagctggaccaggacttagatgatgtcgaggaagttgaagaagaggagacgggagaggaaaccaagctgaaagccagacagctgaccgtccagatgatgcagaaccctcagatcctcgccgccctgcaggaacggttggatggtctcgtggaaactccaacaggctatatagaaagtttaccacgggttgtaaaaaggagagtgaatgccctgaaaaatctgcaggtgaaatgcgcgcagattgaggctaagttctacgaagaagtgcatgacctggagcgaaagtacgctgtgctatatcagcctctgtttgacaaacgcttcgagatcataaatgccatttacgaacctaccgaggaggaatgcgagtggaagcctgacgaagaagacgagatctctgaagaactgaaggagaaagccaagatcgaggacgaaaaaaaggacgaggaaaaggaggacccgaaaggcatccctgagttctggttgacagtcttcaagaatgtcgacttgctctccgatatggtgcaagaacacgacgagcctattttaaagcacctgaaagatattaaggtgaaattctcagatgccggacagccaatgagctttgtgctcgagttccacttcgaacccaatgaatactttaccaacgaggttctgaccaagacctaccgtatgaggtccgagccagatgatagtgatccgtttagctttgacggacccgaaattatggggtgtacaggatgccagattgactggaaaaagtag

SEQ ID NO: 197987 - DNA, 1158 bp, synthetic construct
  misc_feature 1..1158: note = Description of Artificial Sequence: Synthetic coding sequence
  source 1..1158: mol_type = other DNA
aaggagcagagcgagctggaccaggacctggacgacgtggaggaggtggaggaagaggagacaggagaagagacaaaactgaaggcccgccagctcactgtgcagatgatgcaaaatcctcaaatccttgctgcgctgcaggaacgcctggacggtttggtggaaacacctacaggatacattgagagtctgcccagagtagtaaaaaggagggtaaatgccctgaagaacctgcaggtcaaatgcgcccaaatcgaagcaaagttctatgaggaggtccatgacctggagcgtaagtatgcggttctgtatcaacccctctttgacaagcggttcgagatcattaacgccatttatgagcccaccgaggaggaatgtgaatggaagcctgatgaggaagacgaaatttctgaggaacttaaagagaaggcaaaaatagaagacgagaaaaaagacgaagagaaggaggatcccaagggaattcctgaattttggttgacggtgttcaagaacgtggatctcctaagtgatatggtgcaggagcatgatgagccaatattgaagcacctgaaggacatcaaggtcaagttctcagatgccggccagcccatgtcgtttgttctggagttccactttgagcctaacgaatacttcacaaacgaagttttaaccaaaacatatcgaatgcgatcggaacccgatgacagcgacccgttttccttcgacggacctgaaattatgggatgtaccggctgccaaattgattggaagaagggtaagaatgtgactttaaaaacgatcaagaaaaagcagaagcataaaggcagggggaccgtaaggaccgtcactaagacagtctccaacgactctttctttaactttttcgccccccctgaagtgccggagtcaggtgatttggatgacgacgctgaagctatcctcgccgctgactttgaaattgggcatttcctgcgggagagaattatcccccggtctgttctgtactttactggggaagccattgaggatgacgacgacgactatgacgaggaaggggaagaggccgacgaagagggagaggaagagggagatgaggagaacgatcccgactacgatcccaaaaaagatcagaatccagcggaatgtaagcagcaatag

SEQ ID NO: 197988 - DNA, 1521 bp, synthetic construct
  misc_feature 1..1521: note = Description of Artificial Sequence: Synthetic coding sequence
  source 1..1521: mol_type = other DNA
atggccgaggccgacttcaagatggtgagcgagcccgtggcccacggcgtggctgaggaggagatggcaagctctacatccgattcaggcgaagaaagtgacagctctagtagttcaagcagtacttccgattcctcgtcttcaagttcgacttccggatctagttcaggttctgggtcttcatcatcatcttcgggcagcaccagttcccggagcagactatataggaaaaagcgggtgcctgagccttcgagacgggccaggcgggctccccttggaaccaattttgttgataggctgccacaggccgtaagaaaccgggttcaggctctgcggaatatccaggacgagtgtgataaggtagacactctgtttcttaaggccatacacgatctggagagaaaatacgctgagctcaataagcccctttacgaccggagatttcagatcatcaacgcagaatatgagcctacagaagaagaatgcgagtggaacagcgaggatgaagagtttagttccgacgaggaagtgcaggataatactccatcggaaatgccgcctctcgagggcgaagaagaggagaatcccaaagagaatcccgaggtgaaggcagaagaaaaagaagtccctaaagagatccctgaggtcaaggatgaagagaaggaggtccctaaagaaattcctgaggtgaaggccgaagagaaggcggatagcaaagattgtatggaggccaccccagaggtaaaggaagatcccaaggaggttccacaggttaaggccgacgacaaggaacagccgaaagcaacggaggctaaagcacgggctgccgtgagagagacccacaaaagggtccctgaggagcggctgcaggacagcgttgacttgaagagggcccgaaaagggaagcccaagcgcgaagatccgaaaggaattccagattactggctgattgtcctgaagaatgttgataaacttggcccgatgatacaaaaatacgatgagcctattctgaaattcctctcagatgtttcgctgaaatttagcaagcctgggcagccggtttcctacacttttgaatttcactttctgcctaacccctattttagaaatgaagttctcgttaaaacatacatcattaaggcaaagcctgaccacaacgatcccttcttctcctggggttgggaaattgaagattgtaagggatgcaaaattgactggagacggggtaaggatgtgacagtcacaaccacccaatcccgcacgacggctaccggcgaaatcgagattcagcctcgcgtggtgccaaatgcctctttctttaatttcttctccccaccggagatccctatgatcggaaaacttgaaccccgagaagacgcaatcctggatgaggatttcgaaatcgggcaaatacttcacgataatgtgatcttaaagtctatctattactataccggggaggtgaatgggacttactaccagttcggtaaacactacggcaataagaaataccgcaagtag

SEQ ID NO: 197989 - DNA, 1500 bp, synthetic construct
  misc_feature 1..1500: note = Description of Artificial Sequence: Synthetic coding sequence
  source 1..1500: mol_type = other DNA
atggtgagcgagcccgtggcccacggcgtggccgaggaggagatggcctcctctacaagcgatagcggggaggagagtgactcaagctcgagctctagctccacgtccgactcctcttcaagttcctccacctctggttcctcttctggatccggaagtagctcgtcttccagcggatccacatcttctagaagtagactgtaccggaaaaagagagtaccagagccaagtcgccgggcacgacgcgcgccactcggcactaacttcgtggacagactgcctcaggcggtgcgcaatcgcgtccaagccctgcgcaacatacaggacgagtgtgataaggtcgacaccctattcctgaaggctatccacgatttggaacgaaaatacgctgagttaaataaaccactatatgataggaggtttcagattatcaacgccgagtacgaacccacagaagaggagtgcgagtggaattccgaggacgaagaattctcatctgatgaggaggtgcaggataatactccgtccgagatgccgcccctggaaggcgaagaagaggaaaaccctaaggagaatcctgaggtgaaagcagaggagaaggaagtgcccaaggagattcctgaggtgaaagacgaagagaaagaagtcccaaaggagattccagaggtaaaagccgaggagaaagcagatagcaaggactgtatggaagctacacccgaagtgaaggaggaccctaaagaggtccctcaagtgaaggccgacgacaaggaacagcccaaggctactgaagcgaaggcccgggccgctgtgagagaaacgcataagagggtgcccgaagagcggctgcaagactcagtcgacctcaaacgggctcgcaaaggtaagccaaagcgggaggaccccaaagggattcccgactattggttgattgtcctgaagaacgtggacaaattgggtcccatgatccagaagtatgacgagccaattctgaaatttctgagcgacgtaagtctgaagttcagcaaacctggccagcccgtctcctatacattcgagtttcacttcctgcctaatccttacttccggaacgaagtgctggtgaagacatatataatcaaggccaagccagaccacaacgatccattcttttcgtgggggtgggagatcgaggattgcaagggatgcaaaattgattggagacgcggaaaggatgtgacagtgaccactactcagagcagaacaacagctaccggcgagattgaaattcagcctcgagttgtgccaaacgccagctttttcaactttttctcccccccagagatccccatgattggcaaactggagcctcgagaggacgcaatacttgacgaggattttgagatcggccagattctgcacgataacgtcatccttaagagtatctactactacacaggtgaggtcaatggaacttattaccagtttgggaagcactacggcaataaaaaatacagaaagtag

SEQ ID NO: 197990 - DNA, 1128 bp, synthetic construct
  misc_feature 1..1128: note = Description of Artificial Sequence: Synthetic coding sequence
  source 1..1128: mol_type = other DNA
atggccgaccacagcttcagcgacggcgtgcccagcgacagcgtggaagctgcaaagaatgcatccaacacagaaaaactgacagaccaagttatgcagaacccgagggtgctcgccgctttacaagagcgcttggataacgttcctcatactccttcatcgtatatcgaaaccctgccaaaggcagtgaaaagacggattaatgccctgaagcaactacaagtcagatgcgctcacatcgaggccaagttctacgaggaagttcatgacttggaacgtaagtacgccgcactttatcagccactcttcgataaacgaagggagtttattacaggagatgtagagccaacagatgcagaatcagagtggcacagcgaaaatgaggaggaggaaaaactggctggggatatgaagtcaaaagtcgtggttacagaaaaggcagccgccaccgccgaagagcctgatcctaaagggataccagagttctggttcaccatctttcggaatgtggatatgctcagtgagctcgtccaggagtatgacgaaccgatcctaaagcaccttcaggacataaaggtgaaattctcggaccctggacagcccatgtctttcgtgcttgaatttcacttcgagcccaacgactattttactaatagcgtactgacaaaaacctataagatgaaatcagaacccgacaaagcagaccctttctcctttgagggacctgagattgtcgattgcgacgggtgtactattgattggaagaagggaaagaacgttacagtgaaaacgatcaaaaagaaacagaaacataagggacgcggcaccgtacgtaccattaccaagcaggtgcccaacgaaagtttcttcaatttctttaatcccctgaaagccagcggggatggcgagagtctcgacgaggactccgagttcactctcgcttccgactttgagattgggcatttctttcgcgaacggatcgttccacgagccgtgctgtatttcaccggcgaagcaattgaagatgacgacaacttcgaagaaggcgaggagggggaggaggaagaactggagggcgacgaagaaggggaagatgaagacgatgccgagatcaaccccaaggtatag

SEQ ID NO: 197991 - DNA, 1161 bp, synthetic construct
  misc_feature 1..1161: note = Description of Artificial Sequence: Synthetic coding sequence
  source 1..1161: mol_type = other DNA
atggccgaccacagcttcagcgacggcgtgcccagcgacagcgtggaagcggctaagaacgcttctaacactgagaagttgacagaccaggtgatgcagaacccccgagtgctggcagctctacaggaacggctggataacgttccccacaccccctcctcctatattgagaccctgcccaaagcagtcaagcgtcgaattaatgcactcaaacaattgcaggtgaggtgtgcccacattgaggcgaaattttatgaagaggtgcatgatctggaacggaaatatgcagcgttgtatcagcctcttttcgacaaacggcgcgaattcattacaggcgacgttgagccaacagacgcggagagcgagtggcatagcgaaaacgaggaggaggaaaagttagccggggatatgaaaagcaaggtagtggtcacagagaaggctgcagccaccgctgaagaacctgatccaaaaggaatccccgaattttggtttaccatttttcgcaatgttgacatgctgtccgaactggtgcaagagtatgatgaacccatcttgaagcacctgcaggacattaaagtgaaatttagcgaccccggacagccaatgagttttgtgttagaattccacttcgagccgaatgattacttcacaaattcagttcttacaaagacctacaaaatgaaaagcgaacctgataaggcagatcctttttcttttgagggaccagagatcgtggactgtgacgggtgcacaattgactggaagaaggggaagaacgtcaccgtgaagactattaagaagaaacaaaagcataaagggcgagggactgttcgtacgattaccaagcaagtgcccaacgagagctttttcaacttctttaacccactgaagggcaaaggtcagtcaaagagcaaagatgaagactccgagtttactcttgcctccgactttgagattgggcatttcttcagagagcggatcgtaccacgagccgttttatacttcacgggcgaagcaattgaggatgatgataattttgaagaaggagaggaaggcgaagaggaggagctggagggggacgaggagggagaagacgaagacgacgctgagattaatcccaagaaagagccctctcaaccagccgaatgcaagcagcagtag

SEQ ID NO: 197992 - DNA, 537 bp, synthetic construct
  misc_feature 1..537: note = Description of Artificial Sequence: Synthetic coding sequence
  source 1..537: mol_type = other DNA
atggccgaccacagcttcagcgacggcgtgcccagcgacagcgtggaagcagcaaagaatgcctccaatacagaaaagttgacagaccaggtaatgcagaatccccgggtgcttgcagccctccaggagcgcctggataacgttcctcatacaccaagctcttacatcgaaacgctaccaaaggcggtcaaacggcggatcaacgctctgaagcaactgcaggtcaggtgcgcccacattgaagcaaagttctatgaggaagtccatgacctcgaacgcaagtacgctgccctctatcagccactgttcgataaacgccgcgagttcatcactggggacgtggagcccacagatgccgaatctgagtggcactcagagaatgaagaagaggaaaaactggcaggagacatgaagagcaaagtagtcgtgaccgaaaaagcagctgctactgccgaggagccggaccctaaaggaatcccagagttttggttcaccatctttaggaacgtcgatatgctgtctgagctggtgcagtag

SEQ ID NO: 197993 - DNA, 1161 bp, synthetic construct
  misc_feature 1..1161: note = Description of Artificial Sequence: Synthetic coding sequence
  source 1..1161: mol_type = other DNA
atggccgaccacagcttcagcgacggcgtgcccagcgacagcgtggaagcggcgaagaacgccagtaatacagagaaacttaccgatcaagttatgcagaatcctcgagtactggcagccctgcaagagaggctagataacgtgccccatactcccagtagctacatcgagacactgcccaaggccgtgaaacgcaggataaacgctttaaagcagttgcaggtacgctgcgcacacattgaagcaaaattttacgaagaggtccatgacctggagcgcaagtacgctgccctataccagcctctttttgataaaaggcgcgagtttatcaccggggatgtggagcctaccgacgccgaatcagagtggcattctgaaaacgaagaagaagaaaagctggcaggggacatgaaatccaaggtcgtagtaacagagaaggcagccgccactgccgaagaacccgacccgaagggtatcccagagttttggttcacgattttccgaaatgtggacatgctgtcagaactcgtgcaggagtacgatgagccaatactgaagcacctccaggacatcaaagtgaaattcagtgaccccggccagcctatgtcttttgtgctggaattccatttcgagcctaacgactactttacaaacagcgtgctcactaagacttacaaaatgaagagcgagcctgataaggccgacccattctcattcgagggccccgagattgtggattgtgacgggtgcaccattgattggaaaaaaggcaagaacgtgactgtcaaaaccatcaagaagaaacagaagcataaaggccgaggaacggtaaggaccattaccaaacaagtgcccaatgagtcattctttaattttttcaaccccttgaaggccagtggcgatggggagtctctcgacgaagacagtgagttcactctggccagcgatttcgagattggacacttctttagagaaaggattgtgccacgcgccgtcctgtacttcacgggggaggccatcgaggacgacgataatttcgaagagggggaggaaggcgaggaggaagagctagagggtgatgaagagggcgaggacgaagatgatgcggagattaatcccaagaaggagccctcacagcccgcagaatgtaaacaacaatag

SEQ ID NO: 197994 - DNA, 387 bp, synthetic construct
  misc_feature 1..387: note = Description of Artificial Sequence: Synthetic coding sequence
  source 1..387: mol_type = other DNA
atggccgaccacagcttcagcgacggcgtgcccagcgacagcgtggaagcggccaaaaatgctagtaatactgagaaactgaccgaccaggtgatgcagaaccctagagtgttggcggcactgcaagagcgcctggacaatgtccctcacaccccgtcttcctatatcgaaaccttacctaaggctgtgaagagacgcattaatgcgctcaagcagctccaagtcaggtgcgcccatatagaggctaaattttacgaagaagtccacgatctggaacggaaatatgctgctctgtatcagcctttgttcgacaaacggcgtgagttcattaccggagatgtggaaccaacagacgccgaatccgaatggcattcagagaatgagtag

SEQ ID NO: 197995 - DNA, 423 bp, synthetic construct
  misc_feature 1..423: note = Description of Artificial Sequence: Synthetic coding sequence
  source 1..423: mol_type = other DNA
atggccgaccacagcttcagcgacggcgtgcccagcgacagcgtggaagccgctaaaaatgcctctaataccgaaaagctgactgatcaggtgatgcagaatccaagagtgctggctgcgcttcaggagagacttgacaatgttcctcacacgccaagcagttacattgagactctcccaaaggcagtgaaaagacgaattaatgctctgaaacagctacaggttcgctgcgcccacatcgaggcaaaattctatgaagaggtgcacgacttagaaagaaaatatgcggcactgtaccagcccctctttgacaaacgtcgcgagtttataactggagatgtggaacctaccgatgcagagtcagaatggcacagcgaaaatgaggaggaagagaaattggccggggacatgaaatctaaatag

SEQ ID NO: 197996 - DNA, 402 bp, synthetic construct
  misc_feature 1..402: note = Description of Artificial Sequence: Synthetic coding sequence
  source 1..402: mol_type = other DNA
atggccgaccacagcttcagcgacggcgtgcccagcgacagcgtggaagccgctaagaacgcgtcaaacaccgagaaactaaccgatcaggtaatgcagaatccccgtgtcctggctgcactgcaggaaagactggataatgtgcctcacacaccttcgagctatatagagaccttgcccaaggcagtcaagaggagaatcaacgccctgaaacagctgcaagtgcgatgcgcgcacatcgaggctaagttctatgaggaagttcacgacctggaacgcaagtacgctgctctttaccaacctctgttcgacaagcggcgagaattcatcaccggagatgtggaaccaactgatgccgagtccgaatggcacagtgaaaacgaggaagaggaaaagctgtag

SEQ ID NO: 197997 - DNA, 324 bp, synthetic construct
  misc_feature 1..324: note = Description of Artificial Sequence: Synthetic coding sequence
  source 1..324: mol_type = other DNA
atggccgaccacagcttcagcgacggcgtgcccagcgacagcgtggaagctgccaaaaacgcctctaatactgaaaaattaaccgatcaggtaatgcagaacccaagagtactcgccgcactccaggaaaggctggataacgtcccgcatacaccctcatcctacatcgagactctgccaaaagccgtaaaaaggaggatcaatgctctgaagcagctgcaggtccgctgcgcacatatcgaagccaaattttacgaggaagtgcacgaccttgagagaaaatacgctgccctctaccaaccactctttgacaaacggagatag

SEQ ID NO: 197998 - DNA, 237 bp, synthetic construct
  misc_feature 1..237: note = Description of Artificial Sequence: Synthetic coding sequence
  source 1..237: mol_type = other DNA
atggccgaccacagcttcagcgacggcgtgcccagcgacagcgtggaagcagctaagaatgccagtaatacagaaaagctgacagatcaagtcatgcagaaccctcgtgtcctggccgccttacaggaaagactagacaacgtccctcacaccccaagctcttacattgagacccttcccaaggccgtcaaacggaggattaatgccctgaagcaacttcaggttcggtgtgcatag

SEQ ID NO: 197999 - DNA, 549 bp, synthetic construct
  misc_feature 1..549: note = Description of Artificial Sequence: Synthetic coding sequence
  source 1..549: mol_type = other DNA
atggccgacagcgagaaccagggccccgccgagcccagccaggccgcggcagcggctgaggccgccgccgaagaagtgatggccgaggggggcgcccaaggtggagattgcgatagcgctgccggtgacccagactctgctgctggccaaatggccgaggagccccagacgcccgccgagaacgcccccaaacccaaaaacgactttatcgagtccttaccgaactccgtcaagtgtcgcgtacttgccctgaaaaagctccagaagcgttgcgacaaaatcgaagccaagttcgacaaggagttccaggcactcgaaaaaaaatataatgacatctacaagcctctgctggctaagatccaagagctcactggagaaatggaaggctgtgcttggacgctggaaggagaggaagaggaggaagaagaatatgaggacgacgaggaggaaggcgaagacgaggaagaggaggaagctgcagctgaggcagctgctggggcaaagcatgatgacgcccacgcggagatgccagatgatgctaagaagtag

SEQ ID NO: 198000 - DNA, 438 bp, synthetic construct
  misc_feature 1..438: note = Description of Artificial Sequence: Synthetic coding sequence
  source 1..438: mol_type = other DNA
atggccgacagcgagaaccagggccccgccgagcccagccaggccgcggccgccgccgaagccgccgcagaagaggtcatggccgaaggtggtgctcagggaggcgattgtgactccgcagctggggaccctgacagcgccgctggccagatggccgaggaaccgcagaccccagctgagaacgcccccaagcctaaaaatgactttatcgaatcgctgcccaactcagtgaagtgtagagtgctggccctgaagaaactgcaaaagcggtgcgataaaattgaagcgaagttcgataaggagttccaggccttagaaaaaaagtataacgatatctataaacctctcctcgcaaaaatccaggagcttacaggggaaatggagggatgtgcttggaccttggagggggaggagcgacggaagcgcgtacgaggatag

SEQ ID NO: 198001 - DNA, 963 bp, synthetic construct
  misc_feature 1..963: note = Description of Artificial Sequence: Synthetic coding sequence
  source 1..963: mol_type = other DNA
atggaggaggtgccccacgactgccccggcgccgacagcgcccaggctgggaggggcgcgagttgccaagggtgtcctaatcagcggctctgtgcttccggggctggggctacacccgataccgctatcgaggagatcaaggaaaaaatgaagacagttaagcacaaaatattagtgcttagcggcaagggaggagtgggcaaatcaaccttttcagcccatttggcccacggcctggccgaggatgagaacacccaaatcgcactcctggacatcgatatatgcggcccgtctatccctaagataatgggtctcgagggggagcaggtgcatcagtctgggtcaggctggagtccagtgtatgtggaggacaacctgggtgtgatgtctgtggggtttctcctgtcatccccggacgacgctgtgatatggcggggtccaaaaaaaaacgggatgatcaagcagtttctgcgagacgtggattggggcgaggtagattatctcatcgtggataccccacctggcacatccgacgaacatctctcagtggtccgttacctagccaccgcccatatcgatggcgctgtcataattaccacccctcaagaggtgtcattgcaagacgtccggaaagagataaatttctgtagaaaggtgaagctgcccatcataggggttgtagagaatatgagtgggtttatttgcccaaaatgcaagaaggaatcccaaatttttcctcctactaccggaggcgccgagcttatgtgtcaagacctcgaagtcccattgttgggtcgtgtgccactggatcccttgattggtaaaaattgcgacaagggccagtctttttttatcgatgcacctgatagccctgccaccctcgcttatcggtctatcatccagcggattcaggaattttgcaacctccaccagagcaaggaggagaacctgatctcaagctag

SEQ ID NO: 198002 - DNA, 930 bp, synthetic construct
  misc_feature 1..930: note = Description of Artificial Sequence: Synthetic coding sequence
  source 1..930: mol_type = other DNA
atggaggaggtgccccacgactgccccggcgccgacagcgcccaggcgggaagaggcgcctcatgccagggttgtcccaaccagcgactgtgtgcctccggtgcaggagccaccccagacactgctattgaggagatcaaggaaaagatgaaaaccgttaaacacaagatcctcgtgttaagcggaaaaggcggcgtggggaaatcaactttttccgcccacctggctcacggacttgctgaagacgagaacactcagatcgcgctgctagatattgatatttgtggtccatctatccctaaaatcatgggcttggagggcgagcagtacgtggaagataacctgggcgtgatgtccgtcgggttccttctttccagcccggatgacgctgtaatttggcgagggcctaaaaagaatggcatgataaaacagttcctccgggatgttgactggggagaggtggactatctaatagttgacactccaccgggaacctccgatgaacatctgtcagtggttcgctacctagccactgctcatatcgacggtgcggtaataattacaacaccacaggaagtatccctgcaggacgtccgcaaggagatcaacttctgtaggaaggtcaaactcccaatcattggcgtagtcgagaacatgagtgggttcatctgccccaaatgcaaaaaagaaagccagatctttcctccgactacagggggcgccgaacttatgtgtcaggacctggaggtcccacttctcgggagggtgcccctggatccgctcattgggaagaactgcgacaaagggcagtctttcttcatcgacgctccagatagtcccgcaaccctggcctaccgaagcataatccagcgaatccaggaattctgtaatctgcaccagtccaaagaggaaaacctgatttcgagctag

SEQ ID NO: 198003 - DNA, 816 bp, synthetic construct
  misc_feature 1..816: note = Description of Artificial Sequence: Synthetic coding sequence
  source 1..816: mol_type = other DNA
atggaggccgccgccgagcccggcaacctggccggcgtgcggcacataatcttggttcttagcggcaaggggggggtgggtaagtctactatatctaccgaactggccctggcacttagacacgcaggaaaaaaggttggcatcctggatgtcgacctgtgcggcccaagtattccccgaatgttgggggcccaagggcgcgcagtacaccagtgtgacaggggttgggcgcccgtgtttctggaccgtgaacagagtatctcacttatgagcgttggcttcctgctggagaaaccggacgaggctgtggtgtggcgaggtcccaaaaaaaatgccctaataaagcagtttgtatcagacgtggcctggggggagttggattatctggtggtggacacccctcccggcacatctgatgaacatatggcgaccattgaagctctgaggccttatcagcctttaggagcgctggttgttacaaccccacaggcagtctcggtgggagatgtccgtagggaactaactttttgtagaaagactgggctgagagtgatgggaatcgtggagaacatgagcggcttcacctgtccccactgcacagaatgcacgagcgtcttctcccgcggcgggggggaagaactggcccagctggctggtgtcccattcctgggctctgtgcctttggacccagctctgatgcggacccttgaggaggggcatgattttattcaggaattccccggctccccggcgtttgcagcactgaccagcatagctcagaaaattctggatgccacccccgcctgtctgccctag

SEQ ID NO: 198004 - DNA, 393 bp, synthetic construct
  misc_feature 1..393: note = Description of Artificial Sequence: Synthetic coding sequence
  source 1..393: mol_type = other DNA
atggccaccatcgaggccctgcggccctaccagcccctgggcgccttggtggtgacgacgcctcaggccgtgagtgtgggggacgttcgcagggagctgacattctgcaggaagaccgggcttcgcgtgatggggatcgtagagaatatgtcagggtttacttgtccgcattgcacagaatgcactagtgtcttttcacggggtggcggagaggagctcgcccagttggccggggtgccattcttgggctcagtcccactcgacccggcactgatgaggaccctggaggaaggccatgactttattcaggagtttcctggatcaccggcatttgccgctctgacaagcatcgcacagaaaattctcgatgctacacccgcgtgtttgccttag

SEQ ID NO: 198005 - DNA, 960 bp, synthetic construct
  misc_feature 1..960: note = Description of Artificial Sequence: Synthetic coding sequence
  source 1..960: mol_type = other DNA
atgggcatctggcagcggctgctgctgttcggcggcgtgagcctgagagcaggcgggggggcaacggccccactgggcggaagccgggccatggtttgcgggaggcagctctctggtgcaggatccgaaaccctgaagcagaggcgcacccagatcatgtctcgaggcctgcccaagcagaagcctattgagggcgtcaaacaggtaatcgtcgttgcctccggtaagggaggagtggggaaatccactacagcggtcaatttggccctggccctggcagccaatgactcttcaaaggcgatcggcttattggacgtcgacgtttatgggcccagtgtgccaaaaatgatgaacctaaagggcaatcccgaactgtcccagagcaatctgatgcgccccctgttaaactacggaatcgcatgcatgagtatgggctttcttgtggaggagtcggaaccagtggtgtggaggggcctaatggttatgagtgcgattgaaaagctgctgaggcaggttgactggggtcagctcgactatttggtagtcgatatgccacccggaacaggcgatgtccagttgtcagtgtcacagaatattcccataacaggggcagtgatcgtgtctacacctcaggacattgcccttatggatgcccacaaaggggcggagatgttccggcgcgtgcacgtacctgtcctcggactcgtgcagaatatgagcgtcttccagtgtcctaagtgtaagcacaaaacccacatttttggcgccgacggtgcccggaaattagcccagacccttggtttggaggtgctcggggacattcctctccacttaaatatccgggaggcttccgacacgggccagccaatcgtgttttcccagcctgagagcgacgaggccaaggcgtacctacgcattgccgtggaagtcgtcaggcgccttccgtcaccgagcgaatag

SEQ ID NO: 198006 - DNA, 672 bp, synthetic construct
  misc_feature 1..672: note = Description of Artificial Sequence: Synthetic coding sequence
  source 1..672: mol_type = other DNA
atgagcaaggccatcggcctgctggacgtggacgtgtacggcccctcggtccccaaaatgatgaacctcaaagggaatcctgagctgagccagagcaacctcatgagaccgctactgaattatggcatagcttgtatgtccatgggcttcctggtggaagaaagcgaaccggtcgtgtggagaggactgatggtaatgtctgccatcgagaagctcctccggcaggtcgattggggtcagctcgactatctagttgttgatatgcccccagggactggtgatgtccaactctctgtctctcagaatattcctattacgggcgcagtcatcgtgagtaccccacaggatatagcattgatggatgcacacaagggtgccgagatgttccgccgggtacatgtacctgtcttaggattggtgcagaacatgagcgtatttcaatgcccgaaatgtaagcataaaacccacatatttggcgccgatggcgcgagaaagctggcgcagacacttggactggaagtattaggagatatacccctgcacctgaacatccgcgaggccagcgacaccgggcaacccatagtttttagccagcctgagagcgatgaggccaaagcgtacctgcgaatcgctgttgaagtcgttcggcggctgccatctccatccgagtag

SEQ ID NO: 198007 - DNA, 3123 bp, synthetic construct
  misc_feature 1..3123: note = Description of Artificial Sequence: Synthetic coding sequence
  source 1..3123: mol_type = other DNA
atgggcgaggagggcggcagcgccagccacgacgaggaggagcgggcttccgtcttgttgggtcattcacccgggtgtgaaatgtgctctcaagaggccttccaagcccagcgtagccagcttgtggagttgctagtgtccgggtctctcgaaggtttcgagtccgtgctggactggcttttgtcttgggaggtactttcctgggaggactacgagggctttcacctcctgggacagccactgtctcatctggcccggcggctgttggacaccgtatggaataaaggaacatgggcatgccaaaagctcatcgctgccgcacaggaagcgcaagccgatagtcagtcccctaagctgcatgggtgttgggatccgcacagcttacacccagcccgggatctgcaatcccaccgtcccgctatcgtgagacgactgcactcacatgttgagaacatgctggatctcgcatgggaacgtggatttgtttctcaatatgaatgcgacgagattagacttcccattttcactccctcacagcgcgcacgtaggcttcttgacttggccaccgttaaggccaacggactggcagcctttctcctacaacacgtgcaggagctgcccgtaccgctcgcgctgcccctagaagccgcgacctgcaaaaaatatatggcgaagctgcgcacaacggtctcggcccaaagccgcttcttgtcaacctacgacggagctgagactctctgcctagaagacatctacacggaaaatgtgctcgaggtctgggccgatgtcggcatggctgggcctccacagaaatcacctgcaaccttgggactggaggagcttttctctactcccggacacctgaacgacgacgctgatactgtgttggtcgtgggtgaggcaggaagcggaaagtcgaccctgcttcagcgcctgcaccttctttgggccgctgggcaagattttcaggagttcctgtttgtgtttcccttctcatgccgtcaactgcaatgtatggccaagcccctaagcgtgcgcacattgctattcgaacactgttgttggcctgacgtcggacaggaagacattttccagctgttacttgatcacccggaccgtgtattgcttacttttgatggtttcgacgagttcaaattccggtttactgacagggagcggcactgctcccccactgacccaaccagcgtacagacactgctcttcaatctgctgcagggtaaccttctgaaaaacgctaggaaagtagtgacttctcggccagccgcagtgtccgcctttctgcggaagtatatccggaccgagtttaatctgaaaggcttcagtgaacaaggcattgagctctacctaaggaagaggcaccacgagcccggagtggctgatcggctgatccgcctgctgcaggagacctccgctctccacgggctctgccatttgcctgtattctcttggatggtcagcaagtgccatcaagagcttctccttcaggagggcggttccccgaagactaccacggatatgtacttgctgatactgcagcactttctcctacacgctacccccccggatagcgcttctcaaggactggggcccagccttcttagaggaagacttcctaccctgcttcacctgggcaggcttgctttatggggtctggggatgtgctgttatgtcttttcagcccagcaactccaggccgctcaggtgagtccagacgatatttcgctggggtttctggtcagagccaagggcgtggtacccggttcaaccgcacctctggagtttctccacattaccttccagtgcttcttcgccgccttctatcttgccctctccgccgatgtgccacctgcattgctgaggcatctcttcaactgcggccgccctggcaatagcccaatggccagactcctgccaacgatgtgtattcaagccagtgaagggaaggatagcagcgtggctgccctcctacagaaagcagaaccccacaatcttcaaattacagctgcttttctagccggcctgctgtcccgcgagcactggggccttcttgcagaatgtcagacaagcgagaaggccttgctcaggcggcaggcctgtgccaggtggtgcttagcgagaagcctgaggaaacatttccattctatacctccggctgcaccaggagaggccaagtccgtgcacgctatgcctgggtttatctggctgattcggtcactatatgaaatgcaggaggagcgcctggcccgcaaggctgcccgtggcttgaatgtcggccatctcaagttaaccttttgtagtgtggggcccaccgagtgtgccgcactggccttcgtcctacagcatctgagacgcccagttgcactgcagttggattataacagtgtgggtgacatcggtgtggagcagctgctgccttgcctcggcgtgtgtaaagctctgtatctgcgagataataacatctcagatcgtgggatatgtaagctgatcgaatgtgcactgcattgtgagcagctgcagaagctagctttattcaataacaagctgaccgatgggtgcgcgcactccatggctaagctactagcctgcagacagaatttcctggccctgcggctcgggaacaattacatcaccgccgctggtgcacaggtgctggccgaaggactgagaggcaacacctctttgcagttcctcgggttctggggcaacagagtgggcgatgagggtgcacaagctctggccgaagctctgggagaccatcaaagcttgcggtggctctccctagtcggtaacaacatcggcagcgtcggcgcacaggctttagcccttatgctggcaaagaatgtaatgctggaggagttatgtttagaagaaaatcacctgcaggatgagggtgtatgttccttagccgagggccttaagaaaaactcaagtttgaaaatcctgaagctctcgaacaactgcattacttacctcggcgccgaggcccttctgcaggcattagagagaaacgacaccatcctggaagtttggctgaggggcaacacgttcagtttagaagaggtcgataaactggggtgtcgggatactcgcctgttgctgtag

SEQ ID NO: 198008 - DNA, 543 bp, synthetic construct
  misc_feature 1..543: note = Description of Artificial Sequence: Synthetic coding sequence
  source 1..543: mol_type = other DNA
atgtggctgctgccccccggccaggtgttcaacgccttcttccccagccggctgggcaacaattatattactgctgcaggggcacaggttctggcagaaggactacggggaaatacttcactccagtttctgggcttctgggggaatcgggtcggtgatgaaggagctcaagccctagcagaagctctcggcgatcaccagtcattgaggtggctttctctcgtgggcaacaatatcggatcagtcggcgctcaggctcttgctctgatgctggctaaaaacgtgatgctggaagaactgtgcctggaagagaatcatttacaggatgagggtgtgtgcagtttggctgaaggattgaagaaaaatagcagtctcaaaattttgaagctatcaaacaactgcataacatacctgggagctgaggcgctactccaggccttagaacggaacgacaccatcctggaggtctggttacgcgggaatacgttttcacttgaagaggttgataagctgggttgccgcgatacaaggcttcttctgtag

SEQ ID NO: 198009 - DNA, 1008 bp, synthetic construct
  misc_feature 1..1008: note = Description of Artificial Sequence: Synthetic coding sequence
  source 1..1008: mol_type = other DNA
atggaggacagcggcaagaccttcagcagcgaggaggaggaggccaattactggaaggaccttgccatgacctataagcagagagccgagaatacccaagaagagttgcgtgaatttcaggaggggtcccgtgaatacgaagcggagctcgaaacgcagttacagcagatcgagacaaggaatagagacctcctgtcagagaacaatcggctccggatggaattggagacgatcaaggaaaagttcgaagtgcaacattccgaggggtatcgccaaatctccgccctcgaggacgatctcgcgcagaccaaagccatcaaggaccagctccagaaatacattcgtgaactggagcaggccaacgatgacctcgaaagagcaaaacgcgcaaccatcatgtcactggaagattttgaacagaggcttaaccaggctatagagaggaacgcatttctggaatctgaactagacgagaaagagaacctgctggagtccgttcagagactcaaggatgaggctagagacttacgacaagaactggcggtccagcagaaacaagaaaagccacgtactcccatgccttcctctgttgaagctgaaaggacagacactgctgtgcaggcaacagggtcagtgccatctacccctatagcacacaggggcccttccagtagcctaaatacccccggcagcttcaggcgaggcttggatgacagtaccggggggacccctctcacccccgctgcccgcatcagtgctctaaacatcgtgggcgatcttctccgcaaggtgggtgcactggaatcaaagctggctagctgtcgaaatctggtgtatgaccagtctccaaacagaacaggcgggccggcatccgggcgctcctcgaaaaatcgggacggaggcgagcgccgcccctctagtacgtcggtcccgctgggagataaagggctggacacatcttgcagatggcttagcaagtcaaccacacggagctcctcgtcttgttag

SEQ ID NO: 198010 - DNA, 1041 bp, synthetic construct
  misc_feature 1..1041: note = Description of Artificial Sequence: Synthetic coding sequence
  source 1..1041: mol_type = other DNA
atggaggacagcggcaagaccttcagcagcgaggaggaggaggccaattactggaaggatctggccatgacatacaaacagagggcagagaatacacaagaggaattgcgcgaatttcaggaaggttcacgcgagtacgaggcagagctggagacccagctgcagcagattgaaacccggaacagagacctcctgagcgagaataaccggttacgcatggagttggagacgatcaaagaaaagtttgaagtccagcattcagagggttataggcaaatctcagcgctcgaggacgatctcgctcagacaaaagcaattaaagatcaattgcagaagtatatacgcgagcttgaacaggctaacgacgacctggaacgcgccaagcgcgccacaataatgtcactggaagacttcgagcagcggcttaatcaggctattgagagaaatgccttcctcgaatccgaactggacgagaaagaaaatcttctggagagcgtacagagattgaaggatgaggcccgggacttacggcaggaactagccgtgcagcagaagcaggagaaaccccgcaccccaatgccctcttccgtggaggcagagagaactgacaccgctgtccaggctacagggagtgtcccaagcacaccaatcgctcatagaggcccgtcatcttcacttaacacgcctggctctttcagaaggggcctagacgactccacaggaggcacccccctgacgcctgccgctcgcatttccgcactgaacattgttggtgatctcctcaggaaggtgggagctctcgagagcaaactggccagctgtagaaatctggtctacgatcagtcccccaatcgcaccggcggtccagcctctggtcggtcctctaagaaccgagacggtggagaaagacgcccatcctccacttctgtgccacttggtgataaaggcttaggcaagagactggaatttggtaagccgcctagccacatgtcttcttcacccttgccttccgcgcagggggtggtgaagatgctgttgtag

SEQ ID NO: 198011 - DNA, 1008 bp, synthetic construct
  misc_feature 1..1008: note = Description of Artificial Sequence: Synthetic coding sequence
  source 1..1008: mol_type = other DNA
atggaggacagcggcaagaccttcagcagcgaggaggaggaggccaactattggaaagacctcgctatgacctataaacagagagctgagaatacgcaagaagaactgcgcgaatttcaagaaggcagccgagaatacgaagcggagctggagacacagttgcagcagatcgagactagaaatagggatctgctctccgaaaacaaccgtctgagaatggagctcgaaacaataaaagaaaagttcgaagtgcaacactccgaggggtaccgacagatttccgccctggaagacgatttagctcaaacaaaagctataaaggaccaactgcaaaagtacattcgtgagctcgaacaagcaaatgacgacctggagcgggccaaaagggccaccatcatgtctctcgaagacttcgagcagagactgaatcaggccattgaacgcaatgcattcctggagtctgaactcgacgagaaagaaaatctgctggagtctgtgcaacggctgaaagatgaagcgagagacctcagacaagagctagccgtccaacagaaacaggagaagcctcggactcctatgccttccagcgtggaggctgaacgtacagacacggctgtccaggccaccgggtcagtgccctccacacctattgctcatcggggcccatctagcagcttaaacacaccagggagcttccggagaggactcgacgactcaaccggggggactccactcacaccagctgctcggattagcgccctgaacatcgtgggagacctgctcagaaaggttggggcactggaatccaaactggccagttgcaggaatctggtgtacgaccagtcccccaaccgaaccggtggcccggcgagtggccgaagctccaaaaaccgtgacggcggcgagcgtcgccccagctcgacctccgttcccctcggagacaagggactagatacatcatgtcgctggctgagcaagagcaccaccaggagctcctctagttgctag

SEQ ID NO: 198012 - DNA, 1008 bp, synthetic construct
  misc_feature 1..1008: note = Description of Artificial Sequence: Synthetic coding sequence
  source 1..1008: mol_type = other DNA
atggaggacagcggcaagaccttcagcagcgaggaggaggaggccaactattggaaggatttggccatgacgtacaagcagagagccgagaacactcaagaggagttgagggagtttcaggaaggcagccgggaatacgaagcggaattagagacccagctccagcagatcgagacaaggaaccgcgatttgctgtccgaaaataaccgtctgcggatggagttagaaacgattaaagaaaaatttgaagttcaacactctgaaggctacaggcaaatttctgccctggaggatgatctcgctcagaccaaagctattaaggaccagctgcagaagtacatacgcgagctcgaacaagcaaacgatgacctcgagagagctaaacgggccaccattatgtcactggaagacttcgaacaacgtctgaaccaagccatagaacggaacgctttcctagaatctgaactggatgaaaaagagaacctcctggagtccgtacagcgcctcaaagacgaagccagggatcttaggcaggagttggcagtccagcaaaagcaagaaaagccgagaaccccgatgccttcctcagtggaagccgagcgaacagacacagccgttcaggcaacaggcagcgtcccttccacccctatcgctcacagaggcccaagcagctccctgaacactcctggctcttttcgccgaggtctggacgacagtaccggaggcacacctcttaccccggccgccagaatttccgctctgaacatcgtaggggaccttcttcggaaggtgggggccctcgaatcaaagcttgccagctgccggaacctcgtgtacgaccagtcccccaacaggaccgggggaccggcttctggaaggagtagcaaaaaccgggacggcggtgagaggcgcccaagttctacttcggtgcctctgggggataagggtctggacacttcatgtcgctggttaagcaagagtactactcggagtagttccagttgttag

SEQ ID NO: 198013 - DNA, 471 bp, synthetic construct
  misc_feature 1..471: note = Description of Artificial Sequence: Synthetic coding sequence
  source 1..471: mol_type = other DNA
atgggcgccagccggctgtacaccctggtgctggtgctgcagccccagagggtgctcctggggatgaagaaacgcgggtttggagcagggcgctggaatggcttcggcggcaaagtgcaggagggcgaaacgattgaggacggcgcccgtagggaactccaggaggaaagtgggctgacggtggatgcactacataaagtcgggcagatagtgtttgagttcgtaggcgagcccgagctgatggatgttcatgtattctgtactgattctatccagggaactcccgtcgagtctgacgaaatgaggccttgttggtttcagctggatcaaattcccttcaaggacatgtggcctgatgatagctattggttccccctactgttacagaagaagaaatttcacggatacttcaaattccagggccaggacaccatcctggattacacgctgcgggaggtggacactgtatag

SEQ ID NO: 198014 - DNA, 540 bp, synthetic construct
  misc_feature 1..540: note = Description of Artificial Sequence: Synthetic coding sequence
  source 1..540: mol_type = other DNA
atgagcggcatcagcccccagcagatgggcgagcccgagggcagctggtcgggcaaaaaccccggcacaatgggagcaagccggctctacactctcgtcctggtgctccagcctcaacgcgtgctgctgggaatgaagaagcggggcttcggagccggtcgctggaatgggttcggtgggaaagtccaggagggggagacaatcgaagacggtgctcgccgagagcttcaggaagagagtggattaacggtggacgctctacacaaggtgggtcagatcgtgtttgaatttgtgggcgagcccgaacttatggacgtccatgtgttctgtacagacagcatccagggaacacccgtggagtccgacgaaatgcgtccatgctggtttcagcttgatcagattcccttcaaggacatgtggcccgacgactcatattggttcccgctactactacagaagaaaaagtttcatgggtattttaaatttcaggggcaagacaccattctcgactacactcttagagaggtggataccgtgtag

SEQ ID NO: 198015 - DNA, 471 bp, synthetic construct
  misc_feature 1..471: note = Description of Artificial Sequence: Synthetic coding sequence
  source 1..471: mol_type = other DNA
atgggcgccagccggctgtacaccctggtgctggtgctgcagccccagcgggtactgctggggatgaagaaacggggcttcggcgccggaagatggaatggttttggcggaaaggtgcaggaaggcgaaaccatcgaagacggggccagaagggagctgcaggaagagtcaggcctcacggtggatgctctgcataaggttgggcaaattgtctttgagtttgtaggggaacctgaactgatggacgtacatgttttctgcacggacagcatccagggaactccagtcgagtctgatgaaatgcggccatgctggttccaactcgatcagattccattcaaggacatgtggccagacgactcctattggtttcctctcctattgcaaaagaagaaattccacgggtactttaagttccaaggccaggatactattttggactacactttgagggaggtggacaccgtctag

SEQ ID NO: 198016 - DNA, 471 bp, synthetic construct
  misc_feature 1..471: note = Description of Artificial Sequence: Synthetic coding sequence
  source 1..471: mol_type = other DNA
atgggcgccagccggctgtacaccctggtgctggtgctgcagccccaaagggtgttactcggaatgaagaaaagaggtttcggtgctgggagatggaacgggttcggggggaaggtacaagagggggagaccattgaagatggagcccggcgcgagctacaagaggagtccggactgaccgtcgatgccctacacaaggtgggacaaatagttttcgaatttgttggtgaacccgaactgatggatgtacatgtgttttgtacagacagcatacagggtactcccgtcgagagcgacgaaatgcgaccttgctggtttcagctggaccaaattccgttcaaggatatgtggccagatgatagctactggtttccacttttgttacagaagaagaagtttcacggctatttcaaatttcaagggcaagataccattctcgattatacactgagggaggtggacaccgtgtag

SEQ ID NO: 198017 - DNA, 540 bp, synthetic construct
  misc_feature 1..540: note = Description of Artificial Sequence: Synthetic coding sequence
  source 1..540: mol_type = other DNA
atgagcggcatcagcccccagcagatgggcgagcccgagggcagctggagcggcaaaaacccaggaaccatgggcgcttctcgtttatacaccttggttttagtcctgcagcctcagcgggttctcctcggcatgaaaaagaggggctttggggccggcagatggaacggtttcggtggtaaggtgcaggagggggaaactattgaggacggggctagacgcgagctacaggaagaaagcgggctgactgtggacgcgctgcacaaggttggccagatagtgttcgagtttgtgggggagccagagttaatggacgtacatgtcttctgcacagattctattcaggggacccccgtggaatcagatgaaatgcgaccatgttggttccaactggatcagattcctttcaaggatatgtggcccgacgattcgtattggttccccctgttgctccagaagaagaagttccatgggtacttcaagttccaaggccaggacaccattttagattacacactccgagaggtggatacagtctag

SEQ ID NO: 198018 - DNA, 540 bp, synthetic construct
  misc_feature 1..540: note = Description of Artificial Sequence: Synthetic coding sequence
  source 1..540: mol_type = other DNA
atgagcggcatcagcccccagcagatgggcgagcccgagggcagctggtccggcaagaatccggggacgatgggagcctctaggctgtacaccctcgtattggtccttcaaccacagagggtcctgctggggatgaagaaacggggattcggggccggcaggtggaacggttttggcggcaaggtacaggaaggcgagaccattgaagacggcgcccggagagaactgcaggaagagtctggattaacggtggacgccctgcataaggtgggacaaattgtatttgagtttgtgggggaacccgagctgatggatgtccacgtcttctgtacagacagcattcaggggacccccgtggagtccgacgagatgcgcccttgctggtttcaactggaccagatcccctttaaggacatgtggccagatgactcatattggttccccctgctgctccagaaaaagaagtttcacggctacttcaagttccaggggcaggacaccatcttggattacacgctccgtgaagttgatacagtgtag

SEQ ID NO: 198019 - DNA, 114 bp, synthetic construct
  misc_feature 1..114: note = Description of Artificial Sequence: Synthetic coding sequence
  source 1..114: mol_type = other DNA
atgggcgccagccggctgtacaccctggtgctggtgctgcagccccagagagtgctcctcggcatgaagaaacgcgggtttggcgctggaaggtggaacggatttgggggatag

SEQ ID NO: 198020 - DNA, 495 bp, synthetic construct
  misc_feature 1..495: note = Description of Artificial Sequence: Synthetic coding sequence
  source 1..495: mol_type = other DNA
atgaagtgcaagcccaaccagacccggacctacgaccccgagggcttcaagaagcgcgccgcatgtctctgcttccgctccgagagggaggatgaagtgctgttggtcagttcaagtcggtaccctgatagatggatagtgcccggaggtggcatggaacccgaagaagagccaggcggggctgccgtgcgagaggtctacgaagaagccggcgtgaaaggcaaactgggtcgccttctcggcgtgtttgaacaaaaccaggacccgaaacaccggacctacgtctacgtgctaactgtaaccgagttgctggaagactgggaggacagcgtaagcattggccgcaagagagagtggtttaaagtcgaagacgctataaaggtgttgcagtgccacaaaccagtccacgccgagtatctggaaaagctaaaactcggcggttcccccactaatggcaactcaatggctcctagcagcccagactccgacccctag

SEQ ID NO: 198021 - DNA, 495 bp, synthetic construct
  misc_feature 1..495: note = Description of Artificial Sequence: Synthetic coding sequence
  source 1..495: mol_type = other DNA
atgaagtgcaagcccaaccagacccggacctacgaccccgagggctttaaaaagcgtgccgcttgtttgtgctttaggtccgagagggaagacgaggttctgcttgtgagttcctcaaggtacccggatagatggatcgtgccggggggcggaatggaacctgaagaagaaccgggaggcgccgccgtgagggaggtgtatgaggaagctggggtcaaaggaaagctcggtaggcttctaggcgtcttcgaacagaaccaagatccaaaacatcgtacctatgtgtacgtgctaacggttacagaactgttggaagactgggaagacagtgtgtcaatcggccgcaagcgagagtggtttaaggtcgaagatgctataaaggtgctgcaatgccacaagcccgtccatgccgagtacctagaaaagctgaagctaggaggcagtccaacaaatggaaacagcatggctccttctagcccagatagcgatccctag

SEQ ID NO: 198022 - DNA, 444 bp, synthetic construct
  misc_feature 1..444: note = Description of Artificial Sequence: Synthetic coding sequence
  source 1..444: mol_type = other DNA
atggccctgcgggcctgcggcctgatcatcttccggcggtgcctgatccctaaagtggacaataatgccatcgaatttctgctgctgcaggcatcggacggtattcatcattggaccccaccgaaaggtcacgtggaacctggcgaagatgatctggagaccgccttgagagagacccaagaagaggcaggaattgaagccggacaattgaccatcattgaagggtttaaacgagaactgaattacgtggccaggaataaaccaaagaccgtgatatattggctcgctgaagttaaagattatgatgtggaaattcggttaagtcacgaacatcaggcctatcggtggctcggcctggaggaggcttgtcagctcgcccaatttaaggagatgaaggctgcactgcaggaaggacatcagtttctatgttccatcgaggcctag

SEQ ID NO: 198023 - DNA, 444 bp, synthetic construct
  misc_feature 1..444: note = Description of Artificial Sequence: Synthetic coding sequence
  source 1..444: mol_type = other DNA
atggccctgcgggcctgcggcctgatcatcttccggcggtgcctgatccccaaagtggacaacaacgccattgagttcttgctacttcaggccagcgacggcatccatcactggacaccaccgaaaggtcatgtcgagcctggggaggatgatctggagaccgcgttacgcgaaacccaggaggaagcgggcattgaggccggacagctgactattattgaaggctttaagagggagttaaactacgtagctcgcaataaacctaaaaccgtcatatattggcttgccgaggtgaaagactacgatgttgagattagactttctcacgaacatcaagcctatagatggctggggcttgaggaggcctgtcaactggctcaatttaaagaaatgaaggccgctctacaagaggggcaccagtttctgtgttccatagaagcatag

SEQ ID NO: 198024 - DNA, 444 bp, synthetic construct
  misc_feature 1..444: note = Description of Artificial Sequence: Synthetic coding sequence
  source 1..444: mol_type = other DNA
atggccctgcgggcctgcggcctgatcatcttccggcggtgcctgattcccaaggtcgataacaacgctatcgagtttttactcctacaggcctcagatggtattcaccactggaccccaccgaaaggtcacgttgagcccggagaggacgacctggaaactgccctcagggagacccaggaggaggccgggattgaggccgggcagctcacaatcatcgagggattcaagcgcgaactgaactacgttgcaagaaataagccaaagacggtgatttattggctggcagaggttaaagattatgacgttgagatcaggctatcccacgaacaccaggcataccggtggttaggcctagaggaggcctgccagctggcccaatttaaggaaatgaaggctgcattacaggagggtcaccagtttctgtgcagtatcgaggcctag

SEQ ID NO: 198025 - DNA, 444 bp, synthetic construct
  misc_feature 1..444: note = Description of Artificial Sequence: Synthetic coding sequence
  source 1..444: mol_type = other DNA
atggccctgcgggcctgcggcctgatcatcttccggcggtgcctgatccctaaggtggataataatgccatagaattcttgctgctccaggccagcgacggcattcaccactggacaccacctaaaggccacgtggagcccggcgaggacgacctcgagaccgctctgagagagacgcaggaagaagctggaatcgaggcagggcaacttactataatcgaggggtttaaaagagagctgaactatgttgctcgtaacaaacccaaaactgtgatctattggctggctgaagtcaaagattacgacgtggagatcaggttatcgcacgaacaccaagcgtacaggtggctgggccttgaagaggcgtgccaacttgcccagtttaaagaaatgaaggccgctctccaggaagggcaccagttcctatgttccattgaggcttag

SEQ ID NO: 198026 - DNA, 444 bp, synthetic construct
  misc_feature 1..444: note = Description of Artificial Sequence: Synthetic coding sequence
  source 1..444: mol_type = other DNA
atggccctgcgggcctgcggcctgatcatcttccggcggtgcctgattcccaaagttgataacaatgctatagagttcttactattgcaggcaagcgatggcatacaccattggacgcccccaaaagggcacgtagagccaggcgaggacgacttggagaccgccctgcgggaaactcaggaggaggccggaatcgaggccggacaactgactataattgagggctttaagcgggagctgaattacgtcgctcggaataagccgaaaacagtaatatattggctcgcagaagtcaaagactacgatgtagagattagactgtctcatgaacatcaggcatatcggtggctgggcctggaagaggcatgccaactcgctcagttcaaggagatgaaagccgctctccaggaaggccatcagttcctctgttccattgaagcttag

SEQ ID NO: 198027 - DNA, 1395 bp, synthetic construct
  misc_feature 1..1395: note = Description of Artificial Sequence: Synthetic coding sequence
  source 1..1395: mol_type = other DNA
atggagaccctgagcttcccccggtacaacgtggccgagatcgtgattcacatccgcaataaaattctgacaggagcagatggaaaaaacctgaccaagaatgatttgtaccctaaccccaagccagaagttctgcacatgatttatatgcgagccctgcaaatcgtctatggaatcaggttggagcacttttacatgatgccagtcaactctgaggtgatgtatccacatctgatggaagggtttctgccgttttctaatctggtgacccacctggactcttttctcccgatttgccgcgtaaatgattttgaaaccgcggacattctgtgccctaaagccaaacgcacctctaggttcctcagcggcattattaacttcattcacttccgcgaagcttgccgagagacatacatggaattcctgtggcaatataagtcttcggccgataaaatgcagcagctgaacgctgcacaccaggaagccctcatgaagcttgaacgtcttgactctgtcccagtggaggaacaagaggaattcaaacaactctccgatggaatacaggagctccagcagagcctaaatcaagacttccatcagaaaacgattgtacttcaggagggtaacagccagaagaagagtaatattagtgaaaagactaaacgacttaacgaactgaagttgtctgtggtcagcctgaaagaaatccaggaaagcctgaagacaaaaatcgtcgacagccctgagaagctcaaaaactacaaagagaagatgaaggacactgtgcagaagctgaagaacgcccggcaggaggtagtcgagaaatacgagatttacggcgactcagtcgattgtttgccaagttgccagctggaggtccagctttaccaaaaaaaaatacaggatctgagtgataatcgcgaaaaattggcatctatcctaaaggaatccctcaacctggaggaccaaatcgagagcgatgagtccgaactcaaaaagttgaagactgaggaaaattcattcaaacggctgatgatcgtcaaaaaagagaaactcgctactgctcagttcaagattaataagaaacacgaggatgtaaagcagtataagaggaccgtcattgaagattgtaataaggtacaggagaaacggggcgcagtttatgagcgggtgaccacgattaaccaggagattcagaagatcaaactgggaatccagcagttaaaagatgctgccgaaagagagaaactgaagtcccaggaaatctttttgaatctgaagacagcgctcgagaaataccatgatggaatcgagaaagcagccgaggactcatacgcaaagattgacgagaagacagccgagctgaagcggaagatgttcaaaatgagtacctag

SEQ ID NO: 198028 - DNA, 1395 bp, synthetic construct
  misc_feature 1..1395: note = Description of Artificial Sequence: Synthetic coding sequence
  source 1..1395: mol_type = other DNA
atggagaccctgagcttcccccggtacaacgtggccgagatcgtgattcacattcgtaataaaattctgaccggggctgacgggaagaatctgacaaaaaacgacctataccctaatccaaaacccgaggtgctacatatgatctacatgagggccttgcagattgtctatggtatccggctggaacacttctacatgatgcctgtcaactcggaagttatgtatcctcacttgatggaaggatttttgccattctctaacctggtgacccacttagacagctttttgccaatctgtagggttaatgattttgaaaccgctgacatattatgccctaaagcaaagagaacctcacgatttctgtcaggaatcattaattttattcattttcgagaggcatgtagagaaacgtatatggaattcctgtggcagtacaagtcctccgctgacaaaatgcaacagttaaacgccgctcatcaagaagctttgatgaagctggaaaggctggactctgtccctgtggaagagcaggaagaatttaagcagctgtccgatgggattcaggaattgcagcagtccctgaaccaggattttcaccagaaaacgattgtgttgcaagaaggcaattcccaaaaaaagtccaacattagcgaaaaaactaaaaggttgaatgaactgaagctatccgttgtaagcttgaaagagatccaagagagtctgaagacaaagattgtggacagccccgaaaaattaaagaattataaggaaaagatgaaagatactgtgcagaaactgaaaaatgctaggcaggaggtggttgaaaaatacgagatctacggggactcagtcgattgtctccctagctgtcagctcgaagtgcaactgtatcagaagaagatacaggatttgtcagataaccgggaaaagttggcatctatcctaaaagagtccttgaacctggaagatcagatcgagagtgatgagtcagagcttaaaaagctcaagaccgaagagaatagctttaagcgactaatgattgtgaagaaggaaaagctggccactgcccaatttaaaatcaataagaaacacgaagacgtgaagcagtacaaaaggactgtgatcgaggactgcaacaaggtgcaggagaaaagaggagcagtatacgagcgagtgactacaataaatcaagagatccagaagataaaactcggcatacaacagttgaaggatgcagccgagagagaaaaattgaaaagccaggaaatctttctgaacctcaagacagcccttgagaaataccatgacggcattgagaaagccgccgaggattcctacgcaaaaattgatgagaagacagcagaactcaagcggaagatgttcaaaatgtcgacctag

SEQ ID NO: 198029 - DNA, 609 bp, synthetic construct
  misc_feature 1..609: note = Description of Artificial Sequence: Synthetic coding sequence
  source 1..609: mol_type = other DNA
atggagaccctgagcttcccccggtacaacgtggccgagatcgtgattcatattcggaacaaaatcttgactggagcggatgggaaaaacctgactaaaaatgatctatatcccaaccctaagcccgaagttctgcacatgatctatatgagggccttgcagatcgtgtatgggatccgattggagcatttctatatgatgccggtaaattccgaggttatgtacccgcatttgatggagggattcttaccgttctcaaacttggttacgcatctcgacagcttcttgcccatttgtagggttaatgacttcgagactgcagatatcctgtgccccaaagcaaagagaaccagccgtttcttgtcagggatcatcaactttattcatttcagggaggcttgccgcgagacctatatggaatttttatggcagtataagtcttccgccgataagatgcaacagctcaacgcagctcaccaagaggctttgatgaagttagagaggttggactcggtcccagtcgaggagcaggaggagtttaaacaactgtctgatggtatccaggagttgcagcagtccttgaaccaggattttcatcagaaaacatag

SEQ ID NO: 198030 - DNA, 438 bp, synthetic construct
  misc_feature 1..438: note = Description of Artificial Sequence: Synthetic coding sequence
  source 1..438: mol_type = other DNA
atggagaccctgagcttcccccggtacaacgtggccgagatcgtgattcacatacggaacaaaatcctgaccggtgccgatgggaagaacttgaccaagaatgatctgtaccctaatcctaagcctgaagtccttcacatgatttatatgagagctttacagatcgtttacggtatccgtcttgaacatttttacatgatgccagtgaacagcgaagtgatgtaccctcatctgatggaaggcttcctcccattctctaatttggtgacgcatctcgacagcttccttccgatttgcagggtgaatgacttcgagacagccgatatactttgcccaaaagcgaaacgtacttcccgcttcctgtcagggatcatcaatttcatacatttccgcgaggcatgccgagagacttacatggaatttctgtggcagtattag

SEQ ID NO: 198031 - DNA, 666 bp, synthetic construct
  misc_feature 1..666: note = Description of Artificial Sequence: Synthetic coding sequence
  source 1..666: mol_type = other DNA
atggagaccctgagcttcccccggtacaacgtggccgagatcgtgattcacattcgtaataagattctgacaggagcagatggcaagaatcttactaagaacgacttgtaccctaatcctaagccagaagtgctccacatgatttacatgcgggccctgcagattgtgtacggaattcgactggaacatttctacatgatgcccgtgaacagcgaagtcatgtatccgcatcttatggagggcttcctgcccttcagtaatctcgtcacccatctagactcgttccttccgatctgtcgggtgaacgattttgagactgcagacattctgtgtccaaaagccaagaggaccagtaggttcttatccgggatcattaacttcatccatttccgggaggcatgtagagaaacatatatggagttcctgtggcaatataaaagttcggcagacaagatgcagcagctgaacgcggcccaccaggaggccctaatgaagttagagagactcgactctgtccctgtggaggaacaggaggaatttaagcagctctccgatggaatccaggagctgcaacagagcctgaaccaggacttccatcagaagacttgctgcaaaagggaaattcccaaaagaagccagatctttcagaggaagccatccgtgtag

SEQ ID NO: 198032 - DNA, 1254 bp, synthetic construct
  misc_feature 1..1254: note = Description of Artificial Sequence: Synthetic coding sequence
  source 1..1254: mol_type = other DNA
atggagaccctgagcttcccccggtacaacgtggccgagatcgtgatccacattcgtaataagatacttacaggtgctgacggaaaaaacctgactaaaaacgacctctatccaaatcctaagcccgaggtactacacatgatctatatgcgagctctgcagatcgtttacggcatacgcctagagcatttctacatgatgccggtcaacagtgaggtcatgtatccccatttgatggaaggattcctgcccttttccaacctggtgacacacttagactcatttctgccgatatgtagagtcaacgacttcgagaccgcagacatattatgcccaaaggccaagagaaccagtaggttcttatccggcatcataaacttcatccatttccgggaagcttgccgtgagacatacatggagtttctttggcaatacaaatcaagcgccgacaaaatgcagcagttgaatgccgcacaccaagaggccctgatgaagctcgagaggctcgattctgtgcccgtggaggagcaagaggagttcaaacagctgtcagacggaatccaagaattacaacagagcttgaaccaggatttccatcaaaagacaattgtcctgcaggagggaaattcacagaagaagtccaacattagcgagaagacaaagagactgaatgagctcaagctgtctgtcgtcagtcttaaggagatccaagagtctttgaaaaccaaaattgtggatagcccagagaaactgaaaaattacaaggaaaagatgaaagatacagtccaaaagctgaagaacgcacgctcactcaatctggaagaccagattgaaagcgacgaaagtgaactgaagaaactcaaaaccgaagaaaacagcttcaaaaggctgatgatagtaaaaaaggaaaagctggccactgcgcagtttaaaattaacaagaaacatgaagacgttaaacagtataagaggacggtcatagaagactgcaacaaggtgcaggagaaacgcggcgccgtatacgaaagagtgacaaccattaatcaggagattcagaaaataaaacttggcatccagcagctgaaagatgccgctgagcgagaaaaattaaaatctcaggagatctttctgaacttgaagactgcactcgaaaaatatcacgatggtatagagaaagccgctgaagatagttacgcaaagatagacgaaaaaaccgccgaattaaagaggaaaatgtttaagatgtccacctag

SEQ ID NO: 198033 - DNA, 375 bp, synthetic construct
  misc_feature 1..375: note = Description of Artificial Sequence: Synthetic coding sequence
  source 1..375: mol_type = other DNA
atggagaccctgagcttcccccggtacaacgtggccgagatcgtgatacacattcggaacaagattttgacaggcgctgacgggaaaaacctgaccaaaaacgacctttaccccaatcctaagccggaggtcctgcacatgatttacatgcgcgcactacaaatcgtgtatggcatccgcttagaacacttctacatgatgccagtaaacagcgaagtgatgtatccacaccttatggagggcttcctccctttcagcaacttagtgacccaccttgactcctttcttcccatttgccgggtcaacgactttgaaaccgccgacatcctgtgtcccaaagccaagcgaacatcccgatttttatctggcatctag

SEQ ID NO: 198034 - DNA, 702 bp, synthetic construct
  misc_feature 1..702: note = Description of Artificial Sequence: Synthetic coding sequence
  source 1..702: mol_type = other DNA
atgaacaagctgcggcagagcttccggcggaagaaggacgtgtacgttccggaagcatcccgcccccatcagtggcaaaccgatgaagagggcgtgcgaacggggaaatgtagctttccagtcaaaaccggcaaaaaggccgtgaaggccgtgctgtgggtcagtgcagacggcctgcgagtcgtcgatgaaaaaactaaggaccttattgtggatcagacaattgagaaggtctccttctgcgcgcctgatagaaatttcgatagggcttttagttacatctgtagggatgggaccaccaggagatggatctgtcattgttttatggccgtgaaggatactggggagaggctcagtcatgccgtggggtgtgccttcgcagcctgcctcgagcgaaagcagaaaagggaaaaagagtgcggcgtaacagcaaccttcgacgcaagtagaacaactttcacacgggagggatccttccgagtcaccacggctacggaacaagcagagagagaagaaattatgaaacagatgcaggacgcaaaaaaagcggaaaccgataagatcgttgtcggcagctcagtcgctccaggcaacactgcacctagcccatcaagccccacaagcccaactagtgatgcaaccacttcactggagatgaataatccgcatgccatcccccgtagacatgccccaatcgagtag

SEQ ID NO: 198035 - DNA, 1956 bp, synthetic construct
  misc_feature 1..1956: note = Description of Artificial Sequence: Synthetic coding sequence
  source 1..1956: mol_type = other DNA
atgaacaagctgcggcagagcttccggcggaagaaggacgtgtacgtccccgaggccagcagaccacaccagtggcagaccgacgaggaaggcgtccgcacaggaaagtgctccttccctgtgaagtatctcggtcatgttgaggtggatgaatcgaggggcatgcacatatgtgaggacgccgttaagcgtctgaaagcggaacggaaattctttaagggtttctttggcaaaacggggaagaaggctgtgaaagcggtgctctgggtatccgccgatggcctgagggtggtggacgagaagacgaaagacttgattgtggaccaaacaatcgaaaaagtctctttttgtgcaccagatcgaaattttgatagagcatttagttatatctgccgggatggcactacacgcagatggatttgccactgctttatggcagtcaaagacacaggagaacggctctcccatgccgtcggttgcgctttcgcagcgtgtctggagcgcaagcaaaaacgggaaaaggagtgtggggtaacggcgaccttcgacgcctctagaacgaccttcaccagggaaggcagttttagggtgactaccgctacagaacaggccgagagagaagaaattatgaaacagatgcaagacgccaaaaaagctgagacagacaagatcgttgtggggagtagcgtggcccccggaaatacggccccgtccccatccagtcctacgtcacccaccagcgacgctacaacgtcacttgagatgaataaccctcacgcgatcccgaggcgacatgcacctatagaacagttggctcgccaaggatccttccgaggtttccctgctctttcccagaagatgagtcccttcaagcggcagttgagtctgaggattaacgagctgccatcgacgatgcagaggaaaactgatttcccaatcaagaacgcagtgcccgaggtggaaggtgaggccgagagcatcagttccctgtgcagccaaatcaccaacgcattttcaacccccgaggatcctttctcctccgcccctatgactaagccagtcacggtggttgcccctcaatccccgacctttcaagcaaatgggacagattccgctttccacgtgctcgctaaaccagctcataccgcattggcacctgtggccatgccagtacgtgagactaatccatgggcccacgcaccggacgcagctaacaaagagattgcagccacatgttctggcactgaatggggtcagagctccggggcagctagcccaggactgttccaggccggccataggcgcactccctcagaagctgatcgctggttagaagaggtgagtaagagtgtgcgggcgcaacaacctcaagcatctgccgcccctttgcagccggtcctgcagcctccgccccccaccgctatctcgcagcccgccagccctttccagggaaacgctttcctgacctcccagcctgtgcctgtaggtgtcgtgcctgctctgcagccagcattcgttccagcacagtcatacccagtggctaatggcatgccataccccgctccaaacgtgcctgtagtggggatcaccccttctcaaatggtcgcgaatgttttcggaaccgcgggacacccccaggccgcccaccctcaccagagcccatcactggtccggcagcaaaccttcccacactatgaggcctcatcagcaaccacctcaccattcttcaagcccccagcccagcacctgaacggctctgcagcttttaatggcgttgacgatggccggctagcatctgcagaccggcataccgaggtacccacaggtacttgccctgttgaccctttcgaagcacaatgggccgcgctggagaataagtccaaacaacgcacaaacccttcaccaaccaatcccttttctagcgatctgcagaagacatttgaaatcgagctttag

SEQ ID NO: 198036 - DNA, 1812 bp, synthetic construct
  misc_feature 1..1812: note = Description of Artificial Sequence: Synthetic coding sequence
  source 1..1812: mol_type = other DNA
atgaacaagctgcggcagagcttccggcggaagaaggacgtgtacgttcctgaggcatctcgcccgcatcagtggcaaaccgatgaagagggcgtgcgaacaggaaaatgcagcttcccagtcaaatatcttggtcacgttgaggtggatgaatcacggggaatgcatatctgtgaggacgcagtaaagcggttgaaagctgagagaaaattttttaagggattcttcgggaaaactgggaagaaagcagtgaaagccgttctctgggtgtctgcagatgggttacgtgtggtcgatgaaaaaactaaagaccttatcgtcgaccagactattgaaaaagtgtctttttgcgcaccagaccggaatttcgaccgcgcattctcttacatatgtcgggatggcactactaggaggtggatctgtcattgcttcatggccgttaaggacacaggtgaacggctgagtcacgcagtggggtgcgcgtttgcagcctgcctggagagaaagcagaaacgcgaaaaggagtgtggcgtgaccgcaacctttgatgcttcccgtacaaccttcacacgagaggggagctttcgtgtgacaacagccaccgagcaagcggagagggaggagatcatgaagcagatgcaggatgctaaaaaggccgagacagacaagattgttgtgggatccagcgtggctcctggcaatacggctccatctccttcctccccaacgagccctacatctgacgccaccacctcgctagagatgaataatccccatgcaataccccgccggcatgctccgatcgagcagctggcaagacagggatcgttccggggattccctgctttatcacaaaagatgagtcctttcaagcgccagctgtctctccgaatcaatgaattgccgtcgacaatgcagaggaagaccgacttcccgatcaaaaatgccgttccggaagtggagggcgaagctgaaagcatatcgtcgttatgctcccagataaccaacgctttctccacacctgaggatccctttagcagcgctccaatgactaagccagtaactgtcgtggccccacaaagcccaactttccaagggactgagtggggccagtcatccggagcagcaagtccaggacttttccaggccggccacaggaggacaccgtcggaagcagatagatggttggaagaagtttccaaaagcgtgagggcccaacagccccaagctagcgcagccccgttgcagcctgtgctgcagcccccccctccaactgctatcagtcagcccgcgtctccgttccagggtaacgctttcctcacttctcaacccgtgccagtgggggtggtgcctgctctgcagcctgcatttgttcccgcacagagttaccctgttgctaatggcatgccctatcctgcccccaacgtgcccgtcgtgggtataactccgtcacagatggtggcaaacgtatttggcactgcaggccacccccaagctgcccatcctcaccagagcccgtccctagttaggcagcagacattcccccattacgaggcgtccagcgcgactactagcccgttttttaagccacccgcccagcatctcaacgggagcgcagcctttaatggagtcgatgacggaaggcttgcttcagctgatcgtcatacggaggtgccaaccgggacttgccctgtggacccattcgaggcacagtgggccgcactggagaataagagtaaacagcggaccaacccctctccaactaacccctttagttccgatcttcaaaagacattcgaaatagaactttag

SEQ ID NO: 198037 - DNA, 1923 bp, synthetic construct
  misc_feature 1..1923: note = Description of Artificial Sequence: Synthetic coding sequence
  source 1..1923: mol_type = other DNA
atgaacaagctgcggcagagcttccggcggaagaaggacgtgtacgtccccgaagcctccaggcctcaccaatggcagaccgatgaagagggggtgagaactgggaagtgttcttttccagttaagtacctggggcacgttgaggtagacgagagccggggtatgcacatttgcgaggatgctgttaaaaggctgaaggccaccggcaagaaggccgttaaagctgtcttgtgggtcagtgccgacggtctgcgcgtcgtggatgagaagaccaaggacctgattgtagatcagactattgaaaaagtctccttctgtgcaccagataggaatttcgatagggccttcagctatatctgccgagatgggaccacccggcggtggatctgtcattgttttatggccgtcaaggatacaggggagcgcctgtctcacgccgtcggttgtgctttcgcagcctgcctggagcggaagcagaaaagggaaaaagagtgcggagtgaccgctacttttgacgcctctcggacaacgttcacaagggaggggtctttccgcgtgactactgctacagagcaggcagaaagagaggagataatgaagcaaatgcaggacgcgaagaaggccgaaactgacaaaatagttgttggttcctccgtcgcccccggtaataccgcccccagtccgtcaagtcccacctcccctaccagcgacgcgactacgtcactggagatgaataaccctcatgccatccccagacggcacgcacctattgagcagctcgccaggcaaggcagctttagagggttccccgccctcagtcagaagatgtcgccattcaaaagacagctgagtctgagaatcaacgagttgccatcaaccatgcaaagaaaaaccgactttcctataaaaaatgcggtgccagaggtggagggggaagccgagtcaattagttctctctgtagccagattacaaatgcattctctacaccggaagaccccttcagcagtgcccctatgactaaaccggtgaccgtcgtcgctccccagagccctaccttccaggcgaacggaaccgacagcgctttccatgtactcgctaaaccagctcatacggccttagcaccggttgcgatgcctgttcgtgaaaccaacccatgggctcacgctcccgatgctgctaataaagagattgctgccacttgcagcggaacagagtgggggcaaagttccggcgccgcctctcccggtttattccaagctggacacaggagaaccccatccgaagctgaccgctggctagaagaagtgtccaagagcgtgcgtgcacagcagcctcaggcatctgcggcacctctacaacctgtacttcaaccacccccacctacagcgatatctcagccagccagcccattccagggcaacgcatttctgacctctcagccagtaccagtcggcgtcgtgcctgcgttacagcccgcctttgtacctgcccagagctaccccgtggcaaatggaatgccctaccctgcaccaaatgttccagtggtagggatcactccgtcacagatggttgccaatgtcttcggtacagctggacacccccaagccgcacatcctcaccaaagcccgagcctggttcggcagcagacattcccgcattatgaagccagcagcgctacaactagcccgttcttcaagcctcctgcccagcatctgaatggttcagcagcctttaacggggtggacgatggccgcttggcctctgctgatcgacataccgaggtaccgacaggcacctgccccgtggatcctttcgaagctcaatgggcagcactcgaaaacaagtctaagcaacggaccaacccctctcccacaaatccctttagttccgatctccaaaagacttttgagattgagttgtag

SEQ ID NO: 198038 - DNA, 1518 bp, synthetic construct
  misc_feature 1..1518: note = Description of Artificial Sequence: Synthetic coding sequence
  source 1..1518: mol_type = other DNA
atgaacaagctgcggcagagcttccggcggaagaaggacgtgtacgttccagaggcttcccgtcctcaccagtggcagactgatgaggagggcgtaagaacaggtaagtgctctttcccggtgaagtacctgggccacgtggaggtggacgagtctcgaggcatgcacatctgtgaagacgctgtgaagcggttgaaggctgagcgtaaattctttaaaggatttttcgggaagacaggaaagaaggccgtgaaggcagtactgtgggtcagcgctgatgggttgcgcgtggttgacgaaaaaacaaaggatcttattgtcgaccagaccatcgagaaagtctctttctgcgctcccgatagaaattttgatcgagccttttcatatatatgtagggatggtacgacacgtaggtggatttgtcattgcttcatggctgtgaaagacaccggtgagcgtctgtctcatgccgttggatgtgctttcgccgcttgcctagaaaggaagcagaaacgcgaaaaagagtgcggagtcaccgcaacctttgacgcctcccggaccacattcacccgagaaggaagcttcagagtgacgacagccacggaacaagccgagagggaggaaataatgaagcagatgcaagacgctaagaaggtgccagaggttgagggtgaagccgagtccatatcctccctctgttcgcagattaccaatgcgtttagcacccctgaggaccctttctcttccgcaccaatgaccaagccagtgacagtggttgctccacagtctcccacatttcagggaaccgagtgggggcagtctagtggggccgcgagcccaggtctttttcaagccggacaccgccgcacgccgtccgaagcagatagatggcttgaagaggtctccaaatccgtgcgtgcccagcagccacaggcttctgctgctccactgcagccagtacttcagccccctccgcctactgccatctcccagcctgctagccctttccagggaaatgcattcctgactagccagcctgtgcccgtaggtgttgtacctgctcttcagccagccttcgtccctgctcagtcttatccagtggctaatggcatgccatatcccgcgccaaacgtgccagttgtggggatcacgccttctcagatggtggccaatgtttttgggacagccggccacccacaggcagcacatccacaccaatctccaagcttagtgcggcagcagacctttccccactatgaagcttcctccgcaacaactagtcctttctttaaacctcctgcccagcacttgaacggttctgccgccttcaatggcgtggatgatggacgtctcgccagcgccgataggcatacagaagtgccaacaggaacctgcccggtggaccccttcgaggctcaatgggccgccctagagaataaaagtaaacaacggacaaatccctctccaaccaacccattctcaagcgacctgcaaaagacctttgagatcgagctgtag

SEQ ID NO: 198039 - DNA, 1923 bp, synthetic construct
  misc_feature 1..1923: note = Description of Artificial Sequence: Synthetic coding sequence
  source 1..1923: mol_type = other DNA
atgaacaagctgcggcagagcttccggcggaagaaggacgtgtacgtgccggaggcctctcgccctcaccaatggcagacagacgaagagggcgtgcgcacaggtaagtgctcttttccagtgaagtatctcggacacgtggaagttgatgagtctcgaggcatgcacatttgtgaagacgcagttaaacgcctgaaagccaccggaaaaaaagctgtaaaagcagtgctgtgggtgagcgcggacggcctgcgcgtggtagacgaaaagaccaaggatctcatcgtagatcagacgatcgagaaggtcagcttttgcgccccagaccggaatttcgacagggcgttctcttacatttgccgtgatggcaccactagaaggtggatctgtcattgctttatggctgttaaggacaccggggaacgactgagtcacgcggttggctgtgcttttgccgcctgtctggagcgaaaacaaaagcgagaaaaggagtgtggcgttacagccacttttgacgctagtcgcaccacattcacaagggagggcagcttcagggtgacaaccgcgaccgagcaggcagaacgggaagagattatgaaacaaatgcaagatgcgaagaaggccgagaccgacaagattgtcgtgggctcgtctgtggcgcccggcaacacggccccctcgcctagtagtccaacctccccaacgtccgatgcaactacttccttggagatgaacaatccacacgcaatccctcgcagacatgccccaattgagcagcttgcccggcaggggtcctttcgaggcttcccagctttgagtcaaaaaatgtccccctttaagaggcagctttccctgcgaatcaacgaacttccttccaccatgcagaggaagactgactttcccattaagaatgcagtgcccgaggtcgagggagaggctgagagtattagctccctttgcagccagattaccaatgcttttagtaccccagaggatcccttcagcagcgcccccatgacaaagccagtgaccgtagtcgcaccccagagtcccacctttcaagcaaacggcaccgattctgccttccatgtgctggcgaaacccgctcacacagcactggctcccgtagccatgcccgttagagaaacaaatccatgggcccatgcgcccgacgctgcaaacaaagagatcgctgctacctgctctggcaccgagtggggccaaagcagcggggccgcgtctcccggcctgttccaggctggacacagaagaaccccctccgaggccgaccgttggctggaggaggtttccaagagcgttagggctcagcagcctcaggcaagtgcggcacctttacagcccgtactccagccccctccacccactgccatcagccagccagctagtccctttcaggggaatgcctttctcacaagtcagcctgtgcccgtcggcgtggtcccagctctccagcctgcctttgtgcccgcccagtcttacccagttgcgaatggtatgccttatcctgctcccaacgttcccgtggtggggatcaccccgtcacaaatggtggctaacgtcttcgggaccgccggccaccctcaagctgctcaccctcatcagagccccagtcttgtacggcagcaaacgtttcctcactacgaagcatcctcagccaccaccagtccattctttaagcctccggcccagcatctgaatggcagtgcggcgttcaacggtgtggacgacggaagactggccagcgctgatagacacactgaggtgcccacaggcacatgtcctgtcgaccctttcgaggctcaatgggccgctttggagaacaagtccaaacaaagaacaaacccatctccaacgaatcccttctccagtgatctacagaaaacatttgagattgagctgtag

SEQ ID NO: 198040 - DNA, 1371 bp, synthetic construct
  misc_feature 1..1371: note = Description of Artificial Sequence: Synthetic coding sequence
  source 1..1371: mol_type = other DNA
atgaacaagctgcggcagagcttccggcggaagaaggacgtgtacgtaccagaggcgtcccgtccacaccagtggcaaaccgatgaggaaggggtcaggactggaaaatgcagttttcccgtgaagtatctgggccacgtcgaagtcgacgaaagtcgcggcatgcacatctgcgaggacgcagttaagaggttaaaggctgagcgcaagttcttcaaaggcttctttggcaagaccggaaaaaaggcagtgaaagctgtactctgggtgagcgccgatggcctgagggtagtggatgaaaagacgaaggatctcatcgtcgaccagaccatagaaaaggtgagtttctgcgccccggacagaaattttgatagagcattttcatatatctgcagagatgggactacgaggagatggatatgccattgtttcatggcagtgaaagacaccggggaacgtctgtcccatgcagttgggtgcgcgttcgccgcctgcttggagaggaagcaaaagagagaaaaagagtgtggggtgacagcgacgtttgacgcctcacgaacgacgtttacccgagaggggagcttcagagttaccacggccactgagcaggcagagagagaggagatcatgaagcagatgcaggacgccaaaaagggtactgaatggggacagtccagtggagcagcatccccgggactatttcaggccgggcatcggcgcactccctccgaagccgataggtggctggaagaggtttctaaaagcgtgagggcccagcagccacaggctagcgctgccccactgcagcctgtgcttcaaccgcctccccccaccgccatttctcagcctgcatcacccttccagggcaacgcctttttaacctcccagcctgtgccagtcggagtggtccccgctctgcagccagccttcgttcccgcccagagctaccctgtagcaaacggaatgccgtaccccgcgccaaatgtacccgtggtcggcattacacccagtcagatggtagctaacgtttttgggaccgcagggcacccccaggccgcccatcctcaccaatcccctagtctagtaaggcagcaaacatttccccattatgaggcaagttctgccacaacgtctcctttttttaagccccctgcccaacatctgaatggttctgcggcatttaacggggttgacgatggcagactcgcctccgctgatcggcacaccgaagtgcctaccggcacttgtccagtggacccattcgaggcacagtgggcagcccttgagaacaaaagcaagcagcgcactaacccgagtccaacgaatccttttagtagcgacttacagaaaaccttcgagatagaactttag

SEQ ID NO: 198041 - DNA, 777 bp, synthetic construct
  misc_feature 1..777: note = Description of Artificial Sequence: Synthetic coding sequence
  source 1..777: mol_type = other DNA
atgaacaagctgcggcagagcttccggcggaagaaggacgtgtacgtccccgaggcctcacggccacatcagtggcagacagacgaggaaggagtaaggaccggtaaatgttcattccccgtcaagtaccttggccatgtcgaagtggacgaatcccggggtatgcacatctgcgaggacgctgtgaagaggttgaaggccgaaaggaaattttttaaagggttttttggtaaaacaggaaaaaaggctgtgaaagctgtgctctgggtgagtgctgacggactacgggtcgtggacgagaagactaaggatctgatagtcgatcagacgattgaaaaagtgtctttttgtgcgccagaccgtaattttgaccgggcctttagctacatttgccgagacggcacgactagacgctggatctgccactgcttcatggccgtgaaagataccggagagaggctttcccacgcggtgggctgtgcattcgccgcttgcctggaacggaaacaaaagcgcgagaaagagtgtggcgtgaccgcaacatttgatgccagtcgaacaacttttacgcgggagggaagcttcagagtgacgactgctaccgagcaggcagaaagggaagagataatgaagcagatgcaggatgctaagaaggccgaaacggacaaaatagtggtcgggagcagcgtcgcccccggcaataccgccccctctccatcttcacctacatctccaactagtgatgcaacgaccagtttggaaatgaacaacccctag

SEQ ID NO: 198042 - DNA, 1779 bp, synthetic construct
  misc_feature 1..1779: note = Description of Artificial Sequence: Synthetic coding sequence
  source 1..1779: mol_type = other DNA
atgaacaagctgcggcagagcttccggcggaagaaggacgtgtacgtacccgaagccagtcgtccccaccaatggcagaccgatgaagaaggggtgcgtacaggcaaatgcagcttcccagtcaagtacttagggcacgtggaggtcgatgagtctagaggcatgcacatatgtgaggacgccgttaaaaggctgaaggccacaggcaaaaaggccgtgaaagccgtattatgggtgagcgctgatggactgcgagtggtagacgagaagactaaggacctcattgtggatcagaccatagagaaagtgagcttctgtgcccccgatcgaaactttgaccgggccttttcatacatttgcagggatgggaccaccagaagatggatttgtcattgttttatggcggttaaggacactggtgagcgtctcagtcatgccgtgggctgcgcgtttgctgcttgtctcgagcgaaagcagaaacgagagaaagagtgtggggttactgcaacatttgatgcctctcgcacaacctttactcgggaggggagttttcgggttactacagctacggagcaggccgagcgcgaggagatcatgaagcagatgcaggatgccaagaaggccgaaactgacaagatcgtggtcggaagttcagtcgcccccggaaatactgccccctctccctctagtcccacatcaccaacctcagacgccaccacttcactggagatgaataatcctcatgccatcccgcgtagacatgctcccatcgagcagttggcccgacagggctcattcagaggctttcccgcgctaagccaaaaaatgtccccatttaagcgccagctgtcactgcgcattaatgagctccctagtacaatgcagagaaagactgacttcccaatcaaaaatgccgttccagaagtggagggtgaggcagaatctataagttccctatgttctcagatcactaatgcctttagcactcccgaggacccattttcaagtgcccccatgaccaagccagtgacggttgtcgctcctcagagccctacgtttcaaggaaccgaatggggccaatcctccggagctgccagtcccggattatttcaggcagggcatcgacgcaccccgagcgaggcagacaggtggctcgaagaggtcagtaagtccgttcgcgcacagcagccccaagcatcggccgctccattgcagccagtactccagcctcctccgcccacagcaatttcccagcctgccagtccatttcagggcaatgcattcctcacctcgcaacctgtaccagtgggcgtggtacctgccttgcagccagcctttgtcccggcacagagctacccggtcgcaaatggcatgccctatcccgcaccgaatgtccctgtggtgggtattacaccctcccagatggttgctaatgtgttcggaacagcaggccatccacaagccgcgcatcctcatcaaagccccagtttagtgcgccagcagacgttcccccactatgaggcatcatccgctaccaccagccctttttttaagcctcctgcccaacatctgaatggttccgccgcctttaatggggttgatgatggcaggctggcctccgcagatcggcatactgaggtgccaacaggaacttgtcccgtggacccctttgaagcgcagtgggctgctctggagaacaaatccaaacagcgaaccaatccctcacccactaacccgttttctagtgatctccagaagactttcgagatcgagctgtag

SEQ ID NO: 198043 - DNA, 204 bp, synthetic construct
  misc_feature 1..204: note = Description of Artificial Sequence: Synthetic coding sequence
  source 1..204: mol_type = other DNA
atgaacaagctgcggcagagcttccggcggaagaaggacgtgtacgttcccgaggctagcaggccgcaccagtggcagacggatgaggaaggggtgcgcacaggtaagtgcagctttcctgtcaaatacctgggccacgtggaagtcgatgaatctagagggatgcacatatgcgaggatgccgttaagcgcctcaaagcatag

SEQ ID NO: 198044 - DNA, 1956 bp, synthetic construct
  misc_feature 1..1956: note = Description of Artificial Sequence: Synthetic coding sequence
  source 1..1956: mol_type = other DNA
atgaacaagctgcggcagagcttccggcggaagaaggacgtgtacgtcccggaggctagccgtccccatcagtggcagacagacgaagagggagtgaggacaggaaagtgttcctttccagtaaaatatctaggacacgtcgaggtcgacgagagtcggggcatgcacatttgtgaggacgccgtaaaacggttgaaagccgaacgcaagttctttaaaggtttctttggcaagaccggcaaaaaagctgtaaaggcggtattgtgggtctccgcagacggactccgcgttgtggatgaaaagaccaaggatctgatagtggaccagacgatcgagaaagtaagcttttgtgccccggatcgtaactttgatcgggcgttctcctacatctgtcgtgacggcaccacaagacgatggatttgtcattgttttatggcggtcaaggatacgggagagagattatctcatgccgttgggtgcgcctttgcagcctgtctggagcgcaagcagaaacgtgaaaaggagtgcggagttactgctaccttcgacgcctctagaaccacatttacaagggaggggtctttcagagtcactacagctactgagcaggccgaacgggaggaaatcatgaagcagatgcaggacgctaagaaggcagagactgataagatcgtggtgggctcatccgttgcacccggtaatacagctccaagtccaagcagccctacttcacctacctccgacgctacaacgtcgctggaaatgaacaatccccacgctattccacggcggcacgcccctattgaacagcttgctagacagggcagctttcgaggatttcctgctttatcacagaagatgtcaccctttaaaagacaactgtctttgagaatcaatgaattgccatctactatgcagagaaagactgatttcccaatcaaaaatgccgtcccagaggttgaaggggaggctgagagcatatccagtctctgttcacaaattacaaatgccttttccacacctgaggacccattctcatctgccccaatgacaaaacctgtcaccgtagtcgctccccagtccccaacatttcaggccaacggtactgacagcgcctttcatgtgctcgccaagccggcacataccgctttggcgccagtagccatgccagtgcgagagacgaatccctgggcacatgctcctgatgcagctaacaaggagatcgctgcaacttgctcaggaacggaatggggccagtcttcgggcgccgcttctccaggcctctttcaggccggtcacaggcggacaccatccgaagccgaccgatggctagaagaggttagcaaaagtgtgcgggcccagcagccacaggcctccgctgcccccttacagcctgtactgcagccaccgccacccaccgccatttcccaaccagcgtcaccctttcaggggaatgcctttttaacctcacagccagtccccgtcggagtggtgcccgcgctacagcctgcgtttgttcccgcacagtcctatcctgtcgctaacgggatgccctatccagctccgaatgtaccggtggtcggaattacgcccagccagatggtcgcaaatgtgtttggaactgccggacatcctcaagctgctcatccccaccagagcccatccctagtgcgtcagcaaacttttccccactacgaggcctcatcagcaacaacctcacctttcttcaaaccacccgcccagcacctcaatggttccgctgcattcaacggagtggacgacgggagattggcaagtgccgacagacacaccgaggtgcccaccggcacttgccctgtcgacccctttgaggctcagtgggcggctctggaaaacaagtcaaagcagcgcaccaaccctagccccacaaacccatttagttctgatctgcagaaaaccttcgaaattgaactgtag

SEQ ID NO: 198045 - DNA, 777 bp, synthetic construct
  misc_feature 1..777: note = Description of Artificial Sequence: Synthetic coding sequence
  source 1..777: mol_type = other DNA
atgaacaagctgcggcagagcttccggcggaagaaggacgtgtacgttcctgaggcatcccggccccaccaatggcagactgacgaggagggggttaggaccggcaaatgctcattcccagtaaaatatctgggacatgtagaggtggatgaaagtaggggtatgcacatctgcgaggacgctgtaaagcgcctcaaggccgagcgtaagttctttaaaggtttttttggaaaaacagggaagaaagcagttaaagcagtcctgtgggtaagcgcggatgggctgagggtagtcgatgagaagactaaagatctgatagtggaccaaactattgagaaagtgagtttttgcgcccccgaccgaaatttcgaccgtgccttttcttatatctgcagagacgggaccaccagacgatggatctgtcactgtttcatggccgtgaaagacactggagagcgactcagccacgcggtaggctgcgctttcgctgcctgtctggagcgtaaacagaaaagggagaaggagtgtggggtcacggctacctttgacgcatcccgcactacgtttacccgcgaggggtcttttcgcgtgaccactgccactgagcaagccgaacgcgaggagattatgaagcagatgcaggacgcaaagaaggctgagaccgacaaaatagtggtcggctcctccgtggccccgggaaatacagccccaagccccagtagccctacgtcccccacctctgatgctacaacttccctcgagatgaacaacccttag

SEQ ID NO: 198046 - DNA, 1812 bp, synthetic construct
  misc_feature 1..1812: note = Description of Artificial Sequence: Synthetic coding sequence
  source 1..1812: mol_type = other DNA
atgaacaagctgcggcagagcttccggcggaagaaggacgtgtacgtgcctgaggcgtcccggccgcatcagtggcagaccgatgaagaaggcgtacgtaccgggaaatgctccttccctgttaaatacttagggcatgtagaagtagacgaaagcagggggatgcatatctgtgaggacgctgtgaaacgtctgaaagccgagaggaagttcttcaagggatttttcggaaagacagggaaaaaagcagtaaaggccgtgctctgggtgtccgctgacggcctgagagtggtggacgagaaaaccaaagatctcatcgtggatcaaaccattgagaaggttagtttctgtgcaccagatcgcaactttgatcgtgcattttcatacatctgcagagacggcactacgaggcgatggatctgccactgcttcatggcagtgaaggataccggagagaggctgagccatgccgtggggtgtgcatttgcagcctgtctcgaaaggaaacaaaaaagagagaaagaatgtggcgtaacagctacttttgatgcatccaggaccacatttactagagagggtagctttcgggtgaccactgcaacagaacaggccgaacgcgaggagattatgaagcaaatgcaagatgccaagaaggcagagacagacaagatagtagttggctcctcagttgcccctggtaacacagcccccagcccttccagcccgacttcccccacctctgatgccaccactagcctcgagatgaacaacccgcacgcaatccccaggcggcacgctcccatagagcaactcgcccggcagggatcatttcgaggctttcctgcattgagtcagaaaatgtcaccgttcaaacgccagctctccctgcggatcaacgaactgccttccactatgcagcggaaaactgatttcccaatcaaaaacgctgtcccagaagttgagggggaggccgagagcatcagttcattatgctctcagataactaatgccttttctacacctgaagatcccttttcaagtgctcctatgactaagccagttacagtggtggctccccagagcccaacgtttcaaggaaccgaatggggccagtcaagcggcgccgccagtcccgggcttttccaggctggtcataggagaactccctctgaggctgacagatggctcgaagaggttagtaagtcagtccgagcccagcaaccccaagcgtcggccgccccactccagccggtcctccagcctccaccaccgaccgcaatttctcagcctgcaagcccatttcaagggaatgcatttctgacgagccagccagtgcccgttggagttgtgccagcacttcagccagcgtttgttccagctcagagctatcctgtcgcaaacggcatgccatatccagctccaaacgttcctgtcgtgggcattaccccatctcaaatggtagctaacgtgtttggtacagcgggacatccccaggccgcgcacccacatcagtcccccagtctagtcaggcagcagacattccctcattatgaggctagttctgccaccacttccccttttttcaagccacccgcccagcacttaaatggaagcgccgccttcaacggggtcgatgacgggcgactggcttctgctgatcgtcacactgaggtgcctacaggaacctgcccagtggaccccttcgaggcccagtgggctgccctcgaaaataagagcaagcagcgcaccaacccttccccaactaaccccttctcgtctgacttgcagaagacatttgaaatcgagctgtag

SEQ ID NO: 198047 - DNA, 1923 bp, synthetic construct
  misc_feature 1..1923: note = Description of Artificial Sequence: Synthetic coding sequence
  source 1..1923: mol_type = other DNA
atgaacaagctgcggcagagcttccggcggaagaaggacgtgtacgtgcccgaggcgtccagaccacaccagtggcagacagacgaggagggcgtacgcacagggaagtgctcttttccagtgaaatacctcggtcatgtcgaagttgacgaatcccggggaatgcacatctgcgaggatgccgtgaaacggcttaaggctaccggaaaaaaggcagtgaaagctgtactgtgggtttccgctgatggtctgagggttgtggacgagaagactaaagatctgatagttgaccaaaccattgaaaaggtctctttctgcgcccctgaccggaattttgacagggctttctcctacatttgtagagatggtaccactagacgctggatctgtcattgcttcatggcagtgaaagacaccggggaaagactgtcacacgctgtagggtgtgctttcgccgcctgtctggagaggaaacagaagagagagaaggagtgcggtgtcaccgccacctttgatgcgtccaggaccacttttaccagggagggcagcttccgtgtgacaaccgccaccgagcaggccgagcgtgaagaaattatgaaacagatgcaagacgccaaaaaagcagagacagataagattgtcgtcggatcctccgtggcccctggaaataccgcaccaagccccagttcacccaccagtccaacatctgatgccaccacatcccttgaaatgaacaatccacacgctattccgagacggcacgctcctatcgagcagcttgcaagacagggctcttttcgcggctttcccgccctgagccaaaaaatgtctccatttaaaaggcagttgtccctaagaattaatgagttaccctccaccatgcagcgcaagaccgacttccccattaagaacgccgtgccggaagttgagggggaagcagagtccatttcctcattgtgttcccagatcactaatgctttcagtacccccgaggacccctttagttcagcccccatgactaagcccgtgaccgttgttgctccacaaagcccaacattccaggctaatgggacggattctgccttccatgtgctggcgaagcctgcacacaccgcgttggcgcccgtggccatgcccgtgcgtgaaacaaacccctgggcccacgccccagatgcggcaaacaaagaaattgccgccacatgctccggcaccgagtggggccagagttcgggtgctgcttctcccgggctgtttcaggcgggacaccgcaggaccccttctgaggctgacaggtggttagaagaggtctctaagagcgtgagggctcagcagcctcaagccagcgcggctcccctgcaaccagtgctgcaacctcccccaccaacagccattagccagcccgcctcaccattccagggcaacgccttcctaacctcgcagcctgtccccgtgggtgtggtgccagcactgcagccagccttcgtacctgcccaaagctacccagtagcaaatggaatgccttatccagcacctaatgttccagtggtgggcatcacacctagccagatggtcgccaacgtttttggtacggctggacacccgcaggccgcacatccccatcagtctcctagtcttgtgcgacaacagacctttccacactatgaggcatcatccgcgaccacgtctcccttcttcaaacctccagcccaacacctcaacggctcagctgcatttaacggtgtcgatgacggcaggctggcatccgccgacaggcataccgaggtacccaccggcacatgtccagtcgatccatttgaggcccagtgggccgcacttgagaacaaatccaaacagcggaccaatccctccccaactaaccctttcagcagcgacttgcaaaagacatttgaaattgaactctag

SEQ ID NO: 198048 - DNA, 1830 bp, synthetic construct
  misc_feature 1..1830: note = Description of Artificial Sequence: Synthetic coding sequence
  source 1..1830: mol_type = other DNA
atgagccggagcgccgccgccagcggcggcccccggcggcccgagagacatctaccacccgccccttgcggagcacctggaccgccagagacatgcagaaccgagcccgatggagctgggactatgaacaaactccgacaaagtttgcgccggcgcaagcccgcatacgtgccagaggctagcagaccacatcagtggcaggcagatgaggacgcagtgcgcaagggcacttgttcgtttcccgtcaggtatttaggacacgtagaagtcgaggaaagccgaggtatgcacgtttgcgaagacgctgtgaaaaaacttaaggcaatggggagaaagtcggtcaaatcggtgctctgggtgtctgccgacggcttgcgtgtcgtcgacgacaaaacgaaggacctcttagtagatcagacaatagaaaaggtgtccttctgtgcgcccgaccgcaaccttgacaaagccttcagttacatatgcagggatgggacaacccgtcgctggatctgccactgcttcctagcattaaaagattccggcgaacggcttagtcacgcagtgggctgtgcctttgcagcttgtctggagcgtaagcaacggcgagaaaaggagtgcggggttaccgcagcttttgacgccagtagaacctcttttgccagggagggatcctttcgcctgtccggaggaggccgccccgcagagcgtgaagccccggacaaaaaaaaagctgaggccgcggccgctccgactgtcgcacctggacctgcgcaacccgggcatgtgtcgcctacccccgcgaccactagtccgggagaaaagggagaagccggcacacctgtagccgccggcacgactgcagctgctattccccggaggcatgcacccctagagcaactggtgcgccagggatcgttccgaggcttccctgctctgagccagaaaaactcccccttcaagaggcagctgtcactgaggctcaacgaactgccctccactctgcaacgcagaacagattttcaagtaaaaggtactgtcccagagatggagccccctggcgccggcgacagcgacagcataaatgcactgtgtacgcagatcagcagttccttcgcttcagctggagcccctgccccgggtccacccccagccaccaccgggaccagcgcctggggggagcctagtgtaccacctgctgcagccttccagccaggacataagagaaccccctcagaagctgagcgctggctcgaggaagtgtcacaggtcgccaaagcacaacagcagcagcagcaacagcagcaacagcagcagcagcagcagcaacagcagcagcaggcagcttctgtagcacctgtgcccacaatgccacctgctctgcagcccttcccggctcctgtgggccctttcgatgctgcccctgctcaggttgctgtttttttacccccgccacacatgcagcctcctttcgtacctgcctaccccgggttgggctatcccccaatgcctagggttcctgttgtcgggattacaccatctcagatggtggccaatgccttttgcagcgcagcccaactgcagccacagccggcaaccttattagggaaagctggcgccttccctccccctgccattcctagcgccccaggctctcaggcgaggccacgtcctaacggggcgccctggcccccagagcctgccccggcccctgcccctgaactagaccctttcgaagctcagtgggccgctctcgaggggaaggctaccgttgaaaagcctagtaatccattcagtggggatctgcaaaaaacttttgagatcgagctttag

SEQ ID NO: 198049 - DNA, 1707 bp, synthetic construct
  misc_feature 1..1707: note = Description of Artificial Sequence: Synthetic coding sequence
  source 1..1707: mol_type = other DNA
atgaacaagctgcggcagagcctgcggcggcggaagcccgcctacgtccccgaggcctccaggcctcaccaatggcaagctgatgaggatgccgtacgtaagggtacctgtagtttccctgtgagatacttgggccacgtggaggttgaagaaagtcggggcatgcatgtctgcgaggatgctgtgaaaaagctgaaagcaatgggccggaagtctgtcaaaagtgtcctctgggtatctgccgacggccttcgagtagtcgatgacaagactaaggacctgctggtggatcagaccatcgaaaaggtgtcattttgcgcacctgaccggaacctggacaaggctttttcttacatctgtcgcgatggaacaacgaggaggtggatctgccactgtttccttgcgctgaaggatagcggtgaaaggctgagccatgcagtgggatgcgcattcgccgcgtgtctggagcggaagcagcggcgtgagaaggaatgcggtgtgacagccgctttcgatgccagtagaacaagtttcgcccgcgagggatcttttcggttgtccggtggcgggaggcctgctgaacgggaggcccctgataagaagaaagcggaggccgcagccgcccctaccgtggcccctgggcccgctcagccggggcacgtttcaccaactccagccacaacctccccaggcgagaaaggcgaggcgggcacacccgtggctgcagggacgacggccgctgccatccctcggcgccatgccccgctagaacagttggttcggcaaggcagttttagaggatttcctgccctatcacagaaaaattctccatttaaacggcagctgtcactccgtctgaatgagcttccaagcacattgcagagaagaaccgacttccaggttaagggcacagtacccgagatggagccgccaggagcaggcgactctgactctatcaacgccttgtgcactcagatcagctcttcctttgcctcagctggggcgcccgcgccaggcccgccccccgccacaaccggcacttctgcttggggagagccttctgtgccccccgcagcggcctttcagccaggtcacaagcgcaccccctccgaagcagagcgctggttggaagaggtgagtcaggttgcgaaagctcaacagcaacagcagcagcaacaacagcagcagcagcagcagcaacagcagcagcaacaggccgctagcgtcgcccccgttcctaccatgcctccagctcttcagcctttccctgccccggttggtccgtttgacgctgccccggctcaagtcgccgtgttcctccctcctccacatatgcaacctccatttgtccccgcatatcctggccttggatacccacccatgcctagagtgcctgtagtgggaattacgccaagtcagatggtcgccaacgctttctgcagtgccgctcagttacagcctcaacccgccacccttctgggcaaggccggcgcttttccccctccagccattccctccgcaccaggcagtcaagcacggccaagacccaatggggcaccttggccacctgagcccgcgcccgccccagcaccagagttggatcctttcgaggcacaatgggctgctctggaagggaaggcaactgtggaaaaaccaagcaatccgtttagtggtgatctgcagaagacattcgagatcgagctttag

SEQ ID NO: 198050 - DNA, 1446 bp, synthetic construct
  misc_feature 1..1446: note = Description of Artificial Sequence: Synthetic coding sequence
  source 1..1446: mol_type = other DNA
atgaagggccggggcatgctggtgctgctgctgcacgccgtggtgctgggactcccttctgcatgggctgttggcgcatgtgcacgggcgtgtccggctgcttgtgcctgtagcacggttgagcgaggatgctctgtgcgatgcgatcgagccggccttttgagggtcccagccgagctgccctgtgaggcggttagcatcgacctagaccggaatggactccgcttcctcggcgaaagagcatttggaactctcccctccctcagaaggttgagcctccgacataacaacttgtccttcatcacgcccggcgcattcaaaggccttcccaggttggccgagctcaggttagcacataacggcgacctgcggtacctccacgcccggacttttgccgccctctccagattgcggagattggacctcgcagcttgtagactcttttcagtgcctgagcgtctgttggccgaactgccggcactcagggaactcgccgcttttgacaacttatttagacgggtccctggcgcacttaggggcctagccaacctcactcatgcccatctcgaacgaggtcgcatcgaggcggtcgcctcctctagcctccaggggttgcggcgcctgcggagcttatcccttcaggcaaaccgggttagggcggtgcacgcaggcgctttcggggattgcggtgtgctcgagcatctgttgcttaatgataatttgctcgctgaacttccagcagatgcattcaggggtcttcggaggcttcggacattgaatttagggggtaacgcattggatcgggttgctagggcgtggttcgccgatcttgctgaactcgaactgctttacttggaccgcaactcgatcgcattcgtggaagagggagcattccagaacctgagcggtctgttggcccttcatttaaatggtaataggctcaccgtcctggcttgggtagcctttcagccgggttttttcctgggcagattgtttctgtttaggaatccatggtgttgcgactgtcgactcgaatggctcagagattggatggaggggtctggccgagtcactgacgtaccatgtgcatcccctgggagtgtcgcaggcttagacctgagtcaggtcaccttcgggagatcaagtgacgggttgtgcgtcgaccccgaagagcttaacctcactacctcttccccgggaccttctcccgagcccgctgcgaccaccgtgagccggttctccagtctcctatctaagctattagcgccccgagtgcctgtcgaagaggctgccaacaccaccggcggcttagcgaatgcctccctgtccgattctctgtcctcccgtggtgtgggcggtgccggacgccaaccttggttcctcctggcttcctgtcttcttccatctgtggctcagcacgtcgtgtttgggcttcaaatggattag

SEQ ID NO: 198051 - DNA, 1446 bp, synthetic construct
  misc_feature 1..1446: note = Description of Artificial Sequence: Synthetic coding sequence
  source 1..1446: mol_type = other DNA
atgaagggccggggcatgctggtgctgctgctgcacgccgtggtgctggggttaccttcagcttgggccgtgggagcctgcgccagggcgtgtccagccgcatgcgcgtgctctaccgtggaaaggggctgctcagtcagatgcgatcgcgccggcctgttgagagtgccggccgagctgccatgtgaagctgtttccattgatctcgatagaaacggtcttagattcctgggggaaagggcttttgggacgcttccctccttgagaagattaagtctcagacacaataacctgtctttcatcaccccgggcgcctttaaagggctcccacgactggccgaacttagactagcgcacaatggcgatttgcgatacctgcatgctagaacattcgcagccctctccaggctccgacgactcgaccttgccgcttgcagactgtttagcgttccggaacgactgcttgccgagctacccgctctgcgggagctcgcggcctttgacaacctcttccgacgagtacctggagccctgagggggttagcgaacctgactcacgcccacttagagcgcggccgcatcgaagcagtggcctcgagcagcttacaggggctcagacgcctcagatccctcagcctccaagcaaatcgagtgagggccgtgcatgcgggagcctttggcgattgcggggtgcttgaacatttgctgctgaatgataatctgctggctgaactgccagccgatgcgtttagaggactgcgtcgactacggacactgaatctgggggggaacgctctggatcgggtagctcgcgcgtggttcgcagatctagccgagctcgagctattgtacctcgatcgaaatagcatagcctttgtggaggagggtgctttccagaacctgtccggcttattggccttacaccttaacggcaacaggttgactgtgctcgcctgggtcgcctttcagcccggatttttcttgggccggctgtttcttttcaggaatccgtggtgctgtgactgccgattagaatggttacgggactggatggagggatccggacgcgtgaccgacgtgccttgtgcgagtcctggcagcgtggcaggccttgacctttcccaggtgacgtttggcagaagctcagacggcctctgtgtggacccagaggagctcaatctgactaccagcagccccggaccatctcccgaaccagcagcaacaacagtgtcaagattctctagcctgctgagtaagctactggcccctcgggtgccagtggaagaagcagctaacactacaggcggacttgccaatgctagcctgtccgactctctgtcctctcggggggtaggcggggccggtcggcagccctggttccttctggcatcgtgcttgctgccaagcgtggctcaacacgtggtgttcgggcttcagatggactag

SEQ ID NO: 198052 - DNA, 1191 bp, synthetic construct
  misc_feature 1..1191: note = Description of Artificial Sequence: Synthetic coding sequence
  source 1..1191: mol_type = other DNA
atgccccccaagaagggcggcgacggcatcaagcccccccccatcattggacgctttggcacctcactgaagatcggaatcgtcgggctgcccaatgtagggaagtccaccttttttaatgtgttgactaacagtcaggcctctgcagaaaactttcctttttgcactatcgatcctaatgagtccagggtccccgtccccgatgagaggtttgatttcctgtgtcaatatcataagcctgcttccaaaatccctgccttcttgaacgtggtggatatcgccggattggtcaagggggcccacaacggacaaggccttgggaatgcctttctctcacatatctccgcctgcgacggcatctttcacctcacacgggcctttgaggacgatgatatcacacatgtagagggaagtgttgaccccatacgtgacatcgagataatccacgaggaactgcagttaaaggacgaagaaatgattgggccaattatcgataaactagagaaagtggcagttagaggtggggataaaaagctcaaaccggagtatgacattatgtgcaaggtgaaatcttgggtgattgaccagaaaaagccagttaggttttaccacgactggaatgataaggaaatcgaggtgctcaacaaacatctatttctgacttccaagcctatggtgtacctcgttaatttgtctgaaaaagattatatccgcaagaagaacaaatggctgatcaaaattaaggagtgggtggataagtacgaccctggagcacttgtgattccatttagtggcgccttggagctcaagctgcaggagctgtccgctgaggaacgccagaagtatctggaagccaacatgacacagtcagccttgccaaaaataataaaggccggctttgctgcacttcagctggagtatttctttaccgccggccccgatgaagtacgagcctggaccataagaaaaggcacgaaggctccacaagctgcgggtaaaatccacaccgattttgagaaaggctttattatggccgaagtgatgaaatatgaagacttcaaggaagaaggctctgaaaatgctgtaaaggcagccggcaagtatcggcaacaggggagaaattatattgtcgaagacggagacatcatcttctttaaattcaatactccgcagcaacccaaaaagaagtag

SEQ ID NO: 198053 - DNA, 717 bp, synthetic construct
  misc_feature 1..717: note = Description of Artificial Sequence: Synthetic coding sequence
  source 1..717: mol_type = other DNA
atgatcggccccatcatcgacaagctggagaaggtggccgtgcggggcggagacaagaagttgaaaccagaatacgatatcatgtgcaaagtgaagagttgggtcatcgatcagaaaaaacctgtccgtttctatcatgattggaatgataaggagattgaagtgctgaacaagcacctgttcctgacgtccaagccaatggtatatttagtgaacttatccgaaaaggattacatacgcaaaaaaaataagtggttgattaaaattaaagaatgggtcgataaatacgacccgggggctctggtgattcccttcagcggcgcactggaactgaaactacaggaactctccgcagaggaaagacagaagtatcttgaagctaacatgactcagtctgccctgcctaaaataattaaagctggattcgctgctttgcagcttgaatatttcttcacagcgggtcccgatgaagtacgtgcttggacaatccgcaaagggactaaagcccctcaggcagcagggaaaattcacacagatttcgagaaaggattcattatggcggaagtgatgaagtacgaagattttaaggaggaaggttccgaaaatgccgtgaaggccgcaggtaaatatagacagcaagggcggaattacattgtagaggatggcgatattatcttcttcaagttcaatacccctcagcagcccaagaaaaaatag

SEQ ID NO: 198054 - DNA, 1251 bp, synthetic construct
  misc_feature 1..1251: note = Description of Artificial Sequence: Synthetic coding sequence
  source 1..1251: mol_type = other DNA
atgagccggaccttcagcgccaagggcggccgggacctggtggaggggccccaatacctaatgccccctaagaagggcggcgatgggatcaaaccaccgcctataatcgggcgctttggaactagtctcaagatcggaatcgttggccttcctaacgtggggaaaagtacattcttcaatgtgctaacgaattctcaggcatctgcggaaaacttccccttctgcaccatcgacccaaacgaaagtcgagtgccagtcccggacgagaggtttgacttcttgtgccagtaccataaaccggcttcaaaaatccccgcatttcttaacgttgtcgatatagcaggtttggtgaaaggtgcgcacaacggccagggactaggcaatgcgttcctcagtcacatctccgcgtgtgacggtatttttcacctgactcgtgctttcgaggatgacgatattactcatgttgagggcagtgtcgatcccatcagagacatcgagattatacacgaagagttgcaactgaaagacgaggagatgatcggcccgattatcgacaaacttgagaaagtggcagtccggggaggggacaagaaacttaagcccgagtacgacattatgtgcaaagtgaagtcctgggtcattgatcagaagaagcctgtaaggttttatcacgattggaatgacaaggagattgaagtgctaaataaacaccttttccttactagcaagccgatggtgtacctggtgaatctgtcagagaaggactacattcgcaagaagaacaagtggctgatcaaaattaaggaatgggttgacaaatacgatcctggagccctagtgattcctttctctggggcgctcgaactgaaactgcaagagctgtccgcggaggaacgccaaaaatatctggaagcaaatatgacacagtccgcactgcccaagataataaaagctggattcgcagctctgcaattggagtacttttttaccgcaggccccgatgaggtgagagcctggacaattagaaagggcacaaaagccccccaggctgcgggaaaaattcacactgactttgaaaagggttttataatggctgaggtgatgaagtatgaggatttcaaggaagagggcagtgaaaacgcggtgaaagctgctggcaagtacaggcagcaagggcggaattatatagttgaagacggcgatattatatttttcaagtttaatactccccagcagccgaaaaaaaaatag

SEQ ID NO: 198055 - DNA, 351 bp, synthetic construct
  misc_feature 1..351: note = Description of Artificial Sequence: Synthetic coding sequence
  source 1..351: mol_type = other DNA
atgccccccaagaagggcggcgacggcatcaagcccccccccatcatcgggagatttggcactagtctgaagattggcattgtcgggctgcctaatgtcggtaaatccacgttctttaacgtcctgaccaattctcaagccagcgctgagaactttcctttctgtacaatcgatcctaacgagagtcgggtccccgtacccgatgaacgctttgacttcctgtgtcagtatcataagcctgcgtctaaaatcccagccttcttgaacgtggttgatatcgcaggccttgtgaagggggctcataacggtcagggactcggcaatgctttcctgtcccatatatctgcatag

SEQ ID NO: 198056 - DNA, 837 bp, synthetic construct
  misc_feature 1..837: note = Description of Artificial Sequence: Synthetic coding sequence
  source 1..837: mol_type = other DNA
atgccccccaagaagggcggcgacggcatcaagcccccccccatcataggccgcttcggcacctcgttaaagatcggtatcgtcggactccctaatgtggggaagagcacttttttcaacgtactaaccaactcacaggcgagcgccgagaactttcccttctgtacaatcgatcctaatgagtcaagggttccagtgccagacgagcgctttgatttcttgtgtcaataccacaaacccgcctcaaagataccagcatttttgaacgttgttgatattgccggccttgtgaaaggcgcccacaacggccagggcttaggcaacgcattcttaagtcacattagcgcctgcgacggaatcttccatcttacaagggctttcgaagatgacgacatcacacacgtcgaaggcagtgtagatcccatcagagacattgagattattcacgaagagcttcaactaaaggacgaggagatgattgggccgatcattgataagctcgaaaaagttgcagtgagaggcggggataagaaactcaaacccgaatatgacattatgtgcaaagtaaaaagctgggtgatagatcaaaagaaacccgtgaggttttaccatgactggaacgataaggagattgaagtcttgaacaaacacctgtttttgacaagtaaaccgatggtttatcttgttaacttgagcgaaaaagattatatccgaaagaagaacaagtggctgctggagtcaaccgacaacaaggccgagattattctacttaagatggagattttgtcaagctccaacctcactcacctgaataataggcgaagaaataaaatatag

SEQ ID NO: 198057 - DNA, 312 bp, synthetic construct
  misc_feature 1..312: note = Description of Artificial Sequence: Synthetic coding sequence
  source 1..312: mol_type = other DNA
atgatcggccccatcatcgacaagctggagaaggtggccgtgcggggcggagacaagaagcttaagccggaatatgatattatgtgtaaagtgaaaagctgggtcatcgaccaaaagaaaccagtgcgcttttaccacgactggaacgataaggagatcgaagttttaaataagcatctcttcttaacgagcaagcccatggtttatcttgtcaaccttagcgagaaggattatatcaggaaaaagaacaagtggttgatcaaaattaaagaatgggtggacaaatacgatcccggcgccctggtcatctag

SEQ ID NO: 198058 - DNA, 1329 bp, synthetic construct
  misc_feature 1..1329: note = Description of Artificial Sequence: Synthetic coding sequence
  source 1..1329: mol_type = other DNA
atgtgcgagctgagccgggaggacgcccccgtgcggtggtacaaggacgggctcgaagttgaggagagtgaggctttagtgttggaaagagacggccctagatgtaggctggtcctacccgccgcccaacccgaggacggaggagaatttgtatgcgacgcaggagacgactctgctttttttacagtgaccgtgaccgctcctcctgagagaattgttcatccggcagcccgtagcctagatctgcatttcggcgcacctggtcgagtcgagttgcgctgtgaagtcgcccccgccggtagtcaggtgagatggtataaggatggtctggaagtggaggcttccgatgccctacaactcggagcagaaggccccacccgcacccttacattaccgcacgctcagccggaggatgccggtgagtacgtctgtgagacaagacatgaggcgataacattcaacgttatcttggctgaacctcccgtccagttcttggcccttgagaccaccccttctcccctgtgcgttgcccctggcgagccagtagtcctgagctgtgagctcagccgcgccggagcccctgtggtgtggtcacacaacggtagaccagtccaagaaggagagggcctcgagctgcatgcagagggcccccgacgcgtcctttgcatccaggctgcgggtccggcccacgcaggcctgtacacttgtcagagcggcgccgccccaggcgcaccctccctcagttttactgtacaagtcgccgagcctttgttagtgaagctggtgagtgaactgactcccttgaccgtgcacgaaggtgatgatgctaccttcaggtgtgaggtttccccacctgacgcagacgtcacatggttacggaatggtgccgtcgtgaccccagggccgcaggtcgaaatggcccagaacggttcctctcgcattcttactctaagaggctgtcagctgggggacgccggtacagttacgcttagggccggatccacagctacgagtgcacggctgcacgtacgagaaacggaactgctttttctgcggcgcctgcaggatgtgagggccgaggaggggcaggacgtttgtctggaggtggagaccgggagggttggtgctgccggagcagtgagatgggtgagggggggacagcccctgccccacgacagccgtctgtcaatggcccaagatggacatatccatagactgttcattcatggggttattctggccgaccagggaacctacggatgcgagtctcaccacgatcgaacactggctcgcctgtcagttagacgggagtgccctgtactgagctag

SEQ ID NO: 198059 - DNA, 4206 bp, synthetic construct
  misc_feature 1..4206: note = Description of Artificial Sequence: Synthetic coding sequence
  source 1..4206: mol_type = other DNA
atgaaggccagcagcggcgaccagggcagccccccctgcttcctgcggtttccaaggcccgtgagagtggtgtctggagccgaagctgagttgaagtgtgtagtgctgggggagcccccaccggtggtcgtgtgggaaaaaggcggccagcagctcgccgcctctgagcgactatccttccccgccgacggtgcagagcacggactgctgttgactgccgccttaccaactgatgccggcgtgtatgtgtgtagggcccgaaacgctgctggcgaagcatacgcagcagccgccgtgaccgtcctcgagccgcctgcatcagatccagagctccagcccgctgaacggccactaccctcccccggctcgggcgagggggcacccgttttcctgaccgggcctcgctcccagtgggtgctgaggggggcagaggttgttctaacttgccgcgctgggggcctaccagaaccaacactgtattgggagaaagatggaatggcactggacgaggtgtgggactctagtcactttgcactgcagcccggaagggcagaggatggtcccggagcctccctggcgctgagaattctcgcagctagattgcccgactcaggagtctatgtttgccatgctagaaacgcccacggccatgcacaagccggcgctctcctgcaggtgcaccaaccgcccgagtctcctccggccgatccagatgaggcaccggctcccgtagtggagcctctgaaatgcgctcccaagacgttctgggttaatgaaggcaaacatgcaaagttcagatgttacgtgatgggcaaacccgaaccggagattgagtggcattgggagggcagacctctcctgccagatcgacgtcgcctcatgtatcgagaccgtgacggaggcttcgtcctgaaagttctctattgtcaggccaaagacagggggctctatgtctgcgctgcccgcaatagcgcggggcagactttatcagctgtgcagctccatgtcaaggagcctcgcctgagattcaccagacctcttcaggatgtagagggcagggagcacgggatcgccgtgctggaatgcaaagtgcctaactcacggatcccaaccgcctggttccgcgaagatcagaggctgctcccttgcagaaagtacgagcagattgaagaagggacagtcagaaggctgatcatccataggctgaaggcagacgatgacggcatctacctgtgtgagatgcggggtagagtgcgaaccgtggctaacgtgacggtaaagggccccatattaaagagactgccaagaaagcttgacgtgttggaaggagaaaatgctgtgcttctagtggagaccctggaggccggcgtagaaggtagatggtctcgcgatggggaggagctccccgtgatctgccagtcctcctctgggcatatgcatgctctggtattgccgggcgtgactcgtgaggacgccggtgaagttaccttctctttggggaatagccggacgacgaccctcctaagggttaaatgcgtgaagcattctccacctggtcctcctatcctcgccgagatgtttaagggccacaagaataccgtgctgctgacctggaaacctcccgagccggcacctgagacacccttcatttaccgactggagagacaggaggtggggtcagaggactggatccagtgtttttcaatcgagaaagccggcgccgtggaagtgcctggcgactgcgtgccatcagagggagactacagattccggatttgtactgtttccggccacggtcgttcgccccatgttgtgttccacgggtccgcccacttagtcccaactgccagactggtcgcagggctggaagatgttcaggtctacgacggggaagatgctgttttcagtctcgacttgtcgactattattcagggtacgtggttcctgaatggagaagaacttaaaagcaacgagccagaagggcaagtggaacctggtgcactgcggtatcggatcgagcagaaaggactgcaacaccgactgatattgcatgcagtgaaacaccaggacagcggagccctcgtgggtttcagctgccccggggtgcaagattcggcagccctgaccatacaagagagcccagtacacatactctctccacaggatagggtaagtcttaccttcaccacatcagagcgagtggtgttgacatgcgaactgtcgcgggtggactttccagccacttggtataaggacggacagaaagtggaggagagcgaactgctcgtagtgaagatggacggacgaaagcaccgactcatcttgcccgaggctaaagtgcaggattcgggggaatttgaatgcagaaccgagggtgtgagcgcttttttcggtgtcactgttcaggatcctcccgtacacatagttgaccccagggaacatgtcttcgtgcacgctatcacctctgagtgcgtcatgctggcctgcgaggtcgatcgggaagatgcgcccgtgaggtggtataaggacggccaggaggttgaggaatcggacttcgtggtccttgagaacgaaggtccacacaggcggcttgtgctccccgccacccaacctagtgatggcggagagttccagtgcgtggcgggcgacgagtgcgcatacttcactgtgacgatcaccgatgttagtagttggatcgtgtacccaagcgggaaggtgtatgtggccgcggtccggctggagcgagttgtgctcacatgtgagttgtgccggccgtgggctgaggtgaggtggaccaaggacggggaagaggtcgtggaaagtcccgcactcctgctccagaaggaggacaccgtccggagactggtgcttcccgcagtccaactggaggacagtggggaatacctgtgtgaaatcgatgatgaatccgcatctttcacagtgaccgttacggagccacccgtccgcatcatctacccccgggacgaagtcactttgatcgcagtcaccctcgagtgtgtggttctcatgtgcgaactgtctcgcgaagacgccccagtcaggtggtacaaggatggacttgaagtggaagaaagcgaagccctcgttctggagagagatggccctcgctgcaggttggttttgccagctgcccagcccgaggatggcggtgaattcgtgtgcgatgccggcgacgattccgccttttttactgttactgttaccgaaccaccagtgcagtttcttgctctagagaccaccccgtcccccctgtgtgtggcccccggggagcctgtcgttcttagttgtgagctcagtcgcgctggcgcacccgtggtttggtcacataacgggaggcccgtacaggagggcgaaggcttggagcttcacgcagagggcccaagacgggtcctgtgcattcaggccgccggtccggcacatgctggactgtatacatgccagtcaggtgccgcccctggcgccccgagtctctctttcaccgtgcaggtcgctgaacccccggtgcgagtcgttgcacccgaggctgcgcagacacgggtgcgctctacaccaggaggtgacctggaactggtggttcacctctcgggcccaggaggaccagtaaggtggtacaaggatggcgagagattggctagccagggcagggttcagcttgagcaggcaggtgccaggcaggttctccgggtccagggtgcccgttccggagacgcgggtgagtacctatgcgacgccccacaggattcaaggatctttctagtgtcagtggaggaaccgctcctagtgaagctcgtgagcgagttgacccccctcaccgtgcacgagggcgatgatgccactttccggtgcgaggtctcgcctcccgacgccgatgtcacatggctgcggaacggcgcggtggtcacacccggacctcagcgccagtcctgttgttcctatggcggatgtcggatgtgcggacagagaaaggcacgaatgtgcgtcagcaagtggcgccaagcggagtgggtgcagcggggaccatgcgcaggctgtgaagtcggatcaccctgtccgacaacactagcttgcccttggccaagaatggggacctcaacggccagctccagcatggtgagttactggccaacccgcgccccaaccgcagcccgggctacaacaattgcaccgtggccgggatccgcttag

SEQ ID NO: 198060 - DNA, 3078 bp, synthetic construct
  misc_feature 1..3078: note = Description of Artificial Sequence: Synthetic coding sequence
  source 1..3078: mol_type = other DNA
atgaaggccagcagcggcgaccagggcagccccccctgcttcctgaggtttcctagacctgttcgggtggtcagcggagcagaggccgagctgaaatgcgttgtgctgggggaaccccccccagtcgtggtttgggagaaggggggtcagcagctcgctgcttcagaaaggctgtcttttcctgcagatggggccgagcacggtctgctcctgacagccgctctacctactgacgccggcgtctacgtgtgcagggcccgtaatgctgcgggcgaggcctacgctgccgcggctgtcactgttctcgagccacccgcttcggaccccgagctgcaaccagcggaaaggcccttgccctcacctggatctggagagggcgctccagtttttctgacagggccaagaagccagtgggtcctgaggggcgccgaagtggtcctcacctgtcgcgccggagggcttcccgaacctaccttatactgggagaaagatggaatggccttggacgaagtttgggactccagtcacttcgctctgcaaccgggaagagctgaggacgggcccggcgcctccctggctctcaggatcctcgccgcccgcttgcctgattccggggtctacgtgtgccacgccaggaatgcacacggtcatgcccaagctggcgccttgctgcaggtgcatcagccaccagaatcacctcctgctgatccagacgaggcccctgctcccgtcgtcgagcccttgaagtgcgcccctaaaacattttgggtcaacgagggtaaacacgccaaatttcggtgctacgtgatgggaaagcccgagccagagattgaatggcattgggagggacgcccactgctgcccgaccgtaggagactgatgtaccgtgacagggacggtgggttcgtgctgaaagtcctctactgtcaggctaaagaccggggcctctatgtgtgcgccgccaggaacagtgctggacagactttatcagccgtccagctacacgtgaaggaacctcgtctcagattcaccaggcctctccaggacgtagagggccgtgaacacggaattgcagtgcttgaatgtaaggtaccaaatagccggatcccgaccgcctggtttcgggaggaccagcgcttgctcccatgccgaaagtatgagcagatcgaggaggggacagtacggcgattgataatccacaggctgaaagccgacgacgatggaatctatctctgcgagatgcgaggacgcgtaaggaccgtggctaatgtgactgtcaaaggacctattctcaagaggcttccaaggaagctcgacgtgctagagggggagaacgcagtgctgctggtagaaaccctcgaggctggcgttgaggggaggtggagtagagacggtgaggaactgcctgttatttgtcagtcttcttcggggcacatgcatgctctggtcctgcctggagtaacaagggaagacgccggcgaagtgactttctcactgggaaactcccgcacaaccacccttttacgtgtgaaatgcgtgaagcatagcccccccggacctcctatccttgcagagatgttcaaagggcacaagaacaccgttctgctgacctggaagccacccgagcctgcgcctgaaacaccattcatttataggctcgagcgacaggaagtggggagcgaggactggattcagtgtttctcaatcgaaaaagccggagcagtcgaggtccctggggattgcgtcccctcagagggagactatagattcaggatctgtacagtctccggacatgggagatctccccatgtcgtttttcacggcagcgcccatctggttcctactgcccggttggtggcgggactcgaagatgtgcaggtgtatgatggggaggatgcggtgttttccctagatctgtccacaattattcagggaacatggttcttgaatggcgaggagctgaagagtaatgaacccgaaggacaggtggagccaggggccctgcgttaccgaatagagcagaaaggcttgcaacacagactgatactacatgcggtcaaacaccaggactcaggggctctggtcggattttcatgccctggtgtgcaggactctgctgcccttacaatccaggaatctccagtccacattctctccccccaagatagagtgagtctcacttttaccacctccgagcgggtcgtattgacctgcgagctatccagagtggatttccctgctacctggtataaggacggccagaaagtcgaagagagtgagctcctcgtggtgaaaatggatgggaggaaacaccggcttatcctgcccgaggctaaagttcaggattccggcgaatttgaatgtcgcaccgagggtgtgagcgctttctttggggtgacggtccaggaccctcccgtgcacatcgtggatccaagagaacacgtgtttgtgcatgcaatcactagcgaatgtgttatgctagcctgtgaagttgatcgggaagacgcacccgtgcgctggtacaaggatggccaagaggtggaggaaagcgacttcgtcgtcttggaaaacgaagggccccaccgaaggctagtccttccagctactcagccttctgacgggggtgaattccagtgtgtggcaggggacgagtgcgcctacttcactgtgactattacggatgtgtcctcctggatcgtgtatccatccggcaaggtgtatgttgccgctgtgaggcttgaacgcgtcgtgctgacctgcgaactgtgcagaccatgggccgaagtcagatggactaaggacggcgaagaggtcgtggagagcccagctctgctgctccagaaagaggacactgtcaggaggctggtgctgcctgccgtgcagctggaagattcaggcgagtacttgtgtgagattgacgacgaatccgcctcctttacagtaacagtgacagagtcataccagtcacaggactctagtaataacaatccagagctctgcgtgctgctgaaaaagcccaagacaagacggctctggagcagatttcctccatggaggagaactgccggtactgagtag

SEQ ID NO: 198061 - DNA, 5691 bp, synthetic construct
  misc_feature 1..5691: note = Description of Artificial Sequence: Synthetic coding sequence
  source 1..5691: mol_type = other DNA
atgaaggccagcagcggcgaccagggcagccccccctgcttcctgcgttttcccagaccagtgcgcgttgtgagcggagcggaggctgaactcaaatgtgtggtcctgggagagccacctcctgtggtcgtgtgggagaaaggcggccagcagctggctgcgagtgaacgactaagctttccagccgacggcgccgaacacggtctgctgttaactgccgcattgccaacggatgccggggtatacgtgtgccgggccagaaacgccgcaggcgaagcctacgcggctgctgctgtgaccgtgctggagccgccagccagcgatccagaactgcagccagctgaaaggcctttaccctctccaggaagtggcgagggggcaccagtctttctaacaggtcccagaagtcagtgggtgctgaggggtgccgaagttgtcttgacttgcagggctggtggtctccctgaacccacattatattgggagaaggatgggatggccctcgacgaagtctgggattcttcacacttcgctttgcagccaggccgggctgaggacgggcctggtgctagtctggctctcagaatcctcgctgccagactccccgattcaggggtgtatgtgtgtcatgccaggaacgctcatggtcatgcacaagctggagctctgctgcaggtgcaccaaccccccgagtctccccctgctgatccggatgaagcccccgcccctgtggtcgaaccccttaagtgtgcacccaagacattttgggtgaacgagggcaaacacgcaaagtttagatgctatgtcatgggtaagcccgaacccgaaatcgagtggcactgggaaggccgacctttgctgcccgaccgccgcaggcttatgtaccgcgatagggacggggggtttgttcttaaggtgctttattgtcaggcaaaagataggggactctatgtgtgcgccgcccgcaacagcgctggacagacccttagtgccgttcagctccatgtgaaagaaccaagactccggtttactcgccccctgcaggatgtggagggacgagaacatggtattgccgtcctggagtgtaaagtccctaactcccgcattccgacagcttggtttagggaagaccaaagactgttgccatgccgaaaatacgagcagattgaggaggggaccgttaggagactgattatccatcgactgaaggccgatgacgacggaatatacctttgcgagatgcggggcagagtgcgcaccgtagcaaatgtcacagttaaggggcccatcctgaagcgcttacctcgaaagcttgacgtgctggaaggtgagaatgccgtgctcctcgtggagacccttgaggccggcgttgagggtcgatggtcccgcgacggagaggaactacctgtgatttgccaatcaagctcaggccacatgcacgcacttgtgcttccaggcgtaaccagagaagacgccggggaagtgaccttttctttaggcaacagtcggaccacaactcttctgagggtcaaatgtgtcaagcacagcccaccaggcccccctatactggcagagatgttcaaaggccacaaaaacacagtcttgctgacctggaagccccccgagccagctccagagactcctttcatctaccgcctggagcgccaggaagtaggctccgaagattggattcagtgtttttctatcgaaaaagccggagccgttgaagtgcccggcgactgtgtgcctagcgagggagattacagatttcgtatttgcacggttagtggtcatggacgttccccccatgttgtatttcatgggtcagctcaccttgtgcctacggccagactggtcgctgggctggaggatgtgcaggtctatgacggcgaggacgcggtatttagcctggatctcagcaccattatccaggggacctggtttcttaatggtgaagagctgaagtctaatgaaccagaaggccaggtagaacccggcgccctgcgatatagaatcgagcagaagggcctgcagcaccgcttgattctgcatgctgtcaaacaccaggatagcggcgccctcgtgggtttttcctgcccaggcgtgcaggacagcgccgccctgaccattcaggaatctccagtccatatcttgtcgccccaggatcgtgtgtccctgactttcaccacgagtgaacgcgtggtgttgacctgcgaactatcaagagtagacttcccagcaacctggtacaaagacggacagaaggtggaagagtcagagttgctcgtcgtcaagatggacgggagaaagcatcggctgattttgccagaagcgaaagtacaggacagcggtgagttcgagtgccgaacagagggcgtctccgccttcttcggtgttaccgtacaggacccgcccgtgcatatcgtggacccaagggaacacgtgtttgtacacgccatcaccagcgagtgcgtaatgctcgcttgcgaagtggacagggaggatgcaccggtgcgatggtataaagacgggcaagaggtggaggaaagtgactttgttgttctggaaaatgagggaccccatcgccgtttggtattacccgctacgcaacccagtgacggcggcgagttccaatgcgtggctggagatgagtgcgcatacttcaccgtcactattacagacgtgagtagctggatagtgtatccttctgggaaagtgtacgtagccgcagtgcggctagaaagagtggttctgacgtgtgaattgtgccgcccatgggccgaggttaggtggaccaaagatggggaagaggtggttgagagtccggcactcctgctgcagaaggaggatacagttaggcgcctggtcctgcctgccgttcagctggaagatagcggagagtacctgtgtgagatcgatgatgaatccgcgtccttcaccgtcacagttacagaaccaccggtccgcatcatctatccgagagacgaagtgactctcatcgccgtgacacttgagtgcgttgtgctcatgtgtgagctgagtagggaggacgctcctgtaaggtggtacaaagatggcttagaggtagaggaaagtgaagccctggtgctcgagagggacgggccacgctgcaggcttgttctgccggctgcccagccggaggatggaggggagtttgtctgcgacgctggtgacgatagtgcattctttacagtcacagtgacagctcctccagaaagaatcgtgcatcccgccgcacgatccttggatctccatttcggggccccaggccgcgtggagttgcggtgcgaagtggcaccagccggctcacaggtgaggtggtacaaggatggcttggaagtggaggcaagcgacgccttgcagctgggtgccgagggccccacacgtaccctcaccctgcctcatgctcagcccgaggatgctggcgagtatgtgtgtgagactcggcatgaggccataaccttcaacgtcatcctggccgagccgcctgtgcaattcttggctttagagaccacaccttccccactgtgcgtcgctcccggcgagccagtggtgctctcttgcgaactcagcagagccggggctcccgttgtgtggtcacacaacggccggcctgtccaggaaggcgagggactggaactgcatgctgaaggacctagacgtgtgctgtgcatccaggctgctggtccagctcatgccggtctctacacatgtcaatctggggccgctcccggagccccttctttgagctttaccgtgcaggtggcagagcctccagttagggtggtggcccctgaggcggcacagacccgcgttcggtctaccccgggtggagaccttgaactcgttgtgcacttatccgggcctggaggtcctgtccggtggtacaaagacggggagcgtttggccagtcagggtagagtccagctggaacaagcaggcgctcgccaagtgttacgcgtgcagggagcgagatcaggtgacgcaggggagtacctatgtgatgccccccaggactcccgcatcttcctggtgagcgtggaggaaccactcttagttaagctggtgtccgaactcactccactaaccgtgcatgaaggggatgatgccacatttagatgcgaagtgagccccccagatgcagatgtgacctggctacgtaatggagccgtggtgaccccaggcccgcaggtggagatggcccaaaatggctcctcccggatcctgacactgcgaggttgtcagttaggggatgcaggaacagtgacactgagggccggatctaccgctactagtgcgagattgcatgtacgggaaaccgagttactttttcttcggcgcctgcaggacgtcagggccgaagaaggacaggacgtctgcttggaggtcgagactgggcgtgtgggggcggctggcgccgttagatgggtgagggggggccaaccgctgccacacgattcccgcctgtccatggcacaagacggccatatccacagattatttattcacggggtgatcctggccgaccagggtacatatgggtgcgaatctcaccacgatcggaccctcgccaggcttagcgtccgtcctagacagcttcgcgtgctccgcccactggaagacgttaccattagcgaagggggaagcgccaccttccagctcgagctgagccaggaaggggtgaccggggaatgggccagaggtggggtgcagctctacccaggcccaaagtgccacatccatagcgatggacaccgtcatcggcttgtcctgaatggtttaggcttagctgacagcgggtgtgtctcatttacggccgactccctccgctgcgccgcaagactgattgtcagagaggtgcccgtgaccatcgtgcggggcccacatgatctggaggtcaccgaaggcgataccgctacttttgagtgtgagttgtcccaggccctggcggacgtgacttgggagaaggacgggaacgcactcacccctagtcctcggctgcgcctccaggcattggggacccggaggctgttgcagctacgcagatgcggccccagcgacgctgggacgtatagttgtgccgtgggaacggctcgtgctggtcccgtaagactcacagtgcgcgagaggaccgtggcagtgctgtctgagcttcggtccgtatcagcccgcgagggagacggcgctacctttgagtgtactgtttccgaggttgagacgactgggcggtgggaacttggaggcaggccactgagacccggtgcccgggtgcgcatccgacaggagggaaaaaagcatatcctggtcctgtctgagttaagggctgaggatgccggagaggtcagatttcaggcaggcccggctcagtccctcgccctcctggaagtggaggccctccccctgcagatgtgtcggcaccccccaagagaaaagactgtcctagtaggccggagggcagtgctggaggtcactgtttcgcgctctggcgggcatgtttgctggcttagggaaggggccgagctctgccccggggataagtatgaaatgagaagccacggccctacacacagcctggtcattcatgatgtacgccctgaagatcaaggaacctactgttgccaagcaggacaggactcgacccatactcggctcctcgtggagggcaattag

SEQ ID NO: 198062 - DNA, 2682 bp, synthetic construct
  misc_feature 1..2682: note = Description of Artificial Sequence: Synthetic coding sequence
  source 1..2682: mol_type = other DNA
atggagccccccctgcccgtgggcgcccagcccctggccaccgtggaaggcatggaaatgaaagggccacttcgtgagccatgcgccttaacattagcacaaaggaatggccaatatgagctgattatacagctgcacgaaaaggagcaacacgtacaggacattattccaattaattctcactttcgatgcgttcaggaagctgaggaaacactgttgatcgatatcgccagtaactcaggatgtaaaattcgggttcagggggactggatccgtgagaggcgcttcgagattccagatgaagagcactgcctgaagtttttaagtgcagtgttggcagctcagaaagcacagagccagcttctagtacctgaacaaaaagatagcagcagttggtaccaaaaattggacactaaagacaagccttcagtattttcgggtctcctaggcttcgaggacaacttcagcagcatgaatcttgataaaaagattaacagtcagaatcagccgaccggcatccatcgggagccccctcctccccctttctcagttaacaaaatgcttccacgtgaaaaagaggcatctaataaggagcagcctaaggttacaaacactatgcgcaaactcttcgtgccgaatacacagagcgggcaacgggagggtctgattaagcacatcctcgctaaaagagagaaggagtacgtcaacatccagacattcaggttctttgtgggcacatggaatgtgaacgggcaatcgcccgattcaggcttagaaccctggctgaattgtgatccaaatccccctgatatatactgcatcggtttccaggaactggatctgtctacggaggcctttttctatttcgaaagtgtgaaggagcaggagtggtcgatggccgtcgaaagaggcctgcactcaaaggctaagtacaaaaaagtccaactggtccgccttgtgggaatgatgttgctgattttcgcccgcaaggatcagtgcaggtatattagggatattgctactgagactgtaggaactggcatcatggggaaaatgggcaacaaaggcggagttgcggttcgtttcgtgtttcacaacactacattttgcatagtgaacagccatttggcagcgcatgtcgaagacttcgagcgaaggaaccaagactacaaggatatttgtgctcggatgagtttcgtggtgcccaaccagactttgccccaacttaacatcatgaaacatgaggtggttatatggctgggcgatctgaactaccggctatgcatgcccgacgccaacgaagtcaagagcctgattaataagaaggacctgcaacgcctcttgaagtttgatcagttgaatatccagaggacacagaaaaaagcgtttgtggacttcaacgagggtgagatcaaatttatacctacgtataagtacgactcaaaaactgatagatgggactcatctgggaagtgtcgtgtccctgcctggtgcgaccggatcctctggcggggaacaaacgtgaaccagcttaactatcgttctcacatggagttaaaaaccagtgaccacaaacctgtctctgccctcttccacattggtgtgaaagtggtggacgagaggcgttatcgaaaggtctttgaagactccgtgcgtattatggacagaatggaaaacgactttctcccatccctggaattgagcaggcgtgagttcgtcttcgagaatgtgaagtttcgtcagctccagaaggagaaattccagatttctaataacggacaggtgccttgccacttcagctttatacctaagctcaacgattctcagtattgtaaaccctggttgagggctgagccatttgaagggtatctggagcctaatgaaaccgtggacatcagtctggacgtgtacgtaagtaaggactccgtcactattctgaattccggcgaggacaagatagaggacattttggtgcttcatttggatcgcgggaaagactattttctgaccatttccgggaactatttgcccagttgcttcgggacctctcttgaggcattgtgtcgtatgaaaagacctatccgcgaagttcccgttaccaaactaattgatctggagaaaagcctgctacagatggtgcccttggacgagggagcctcagagagacctctccaggtccccaaggaaatatggctgctggtggatcacttgtttaaatatgcctgccaccaggaagaccttttccagacacctgggatgcaggaagaactgcagcagattattgattgtttggatacttccattcctgagacaatccctggttccaatcattctgtcgcggaagccctcttgatcttccttgaagccctgcctgagcccgtgatctgctacgaactgtaccagagatgtctcgattcagcttacgatcccaggatttgtcgccaagtgatctcccagctcccccgctgccatcggaatgtgttcagatatctgatggctttcttaagagagctgttgaaatttagcgaatacaactccgtcaatgctaatatgatcgctaccctgtttacctccctgttgttacggccacctcccaacctcatggcgcggcagacgccgagtgatcgacagcgtgcaatccagttcctgctgggttttctgctaggctcagaggaagactag

SEQ ID NO: 198063 - DNA, 2706 bp, synthetic construct
  misc_feature 1..2706: note = Description of Artificial Sequence: Synthetic coding sequence
  source 1..2706: mol_type = other DNA
atggagccccccctgcccgtgggcgcccagcccctggccaccgtggaaggcatggagatgaaaggacctctacgtgagccctgcgcgctaactctggcgcagcggaacggccagtatgaactgattatccaactccacgaaaaagaacagcatgttcaagacattataccaatcaatagccattttcggtgcgtacaggaggccgaggagacactactcatcgacatcgcatcaaatagcggctgcaaaatcagagtgcagggcgattggattcgggaacgcaggttcgagatccctgacgaggagcattgcctcaagtttctgtccgctgtcctggccgcccagaaggcccagagccaactcctggttcccgagcagaaggacagttcttcttggtatcagaaactggacaccaaggataaaccgtccgtgttttctggtctgctgggctttgaggataattttagttccatgaatcttgacaaaaagattaattcccaaaaccagcctaccgggattcaccgagagccacctcctccccccttttcagtgaataaaatgttgccacgagaaaaggaggccagcaataaagagcaaccaaaagtgacgaacacaatgagaaagctgttcgtccccaatacacagtccggccagagagaaggcctgatcaaacatattctggctaaaagggagaaagagtatgtaaatatacagaccttccggtttttcgttggcacatggaacgtgaacggacaatcaccggacagcggtctggagccctggctcaactgtgacccaaacccacctgacatttattgcataggtttccaggaattggatttatctactgaggcatttttttacttcgagtctgtcaaggaacaggagtggtcaatggctgttgagcgcggcctgcactcaaaggccaagtacaaaaaagtccaactggtgcggctcgtagggatgatgctactgatctttgcacgtaaggaccagtgtaggtacataagggatattgccacagagactgtgggaacgggcattatggggaagatggggaacaaagggggggtggctgttagatttgtgttccacaacaccaccttttgcattgttaatagtcatttagccgctcacgtcgaggatttcgaaaggaggaaccaggactacaaagacatatgcgccaggatgtcattcgtggtgcccaatcaaactctcccccagttaaatatcatgaaacacgaggtggtcatctggttaggcgatctaaattatagactttgcatgccagacgcgaatgaagttaagtcactcattaataagaaggacctgcagcgtctcttgaagttcgatcaactaaacatccagcggacgcagaagaaagcgttcgttgattttaatgaaggtgagattaagttcattccaacatacaaatatgatagcaaaacggatcggtgggactcttctggcaagtgccgagtccccgcctggtgcgacaggattctctggagagggacaaacgttaatcagttaaattatcggtcccacatggagcttaagactagcgaccataagcctgtgtctgccctttttcatataggtgtcaaagtggtggatgagaggcggtatagaaaagttttcgaggactccgtgcggattatggatagaatggaaaatgacttcttaccctcattggaactgagcagaagggagtttgttttcgaaaatgtaaagtttaggcagttacagaaagagaaattccagatcagcaacaatggccaggttccctgccacttttcctttattcctaagctgaatgactcccagtactgcaagccctggttgagagcagaaccgttcgagggatatctggaacctaacgaaacggtggacatatctcttgacgtttacgtatccaaagacagtgttactatcttgaatagcggcgaggacaaaattgaagatattctggtgctgcatctggatagggggaaagattacttcctgactattagtgggaactacctcccatcctgtttcggcaccagtcttgaggccctatgtaggatgaagagacctatccgagaagtgcctgtgaccaaactaattgatttagaagaagatagctttctagagaaagagaaaagcctgctgcagatggttcccttagatgagggggcctccgagcgtcctctccaggttcctaaggagatatggttactggttgatcacttgttcaaatacgcctgtcatcaggaagacttattccagactcccggaatgcaggaggaactgcagcaaatcattgattgtttggatacaagcatcccggaaacaatccccggatctaaccatagcgtcgccgaggcccttctcattttcctggaggctctgccggaacccgtcatctgttacgaattgtatcagagatgtctcgatagtgcttacgatccacgcatctgccggcaagttatatcacagctgccacgctgccaccggaacgtattcaggtacctgatggcctttttgcgtgagctcctgaagttcagtgagtacaacagcgtgaacgctaatatgatagccaccctgttcacctctctgttacttagacccccccccaaccttatggcccgacagactcccagcgatagacagcgcgccatccagttcttgttgggttttctgttaggctcggaggaggattag

SEQ ID NO: 198064 - DNA, 2445 bp, synthetic construct
  misc_feature 1..2445: note = Description of Artificial Sequence: Synthetic coding sequence
  source 1..2445: mol_type = other DNA
atgcacctggagggccgggacggccggcggtaccccggcgcccccgcagtagagctgctgcagactagtgtcccctccggtctagccgagctcgtggcagggaaaaggaggttgccccggggtgctggcggcgcggacccaagccatagctgtccgagaggggccgcaggccagtcctcttgggcacctgccgggcaagagtttgcctctttcctgaccaaaggaagatcccattcttcactaccgcaaatgtcttcgtccagaagcaaggacagctgcttcactgaaaacactccactactgaggaactccctgcaggaaaaaggcagccgctgtataccagtctaccatccggaatttatcaccgccgaagagagctgggaggacagttcagctgactgggaacgtcgttacctactgtcccgagaggttagtggattgtctgcctcggcttcatccgagaagggggatctccttgactcgccccatatcagactgcgattgagcaaactgcggcggtgcgtgcaatggctgaaagttatgggactcttcgctttcgtggtgctgtgttccattctgtttagcttatatcccgaccaggggaaactgtggcagctgctggctctctcaccactggagaattactctgtcaatctgtcttcacacgtcgactcgacactcctgcaggtggatttagcgggcgcactggtcgcaagcgggccatcccgccccggaagggaagagcacatcgtggtggagttgacacaggcggatgcactggggtcgaggtggaggaggccacagcaggtaactcacaattggactgtgtatttgaaccctcggcgctccgaacattcagtcatgtcacggacctttgaggtccttacaagggaaacagttagtattagtattagggccagcttgcaacaaacccaggctgtaccactgctgatggcccaccaatatctccggggatctgtggagacacaggtcacaattgcaactgccatcctggctggggtctatgctctgatcattttcgagcgaccttcactgacgcatgtagtggaatggatcgacttcgagaccctggctcttctcttcggcatgatgattctggtggcaatttttagcgaaactgggttcttcgactattgtgcagtgaaagcctacaggttatcccgtggccgagtgtgggccatgatcatcatgctgtgtctgatagctgccgttttatccgctttcctcgacaacgtgaccaccatgttactatttactcccgtgactatcaggctgtgtgaagttctcaacttggacccccgacaggtgctgatagctgaagttatttttactaacatcggaggcgccgcgacagccatcggcgatccccctaatgtcattatcgttagtaatcaagagctgagaaaaatgggccttgacttcgcagggttcactgcccatatgttcatcggaatctgtctggtgctgctggtgtgctttcctctcctaaggttgctgtattggaaccgcaaactctataacaaagaaccttccgagatcgtcgaactgaagcatgaaatccacgtttggaggctgacagcacagcggatctctccagcgtcaagggaggagactgcagtgaggcgcttgttacttggaaaagtactggctctcgaacacctgctagcaaggagactccacacattccataggcagatcagccaagaggataagaactgggagactaatattcaagagctgcagaaaaagcacagaatctcagacggaatactcttagctaaatgcctgaccgtgctcggcttcgtgatattcatgttttttctgaattcttttgtaccaggaattcatctggaccttggatggatagctattctcggggccatttggctgcttattcttgccgacatacatgacttcgagatcatcttacaccgggtggaatgggcaactctgcttttcttcgctgcactgtttgttctgatggaagccctcgcccacctgcaccttatcgagtatgtcggcgagcagacagcacttcttataaaaatggtgcctgaagaacagcggttaattgccgctattgtcctagttgtctgggtgagcgccctggcctccagtttgatagataacatccccttcaccgccacaatgattcccgtcttactcaatttgagccacgaccctgaggttggcctccctgccccaccactcatgtacgccctggccttcggcgcctgtctgggcggaaacggaacactgataggcgcctccgccaatgttgtatgcgcaggtatcgcagaacaacacggctacggctttagtttcatggaattcttccgactgggctttcctatgatggtggtttcttgtaccgtgggaatgtgctacctgctggtggcccacgtggttgttggctggaattag

SEQ ID NO: 198065 - DNA, 2517 bp, synthetic construct
  misc_feature 1..2517: note = Description of Artificial Sequence: Synthetic coding sequence
  source 1..2517: mol_type = other DNA
atgcacctggagggccgggacggccggcggtaccccggcgcccccgcggttgaactccttcagacatcggtgccgagtggtttggcggaattggtagcggggaagcgtcgcctgcccaggggcgcaggtggagctgacccatcccatagctgtcctagaggagcggccgggcagagttcttgggcccccgctgggcaggaatttgcgagtttcctgacaaaggggaggagccattcctcccttcctcagatgagctcgagccgcagcaaagacagctgttttacagagaacacccctctcctacggaatagcctacaagaaaagggtagcaggtgcattcccgtctaccacccagaatttatcacagccgaggagagttgggaggactcttcggcagattgggaaaggaggtaccttttgtcaagagaggtttcaggactgagcgcaagcgcctcaagcgagaaaggtgacctgctggactctccacacataagactgcgcctgtcaaagttgcggcggtgcgtccagtggctgaaggtgatggggctctttgctttcgtcgtcctgtgttccatcctcttttcgttatatccagatcaaggcaagctttggcagttgctggcgctgtcgcctttagagaattattctgttaacctgagctctcatgtcgactcaaccctgttacaagttgacctggctggagccctggtggcctccggccctagtaggccaggccgcgaagaacatatcgtggtggagcttactcaagcggatgccctgggatcgaggtggaggcgcccgcagcaggtgacacacaactggactgtctatctgaatcctaggaggagcgagcactctgtcatgtcaagaacatttgaagtgttgacaagagagacggtgtcaatatccattagagcctcactccagcagacgcaggcagtgccactgctgatggcccaccagtatctcaggggctcagtagagactcaagtaacgatcgccacagccatactggcgggagtgtacgccctgatcatttttgagatagtgcatagaacattggcggccatgctagggagcctcgcagcgcttgcagccctggctgtgattggcgaccggcccagcctgacacatgtggtggaatggattgatttcgaaacccttgccttgctgtttgggatgatgatactggtggctatattcagcgagaccggcttcttcgactactgcgcggttaaagcttaccgcctcagcagagggagagtgtgggccatgatcatcatgctttgcctgatcgccgccgtgttatccgcgtttttagataatgttactacgatgttactcttcactcccgtgaccatccgactttgtgaggttcttaacctcgatccacgccaggttctcatcgccgaagtgatttttaccaatattggtggggctgccacagctattggcgacccacccaacgtgatcatagttagtaatcaggaattgcggaagatgggactggacttcgccggctttacagctcatatgtttatcggcatatgcttggttttgctggtgtgcttcccgctgctccgcctgctgtactggaatagaaaactttataacaaggaaccatctgagatcgtggagctgaagcacgaaatccatgtgtggaggctcactgcccaaagaatctcacctgcttccagagaggagacggcagtgcggagattgctccttggcaaggtgcttgctttggagcacctcttggctagacgtttgcacacttttcacagacagatcagtcaggaggacaagaattgggagaccaacatccaggagctgcaaaagaagcaccgtatctccgatggaatattgctggccaagtgtttgacagttctgggatttgtgattttcatgtttttcctgaattcctttgtgccaggaatccatctagacctggggtggatcgccatcctgggcgccatatggttattgatcttggccgatatccacgacttcgagatcatactgcacagggtcgaatgggccactctgctctttttcgccgcactattcgtgctaatggaggccctcgcccatctccatttgatagagtacgtgggagagcagacagcactcctgataaaaatggttccagaggagcagagactcatcgctgctatcgtgttggtcgtctgggtgtccgcactggcctcctctctgatcgataacattccctttactgccaccatgatccccgttctgctgaacttaagccatgatccagaagtcggactaccagccccccccttaatgtacgccttagcatttggagcctgtcttgggggaaatggcacactgatcggggcatcagccaacgtggtctgtgcggggatagccgagcagcacggctacgggttcagttttatggagttcttcaggcttggatttccaatgatggtggtcagctgtacagttggcatgtgttacttgctggtcgcacacgtggttgtcggatggaattag

SEQ ID NO: 198066 - DNA, 2007 bp, synthetic construct
  misc_feature 1..2007: note = Description of Artificial Sequence: Synthetic coding sequence
  source 1..2007: mol_type = other DNA
atgcacctggagggccgggacggccggcggtaccccggcgcccccgccgtggaactcctgcagacatcagtaccctctggccttgcagagctagtggcggggaaacggagactgcccaggggtgcaggtggggcagatcctagccacagctgccctcggggtgccgcgggccaatcgtcctgggctcccgcaggtcaggagttcgcgtcattcctcaccaagggaagatcccactccagcttgccacagatgagctctagtcggtctaaggacagctgctttaccgaaaacaccccactgttgagaaattcattacaggagaaggggagcagatgtatcccagtctatcatccagagttcattactgcggaagagtcctgggaggattcatctgcagactgggaaaggagatacctgctgagcagagaggtctctggcctcagcgcctcagccagctccgagaagggtgatcttttagattccccacatatcagacttcgcctttccaagctgcgcaggtgcgttcagtggctgaaggtgatgggcttgtttgccttcgttgttctgtgctctatcctcttctctctttaccccgaccaaggaaaactgtggcagcttctcgccctaagcccgctggaaaattacagcgtaaatctttcctctcacgtcgatagcaccctgctgcaggtcgacctggctggagcactcgtggcttccggcccttcaaggccgggtcgtgaagagcatatcgtggtggagctgacgcaggctgatgcattagggagtcgatggcgtcgccctcaacaggtgacccataactggaccgtctatctgaaccctcggcgctccgaacacagcgtcatgtctaggactttcgaggtgttgacgcgagagacggtctcaatttccatccgggcaagcctgcagcaaacccaggctgtgcctctgctgatggcccatcaatatctgcgcgggtctgtggagacccaggttaccatcgccaccgccattctggctggagtgtacgccctgattattttcgagatagttcatcgtacacttgcagccatgctgggttctctagcagcactcgccgcactggcagtgatcggtgatcggccctccctaactcatgttgtggagtggattgatttcgagacactcgctttactgtttggcatgatgattctggtcgccatcttcagcgagaccggcttctttgattactgcgcggtgaaagcatacaggctgtctcggggccgggtgtgggccatgataatcatgctttgcttgatcgccgccgtgctgagcgccttcctggacaacgtaacaactatgctgttgtttaccccggtgacaatcaggctttgcgaagtattaaacctggacccccggcaggttctgatcgccgaggtgatcttcaccaatattggcggcgcagcaacagctattggggacccccctaatgtgataatcgtttcaaatcaggagctacggaagatgggccttgatttcgccgggtttacagcccacatgttcatagggatctgcctggtgctgttggtctgctttccgctcctccggttgctgtactggaaccggaagctctacaacaaggaaccatcagaaatcgtagagctaaaacacgagattcacgtctggcgccttaccgcccagaggataagcccggctagccgggaagaaactgcggtgcggaggctgctgctcggcaaggttctggcgctcgaacaccttctggctagaaggctccatactttccacaggcagatctctcaagaggataagaactgggaaactaacattcaggagcttcaaaagaaacataggattagcgacggaattctgctcgctaaatgcctcacagtccttggcttcgtgatttttatgtttttcctcaactctttcgtcccaggaatacatcttgaccttggtggcctaggccttgtccaggccggccgctactacctatccacgcctgaatcttag

SEQ ID NO: 198067 - DNA, 795 bp, synthetic construct
  misc_feature 1..795: note = Description of Artificial Sequence: Synthetic coding sequence
  source 1..795: mol_type = other DNA
atgcacctggagggccgggacggccggcggtaccccggcgcccccgccgttgaactcctgcagacttctgtaccatccggccttgccgaattggtcgcggggaaaaggagactccccagaggagctggaggtgccgatccaagtcactcttgtccccgcggggccgcaggacagtcatcttgggctcccgccggtcaagaatttgcttccttcctgacgaagggccgcagccactctagtttgccgcagatgtcaagtagccgcagcaaggattcatgctttacagagaacacccccttactgcgcaattcattacaggaaaaaggaagcaggtgcatccccgtttatcacccggagtttataaccgcagaggagagttgggaggatagctctgcggattgggagagacgatacctgctatctcgcgaagtgtcaggtctctctgcttcagcatcttctgaaaaaggcgatcttctggactcaccccacattcgactgcggctgtctaaattgagaagatgcgtgcagtggttaaaggtcatgggcttattcgcgtttgtggtgctctgcagtattttgttctcactgtacccagatcagggcaagctatggcaactattagccttgtccccgcttgagaactactcggtcaatctctcaagtcacgtggattcaacactgctccaggtcgatctggccggtgctctggtggctagtgggccctctaggcctggcagggaagagcacatcgtggtggagctcacacaggccgacgcactaggctcacgttggtag

SEQ ID NO: 198068 - DNA, 657 bp, synthetic construct
  misc_feature 1..657: note = Description of Artificial Sequence: Synthetic coding sequence
  source 1..657: mol_type = other DNA
atgcacctggagggccgggacggccggcggtaccccggcgcccccgccgtcgagctgctgcagacctctgttcctagcggtctcgccgagctcgtagccggaaagaggcgacttccaaggggcgctggaggggccgatccttcacattcctgccccagaggtgctgccggccagagttcttgggccccggctgggcaggagtttgcttcatttcttacgaaaggccgcagtcactctagccttccccagatgtcttcttctcgctctaaggactcttgctttacagagaacacaccccttcttcgaaatagtctccaagaaaaggggtcaagatgcatccccgtgtatcaccccgaattcatcacagcagaggagagctgggaggactcgagcgccgattgggaaagacgatacttgctgtctagggaagtaagcggtttgtccgcgagtgcctcctcagagaaaggagacttgctggattcgccacatattagacttagattatccaagctgcgaaggtgcgtacagtggttgaaggtcatgggcctctttgcgtttgttgttctctgctccgtgacacataactggacagtctatctgaatccccggcggtccgagcacagcgtgatgagcaggacatttgaagtacttacgtag

SEQ ID NO: 198069 - DNA, 801 bp, synthetic construct
  misc_feature 1..801: note = Description of Artificial Sequence: Synthetic coding sequence
  source 1..801: mol_type = other DNA
atgggcagcaagaccctgcccgcccccgtgcccatccaccccagcctccaactaactaactacagtttcctccaggccgttaatggcctccccaccgtcccctctgaccatctcccaaatctgtatggattcagtgccttacacgctgtccatttgcaccaatggactcttggttatccagctatgcacctacctagatctagcttcagcaaagtacccgggacggtgagctccctggtagacgccagattccagctgcccgcattcccatggtttcctcacgtaattcagccgaaaccagaaattactgcgggcggttcggtccctgctctcaagaccaagcctcggtttgatttcgctaatctggcacttgctgcgactcaggaagacccagcaaaactgggccgtggagaggggcctggcagtcccgctggcggccttggcgctcttcttgacgtgaccaaactgtcacctgaaaaaaaacccacacgaggtcggttaccatctaaaactaaaaaggaattcgtatgtaagttttgcggccgccattttaccaagtcctataacttgctaatccatgagaggacccacaccgacgaaaggccctatacctgcgacatttgtcataaggcattcaggaggcaggatcatctgagggaccatcgttacattcattccaaggaaaaaccttttaagtgtcaggaatgcggaaagggtttctgccagagtagaaccctggcagttcacaaaaccctgcactcccaggttaaagaactgaaaacctccaaaataaagtgctag

SEQ ID NO: 198070 - DNA, 801 bp, synthetic construct
  misc_feature 1..801: note = Description of Artificial Sequence: Synthetic coding sequence
  source 1..801: mol_type = other DNA
atgggcagcaagaccctgcccgcccccgtgcccatccaccccagcctgcagctcacaaactattcctttctccaggccgtgaacgggcttccaaccgtcccctccgaccatttacctaatctatatggcttctccgcactgcacgccgtccacctgcaccaatggaccctgggttacccagcaatgcacctcccaagaagctctttttcaaaggtcccggggaccgtgtcatctctggtggacgcaagatttcagttacccgctttcccgtggttcccgcacgtcatccagcccaagccagagataacagctggcggctccgtccctgcattaaaaaccaaacctcggtttgattttgcaaacctggcgttagccgccacccaagaagaccccgcaaaattggggcgtggtgaaggaccgggaagccccgctggtgggctgggagccctactggacgtgacaaaactctccccagagaaaaagccaacccggggccggctgccctcaaagaccaagaaggagttcgtatgcaaattttgtggaagacactttacaaaatcttacaacctgttaatccatgagcgcacccacaccgacgagaggccttatacttgtgatatctgccacaaagctttccgcagacaggaccacctgcgggaccaccggtacatccactcaaaggagaaaccttttaaatgccaggaatgtggaaagggattttgccagagtcgcaccctcgccgtccacaaaacactgcactcacaggtcaaagaactaaaaacttctaaaatcaaatgttag

SEQ ID NO: 198071 - DNA, 939 bp, synthetic construct
  misc_feature 1..939: note = Description of Artificial Sequence: Synthetic coding sequence
  source 1..939: mol_type = other DNA
atgggcagcaaggccctgcccgcccccatccccctgcaccccagcttacagttaaccaactatagcttccttcaagccgtcaatacatttcccgccaccgtagaccatctgcagggtttgtatggtttaagcgctgttcagaccatgcacatgaatcactggaccctcgggtaccctaatgtgcacgaaatcaccagaagtactattactgagatggccgcggcacaggggctggtagatgcccgttttccgttcccagctctccccttcaccactcacctctttcacccaaagcagggagccattgcccatgtccttcctgctttgcataaggacaggcccagattcgacttcgcgaatctggcagtggccgcgacccaggaggatcccccaaagatgggagatttgtctaaactatctcctggactgggctcacccatttccggacttagcaaactcacgcccgatcggaaaccatcccgcggccggctaccatctaagacgaagaaagagttcatatgcaagttctgtggacgccacttcacaaaatcatacaacctgcttattcatgagcgcacccacaccgacgaacgtccttatacatgtgacatttgtcacaaggccttccggcgacaggaccatcttcgtgaccatagatatattcatagtaaggagaaaccatttaagtgtcaggagtgcggcaagggtttttgccagtcgagaacattggcagtacataaaaccctgcatatgcaagaatctcctcataagtgccctacctgcggccggacatttaaccaacggtctaatcttaagacacacctgttaactcacactgacattaagccctatagctgtgagcagtgtgggaaagtgttcaggcgtaattgtgacctgaggcgccacagcctcacacatactcccagacaggacttttag

SEQ ID NO: 198072 - DNA, 831 bp, synthetic construct
  misc_feature 1..831: note = Description of Artificial Sequence: Synthetic coding sequence
  source 1..831: mol_type = other DNA
atgggcagcaaggccctgcccgcccccatccccctgcaccccagcctgcagctgactaattacagtttcctccaagctgtcaatacgttccccgctacagttgaccacctgcagggcctgtacggcctgtctgctgtgcaaaccatgcatatgaaccactggacgttaggatatcccaacgtgcatgagataacaaggtcaaccatcacagagatggcagctgcacaaggactggttgatgctcgcttccctttcccagccctgccttttaccactcacctcttccaccctaagcagggggcaattgcccacgttctccctgcactccacaaagataggccccgatttgatttcgccaatctcgcagtcgctgcaacgcaggaagatccacccaagatgggcgatctcagcaagctctcccctggactggggtcaccaatttccggcctttcgaagcttacccctgatcgaaaaccttcccggggaagattgccgtccaagactaagaaggagtttatctgtaagttctgtggacgtcactttactaagtcatataacctcctgatccatgagagaacccatacagacgagagaccctatacctgtgatatatgccacaaagcttttagaagacaggatcatttgcgcgatcacaggtatatccactccaaggaaaaacccttcaagtgtcaggaatgtggaaaaggcttctgccagtctcggacactggcagtgcataagactcttcacatgcagacgtcgagcccgaccgccgcctccagcgcggcaaagtgtagtggtgaaaccgtgatttgcggcggtacagcctag

SEQ ID NO: 198073 - DNA, 1302 bp, synthetic construct
  misc_feature 1..1302: note = Description of Artificial Sequence: Synthetic coding sequence
  source 1..1302: mol_type = other DNA
atgggcctgcgggccgaggagggcaagcggaagcccccccggagcgtccggggagaggtgagtccaagccagggtccactcgcccaggaggatgaggcacggcggctgcgaagctgtacccctgcatgccacccaggaaaacgaggaaagggtgggcatagggctaggaggcagaggagcgcatgggacttgacaacacatcccctgacccataggagtcaggaattgaggggagccgccgcgactgagggtttcttatacgttctcttgagccattgggtcttcgtgggggcccctaggccccccgcgagcgactcatggaaaaagggtctggtgccaagcgcaccaccagcctcccggaagatgggctcgaaagcactgccagctcctataccccttcaccctagccttcaactgacaaactatagtttcctgcaggcggtgaatacttttcccgctacagtcgaccatctccaggggttatacggactgtcagcggttcagacaatgcatatgaatcactggaccttgggctacccgaacgttcacgagattacacggagcaccatcactgaaatggccgccgcccagggactggtagacgctcggtttccattccctgctctgcctttcaccacgcatctgttccaccccaagcaaggtgccatcgcccacgtgctgccagccttacacaaggaccggccgagatttgatttcgccaatctagcagttgctgccacccaggaagaccccccgaagatgggcgatctgagcaaattgtcacccgggctgggcagcccgataagcggactgtcaaagctcacccctgaccggaaaccatcacgcggtagactgccaagcaaaactaagaaagaattcatctgcaaattttgcgggcgtcatttcaccaaatcctacaaccttctgatccacgagcgaactcataccgacgagcggccctatacctgtgatatatgtcataaagccttcaggcgtcaggatcatctgcgagatcaccgttacattcattctaaggagaaacctttcaaatgtcaagaatgcggtaaaggtttttgccagtctcggaccctggctgtccacaaaacactgcatatgcaggaatcccctcataaatgccccacctgtggaagaacctttaatcagcgatcgaacctcaagacccacttactgactcatacagacatcaagccctattcatgcgagcaatgtggcaaagtttttagacggaactgcgaccttcggagacacagccttacccatacccctcggcaggatttttag

SEQ ID NO: 198074 - DNA, 642 bp, synthetic construct
  misc_feature 1..642: note = Description of Artificial Sequence: Synthetic coding sequence
  source 1..642: mol_type = other DNA
atgggcagcaaggccctgcccgcccccatccccctgcaccccagcctgcagctgaccaattatagtttcctccaggctgtgaacacctttccggctacagttgaccatcttcaaggattgtacggcctcagcgctgtccagaccatgcatatgaaccactggacactgggttaccccaatgtgcatgaaattacccgtagtacgataacggaaatggccgcagcgcaagggctcgtcgatgcgcgattccccttcccggctcttccatttaccacacacttattccatcccaaacaaggcgccatagcccacgtgctgcctgcgctccacaaggatcgcccgagatttgacttcgcaaatctggccgtggctgccacacaggaagacccacccaagatgggggatctctcaaaactgtctcctgggttgggaagtccaatatcaggcctctctaagctcacgccggatcggaagccttcccgtgggaggctgccatccaagacgaagaaggagtttatttgcaagttctgcggccgtcatttcaccaaaagctataatctcctgatacacgagcgcacgcacactgacgaaagaccatacacttgcgacatttgtcacaaggccttccgcagacaagattag

SEQ ID NO: 198075 - DNA, 939 bp, synthetic construct
  misc_feature 1..939: note = Description of Artificial Sequence: Synthetic coding sequence
  source 1..939: mol_type = other DNA
atgggcagcaaggccctgcccgcccccatccccctgcaccccagccttcagctgactaattattctttccttcaggcagtcaatacattccccgctaccgtggaccacctccagggcctttatgggttatccgctgtgcagacgatgcacatgaatcattggaccctggggtatccaaatgttcatgagatcacccggtcaaccattaccgagatggccgccgcgcagggtctcgtcgatgctcggttcccttttcctgccctccccttcactacccatctgtttcatccgaaacagggcgcaatagcccacgtgctgccagctttacacaaagacaggccgcgattcgactttgccaacctagcagtggcagcgacccaggaggaccctcccaagatgggtgacctgtcgaaactgtccccaggtcttggcagcccaatctctggacttagcaaattgactcccgacaggaagccctcccgaggtagactgccctctaagaccaaaaaagagttcatctgtaagttttgcggcagacattttaccaagtcatataatctgctgatacatgagcgcactcacactgacgagcgcccatacacatgcgatatctgccataaagccttcagacgccaggaccatttgagagaccaccgttacattcatagtaaagagaaaccatttaagtgccaggaatgtgggaagggattctgtcagagccgtacactggccgtgcataagacactgcacatgcaagagagtccccacaagtgtcctacctgtggtagaaccttcaatcaaaggagcaatctgaagacacatttgctcacccatactgatataaagccatactcctgcgagcagtgcgggaaagtctttaggcgcaactgtgacctgaggcgacactcactcactcacacgcctaggcaggacttctag

SEQ ID NO: 198076 - DNA, 687 bp, synthetic construct
  misc_feature 1..687: note = Description of Artificial Sequence: Synthetic coding sequence
  source 1..687: mol_type = other DNA
atgaagaccctgttcctgggcgtgaccctgggcctggccgccgccctctcttttactctggaggaggaggacatcaccggaacatggtatgtgaaggcgatggtggttgacaaagactttcccgaagaccgccggcccaggaaagtttcccctgtgaaagtgaccgctctggggggaggtaacttagaggccaccttcacatttatgcgggaagacaggtgtattcaaaagaaaatcttgatgcgcaaaactgaagaacctgggaaatttagcgcatatggaggcaggaaactgatatatctgcaggaacttcctggaaccgatgattacgtgttctattgtaaagaccagcgtcgcggcggcttgagatatatgggcaagcttgttgcaagcgcgccgtgccgggcagtgcccctctccccaccatggcttacctggcctcctcacctccaggtcggcatcctgatccctacatggcggccatggaaaaaccttcgaaactggtgcagcacacgggatagcagacgccggacattttcttgtccttgcagaagggaggccgcatttagtaatactcggcagccccctgggctgcatctgcagtcacccccctatcaccaaacgcagtccccggatcatctggacctcccgagctcacatgatccaagcttgctgccgcctacatag

SEQ ID NO: 198077 - DNA, 444 bp, synthetic construct
  misc_feature 1..444: note = Description of Artificial Sequence: Synthetic coding sequence
  source 1..444: mol_type = other DNA
atgaagaccctgttcctgggcgtgaccctgggcctggccgccgccttgtccttcacactcgaagaagaggatgagggcggatctgtgcatcctgaggaaaaccctgacgccgaagatggtggggcatggcagattcaaaggctgtggggccaggaagcccacatccccgccggcgcagcacgagatggccgccttagattactacttcagcgccccgcaccttgggggcctgctctgcacggtaaagcctgcggaatctgcagcctgcaaggaagggccgccgtgcctactctagcacacctcgccaccagcccagcaggccggaatcccaatactaacctggaggctcttgaggagttcaagaagctggtccagcacaagggtctgtctgaggaggatatcttcatgcctctgcagacgggttcatgcgttctcgaacactag

SEQ ID NO: 198078 - DNA, 513 bp, synthetic construct
  misc_feature 1..513: note = Description of Artificial Sequence: Synthetic coding sequence
  source 1..513: mol_type = other DNA
atgaagaccctgttcctgggcgtgaccctgggcctggccgccgccctcagcttcactctggaagaagaagacatcacaggaacatggtacgtgaaggccatggtcgttgataaagatttcccagaagaccgacgtccgaggaaagtctcaccagttaaggtcacagccctgggaggcgggaacttagaagctacctttacgtttatgagggaggatagatgtatccagaagaagattctcatgcgaaagaccgaagagccaggcaagttcagtgcctatggtggaagaaaactcatctatttgcaggaacttcctggcaccgacgattatgtcttctactgtaaagatcagagaagaggagggttgcgctatatggggaaactcgtgggcagaaaccccaacacaaacctggaggcactggaagaattcaaaaagctagtgcagcacaaggggctctctgaagaggacatttttatgcccttgcaaactgggtcttgtgtgttggaacattag

SEQ ID NO: 198079 - DNA, 513 bp, synthetic construct
  misc_feature 1..513: note = Description of Artificial Sequence: Synthetic coding sequence
  source 1..513: mol_type = other DNA
atgaagaccctgttcctgggcgtgaccctgggcctggccgccgccttatccttcacattggaagaggaagacatcaccggaacctggtatgtaaaagccatggttgttgataaagatttccccgaggatagacggcccaggaaagtgagccccgtcaaagtaaccgctctcggcgggggtaatcttgaggctacgttcaccttcatgcgggaggacaggtgtattcagaagaagatcctgatgcgaaagacggaggagcccggcaagttctctgcttacggtgggcggaaactgatttatctgcaggaacttccagggacagacgattatgtgttctactgcaaggaccagaggcgtggcgggctccgctacatgggtaaactggtgggacgcaaccctaataccaatctcgaggcacttgaggagtttaagaagcttgtccaacataaagggcttagtgaggaggacatcttcatgccactgcagaccggaagttgtgtcttagagcactag

SEQ ID NO: 198080 - DNA, 258 bp, synthetic construct
  misc_feature 1..258: note = Description of Artificial Sequence: Synthetic coding sequence
  source 1..258: mol_type = other DNA
atgaagaccctgttcctgggcgtgaccctgggcctggccgccgccctgtcttttactctagaggaggaagatgatggcccttgggtgcatcctgaggagaatcccgacgcagaggacgggggggcttggcaaattcagagattgtggggtcaggaagctcacgtacccgccggcgcagcacaggagggccctctgcatctgctgctgcaaaggcccgctccatggggcccagccccacacggcaaggcttgcggatag

SEQ ID NO: 198081 - DNA, 513 bp, synthetic construct
  misc_feature 1..513: note = Description of Artificial Sequence: Synthetic coding sequence
  source 1..513: mol_type = other DNA
atgaagaccctgttcctgggcgtgaccctgggcctggccgccgccctcagttttaccctggaggaagaagacatcactggcacctggtacgtcaaggctatggtcgtggacaaagactttcctgaagacagacgcccgaggaaggtttcacctgttaaagtgacagcattaggaggagggaagctcgaggccacctttacttttatgagagaggacagatgcatccagaagaaaatactcatgcgtaaaactgaggaacctgggaagtattccgcctacggagggagaaaattgatgtatctgcaggaactgcctcgacgagaccactatatcttctattgcaaggaccagcaccacggcggtctgcttcatatggggaagctcgtggggcgcaactcagacacaaacagagaggccctggaggagtttaaaaagctggtccagcgcaaaggactctctgaggaagatattttcactccattgcaaaccgggagttgtgtgcctgagcattag

SEQ ID NO: 198082 - DNA, 8310 bp, synthetic construct
  misc_feature 1..8310: note = Description of Artificial Sequence: Synthetic coding sequence
  source 1..8310: mol_type = other DNA
atggacgtgaaggagcggaagccctaccggagcctgacccggcggagagacgcagagcggaggtacacaagctcatctgccgacagcgaagagggtaaagctcctcagaagagctattcttcaagcgaaacactcaaagcttacgatcaggacgcccgactggcttatggaagtagggtcaaggacattgttcctcaggaggctgaagaattctgccggactggggccaactttacacttcgggagctaggcttggaggaggtgacgcctccacatggtacgctctataggacagacataggactgccacactgcggctacagcatgggagccggaagcgacgccgacatggaggccgatacagttctgtcacccgagcacccagtgcgcttatgggggaggtcaactaggagcggacggtcaagctgtctgagcagccgagccaattcaaacctcacgctcactgacacagagcacgagaatacggagaccgaccaccctgggggcctgcagaatcacgcgcgactcagaacacccccaccaccactcagccatgctcacactcccaaccaacatcacgcagcttccatcaactcacttaataggggcaacttcacaccacgaagtaatccttccccagctcccactgatcactctctgagcggcgagcctccagccggaggagcccaggaaccggcgcacgctcaggaaaactggttattgaatagcaatatcccactggagactcgaaacctgggaaagcaacccttcctaggtaccctccaggataacctcattgaaatggacatcctgggcgcctctcgccacgacggcgcatatagtgacggccacttcctgttcaagcccggtggtacaagcccacttttctgcacaacttcacccggatatcccctgaccagcagtactgtgtattcacccccgcctcggcccctcccgcggagcacctttgcaagaccagcattcaacctgaaaaaaccatctaagtactgcaactggaagtgcgctgcccttagtgcaatcgtgatctcggctacactggtgatcttacttgcttacttcgttgcgatgcacctcttcggactgaattggcatttgcagcccatggaggggcagatgtatgaaatcaccgaggacacggcttcttcctggccggtccccacagatgtgagcctgtacccaagcggagggacagggctggaaacccctgaccgcaaaggaaagggaacaacagagggcaagccctcctcctttttccctgaggactccttcattgattcaggtgaaattgacgtgggtcgtcgggcaagtcagaaaatccctccaggtactttctggaggtcccaagtctttatcgatcacccggtgcacctcaagttcaacgtgagtctgggcaaagcagcactcgtcgggatctacggtcgtaagggcctgccacccagccatacccagttcgacttcgttgaacttctggacggtcgccggctccttacacaggaagcgagaagtctagaaggaaccccacgacagtcacgcgggacagtccctccgtcctcccacgaaactggcttcatacagtatctagactccggcatttggcatctggccttctacaacgatggtaaagagagtgaggtagtgagctttcttacaaccgccattgagtcggtcgacaattgtccaagcaactgttatggtaatggtgactgtatttctggcacttgccattgttttttgggtttcctgggccccgattgtggacgggcctcctgcccagtcctttgtagcgggaatgggcagtacatgaaaggtcgatgcctatgtcatagcggctggaagggagccgagtgtgatgttccgaccaatcagtgcatcgacgtcgcctgctctaatcatgggacctgtatcacaggaacctgcatctgtaaccctggctataaaggcgaatcatgcgaggaggttgactgcatggatcccacctgcagtggacgaggcgtgtgcgtaaggggagagtgccattgcagcgtggggtggggcggcactaactgtgaaacacctagagctacatgtctggatcagtgctctggccacggcacttttctgcccgacactgggctgtgttcatgtgacccaagttggacggggcacgattgtagcatcgagatctgcgccgcagactgtggcggccacggcgtgtgcgtcggaggcacatgccgatgtgaggacgggtggatgggcgccgcatgcgatcagcgcgcatgtcatcctcgatgcgccgagcacggcacttgcagggatgggaagtgtgagtgtagtcccggttggaacggtgagcactgtacaatcgcccactacctggatagagtggtgaaagagggctgcccaggactttgtaacgggaatggacgctgcaccctggacctcaatgggtggcactgtgtatgccagttaggatggcgaggggctggatgtgacacaagcatggagaccgcctgcggggattcaaaagataacgatggcgatggcctcgtggactgcatggatccagactgctgtttgcaacctctttgtcacattaatcctttgtgcctgggctcccccaacccactggacatcatccaggagacccaagtgccagtgtcgcagcagaatctgcattctttttatgacagaataaagtttctggtggggagagattccacacatatcattcctggtgagaacccatttgacggcgggcatgcctgcgtgattcgagggcaagttatgacgtccgacgggacgcccctggtgggcgttaatataagcttcgttaacaatccacttttcgggtataccatctctagacaggatggcagctttgatctcgtcacaaacggcggcatttcaataattctgcgctttgaaagagcccctttcatcacgcaggaacataccctgtggctcccttgggaccgattcttcgttatggagacaatcatcatgcgccatgaagagaacgaaatcccaagctgcgatctgtcaaatttcgctagacctaaccctgttgtgtcaccctcacctctgacctcttttgcctccagttgcgctgaaaaaggccccatcgttcccgagatccaggccttacaggaggaaatttctatctctggatgtaaaatgcgtctgagctacctgagtagccggaccccaggttataagtcagtactaagaatatccctgacccatcccaccatcccttttaacctgatgaaagtgcacctgatggttgcagtggagggtcgtctgtttagaaagtggtttgctgcggcgccggacttgtcttattatttcatatgggacaagactgacgtctacaaccagaaagtgtttggcctctccgaggcctttgtgagcgtcggctatgagtatgagtcgtgccctgacttaatcctgtgggaaaaacgcacaacagttctgcaaggctacgaaatcgatgcttcaaagctgggtggatggtcactggataagcaccatgctctgaacatacagagtggaattttgcacaagggaaatggggagaaccagttcgtgagccagcagccacctgtgattggttctatcatggggaacgggcgacggaggtccatctcctgcccctcatgcaacggcctcgcagatggaaataagttgctagctccggttgcccttacctgcggctctgacgggtccttgtacgtcggagatttcaactatatcagacggatctttccctcgggcaatgtgacaaacatcctggaactccgcaataaagattttaggcattctcattcccctgctcacaaatactacttagctactgatcccatgagcggagcagtattcctgagcgattcaaactccagaagggtctttaagattaaatccaccgtcgtggtgaaggacctcgtgaaaaacagtgaggtggtggccggcaccggggaccaatgcctgccgtttgacgacaccaggtgtggcgatggcggcaaggccactgaggcaaccctcacaaaccctagaggcatcaccgttgacaaattcggcctgatctacttcgttgatggtaccatgattcgccgtattgaccaaaatggaatcatttctacactgctgggaagtaatgatcttacaagtgcccgacctttgagctgcgactcagttatggacatttcccaggttcatctggaatggcccaccgaccttgctataaacccgatggacaacagcctttacgttctggacaataatgtggtacttcagataagtgagaaccaccaggttagaatcgtcgccggcaggcccatgcactgccaggttccagggattgaccatttcctgttaagcaaagtggcaatccacgctaccttggagagcgccaccgccctcgctgtgagccacaatggggtactttacattgccgaaacagatgaaaaaaaaatcaaccgcattaggcaggtcacaacctcaggcgaaatttcattagtggccggcgctccatcaggatgcgactgcaagaatgacgcaaattgtgactgcttcagcggcgatgatggatatgccaaagacgctaaactgaacactccctcatcactcgctgtctgtgctgacggggaactatatgtcgccgatcttggtaatatcagaatccgatttattagaaagaacaagcctttcctcaacacacagaatatgtacgaattgtcatcccccatcgatcaggagctttatctcttcgatacgactggcaagcatctctacactcagtcactccccaccggcgactacctgtacaactttacatatacaggggacggagatatcaccctcatcacagataacaatggaaatatggtgaatgtcaggagggactcaacaggcatgcctctgtggttggtggtccccgacgggcaggtgtactgggtgacgatggggaccaattctgccctgaagtctgtgactactcagggacacgaactcgccatgatgacatatcatgggaatagcgggctgctcgccactaagtctaacgaaaatggctggaccacattctacgaatatgattccttcggacgcctgactaacgtcacttttcccactggacaggtgtcgagttttcggagcgacacagatagttccgtacacgtccaagtggagaccagtagcaaagatgacgtcactattacaactaatctcagtgccagtggcgccttttacaccttacttcaagatcaggtgcggaattcttattacattggtgccgacggcagccttaggctccttctggctaatggtatggaggttgcactgcaaacagaaccgcatctactggccggtaccgtgaatcccacggtgggaaaacgaaacgtcacactgcctatagacaatggactgaacctggtggagtggcgccaacggaaggagcaagctaggggtcaagttactgttttcgggcgccgtctgcgagtgcacaacaggaatctcctttctcttgactttgacagagtgacacgtactgaaaagatttacgatgatcaccgaaagtttacattaaggattctttacgaccaggctggtcgcccatccctatggagcccttcttccagattaaatggcgtcaacgtgacatattccccgggtgggtatattgctggcattcagcgaggcattatgtcagaacgaatggagtacgatcaggccggaagaattacttctagaatatttgctgacggtaagacttggtcttatacttacctcgagaagtcaatggtgcttcttctgcattcccagagacagtatatatttgagttcgacaagaacgatagactttcatcggtgactatgccgaatgttgccaggcaaaccttagagaccattcgcagtgtcggctactatcggaacatctaccagccccccgaaggtaacgcctcagtgatacaggacttcacagaagacggtcacctcctgcacaccttttatctcggtacagggagaagggtgatctacaagtacggcaaactgagtaagctggcagaaaccctctacgacaccaccaaggttagcttcacctacgacgaaaccgccggcatgctgaaaaccatcaacctgcaaaacgaggggttcacctgtaccatccgctatcggcagataggcccactaattgatcgtcagatttttcgattcaccgaggaaggcatggtgaatgcaaggtttgactacaattatgacaattcatttagagttacttcaatgcaggcagttattaatgagacccccctccctatcgacctctaccgctacgacgacgtttccggaaaaaccgaacagttcggcaagtttggcgtgatctattacgacatcaaccagatcatcacaacagccgtcatgacgcataccaagcattttgatgcgtacggaagaatgaaggaggtgcagtacgagatttttaggagtctcatgtactggatgactgtacagtacgacaatatgggtagagttgtcaagaaggagctcaaagtgggaccttacgcaaatactactcgttattcctatgagtatgacgctgacggtcagctccagactgtgtcaatcaacgacaagcctctttggcgctactcctacgacctgaatgggaatttgcacctgttgtctccgggcaactccgcgcgcttgaccccactccgttatgacatccgcgataggataactaggttaggagatgtccagtataagatggatgaggatggattcctaaggcaacgcggcggcgatatcttcgagtacaatagcgccggcttattgataaaggcttacaacagagccgggtcttggtcagtgcgctatcggtatgacggactcggtaggcgcgtatcatctaaaagtagccattcgcatcacctccagtttttctacgcggatctcactaaccctacaaaggtgacacacctttataatcacagctcctccgaaattacatctctgtactacgatttacaaggacatctatttgccatggaacttagtagtggcgatgagttttacatcgcttgcgacaatattggaacccctttggccgtcttcagcggaacaggccttatgattaagcagatcttatacactgcctatggtgagatttacatggatactaaccctaactttcagataatcatcggataccatggcggcttgtatgatcccctcacaaagttagttcatatggggagacgggactacgacgtgctcgctgggcgttggacttcccctgatcacgagctttggaagcacctgtcatcttcaaacgtaatgccttttaatctctacatgtttaagaacaacaacccgatcagcaactctcaggacataaagtgctttatgactgacgtcaactcttggctgctgacatttggatttcagctccacaatgtcatcccgggctaccccaagccagacatggatgctatggagccgagttacgagctgatacatacccagatgaagactcaggagtgggataacagcaagagcattcttggagttcagtgcgaggttcagaagcaactgaaagccttcgttaccctggaacgattcgatcaattatacggcagcaccataacgtcctgtcagcaggccccaaagacaaaaaaatttgctagtagtggctcggtgtttgggaaaggtgtgaagttcgccctcaaggacggtcgggtgaccacagacattattagcgtcgctaacgaagacggtagacgggtggccgctatcctgaatcatgcacactatctggagaatcttcattttactatagacggagtggacacccactacttcgttaaaccagggccatctgagggagaccttgcaattctgggccttagtggaggtcgtcgcacgctggaaaacggggtgaatgtgacagtgtcccagataaatacagtccttaatggcaggacgcgacgctataccgatattcagctccagtatggcgcactttgtctgaacactaggtatggcacaaccctggacgaagagaaagccagagttcttgaactcgcaaggcagagagctgtgcgccaggcctgggcccgagaacagcagagacttcgcgagggagaagaggggctccgggcatggacggagggcgagaaacaacaagtgttgagtacaggacgagtccaggggtacgacggattctttgtcatcagcgttgaacagtacccggagttgtctgattcagccaacaacatccactttatgcgacaatccgaaatgggcagaagatag

SEQ ID NO: 198083 - skipped

SEQ ID NO: 198084 - DNA, 1404 bp, synthetic construct
  misc_feature 1..1404: note = Description of Artificial Sequence: Synthetic coding sequence
  source 1..1404: mol_type = other DNA
atgcccggccggtggcggtggcagcgggacatgcaccccgcccggaaactgctgtctctgctgttccttatcctgatgggaaccgaactgacccaggtgttgcctacaaacccagaggagagctggcaggtgtattcatccgcccaagattccgaggggaggtgtatctgcactgtggtggctccccagcagacgatgtgtagtcgagacgctcgaacgaagcaactgcgacagctcctcgagaaggtgcaaaatatgtctcagtctatagaggtgctggatcgtcgaactcagcgtgacttgcagtatgtggaaaaaatggagaatcagatgaaagggcttgaaagtaagttcaagcaggtcgaagagagccataaacagcatctcgcacgacaattcaaggcaatcaaggcaaagatggatgaactgcggccactgatacctgtcctggaggagtataaggctgacgcaaagctcgtgctccaatttaaggaggaggttcagaacttgacctcagtcttgaatgagttgcaggaggaaatcggcgcttatgattatgacgagctgcaatcccgcgtatccaatctcgaggaacgtctccgggcatgtatgcagaaactcgcatgtggcaagttgacaggcattagtgatccggtgactgttaaaacatcaggaagcaggttcgggagctggatgacagaccctttggcccccgagggagacaaccgagtttggtacatggatggctaccacaacaaccggtttgtacgtgagtataaaagcatggttgatttcatgaacaccgacaattttacctcccaccgcctcccccatccctggtcaggcaccggccaggtggtctacaatggaagtatctatttcaacaagttccagtctcacattataatccgcttcgacctaaagactgagactattctgaaaacacgcagtctagactatgcaggctacaataatatgtatcattatgcctggggaggacatagcgacattgatcttatggtggacgagtcgggactctgggccgtttatgctactaatcagaatgcgggaaacatcgtggtcagccgattggacccagtttccctccagacattacagacctggaacacctcttacccaaagagaagtgccggagaggcattcatcatttgtggaacgctgtatgttacaaacgggtattcggggggtactaaggtccactatgcatatcagactaatgcttctacatatgaatacatcgatattccttttcagaacaagtatagccacatctccatgttagattataatcccaaagatagggcactgtatgcctggaacaatggacaccagatcctgtataatgtcacactcttccatgtaattcgatcagatgaattatag

SEQ ID NO: 198085 - DNA, 408 bp, synthetic construct
  misc_feature 1..408: note = Description of Artificial Sequence: Synthetic coding sequence
  source 1..408: mol_type = other DNA
atgcccggccggtggcggtggcagcgggacatgcaccccgcccggaagctgctctccctgctgtttcttatcttaatggggaccgaactgacacaggtgctccccacaaaccccgaggagagctggcaggtctatagttcggcacaggattccgaaggcagatgcatctgcacagttgtcgccccccagcagacaatgtgtagccgagacgcccgcactaagcaacttcggcagcttttggaaaaagtacagaacatgagtcagtctattgaggtcctagatcgcaggactcagcgtgacttgcagtatgtcgagaaaatggagaaccaaatgaagggtttggaaagcaagtttaaacaggtagaagagtctcataaacaacaccttgccaggcagttcaaggggtag

SEQ ID NO: 198086 - DNA, 1458 bp, synthetic construct
  misc_feature 1..1458: note = Description of Artificial Sequence: Synthetic coding sequence
  source 1..1458: mol_type = other DNA
atgagcgtgcccctgctgaagatcggcgtggtgctgagcaccatggccatgatcactaactggatgtcacagacgctacccagcctggtggggttgaatactactaaattgtccgccgccggcgggggcaccttagataggtcaactggggtgctccctacaaaccccgaggaatcctggcaggtgtatagctccgcgcaggactctgaaggtagatgtatttgcacagtcgtggcccctcagcaaaccatgtgttctcgcgacgccaggaccaaacagctccgccagcttctcgagaaagtccagaacatgagccagtcgatcgaggtgttggatcgccgcacacaaagggatctccagtacgtggagaaaatggaaaatcagatgaaggggctagagtctaaatttaaacaagtcgaagaaagccataagcaacatctggcaagacaatttaaggctataaaagcaaaaatggatgaacttcgccctttgattcctgtccttgaggaatacaaggccgacgccaagttagtgttacagtttaaagaagaagtgcagaacctgacaagcgtactgaacgagttgcaggaggaaatcggcgcatacgactacgacgaactccaatcccgcgtcagcaacctcgaagagcgccttagagcctgtatgcagaagctggcctgcggtaaacttaccggaataagcgaccccgtaacagtgaagacttctggcagcagatttgggtcgtggatgactgatcccttggctcctgaaggtgacaatagagtgtggtatatggacggttaccacaataataggtttgtgcgggagtacaaatcaatggttgatttcatgaacacagacaatttcaccagccatcggctgccacatccatggagcggaacgggccaggttgtttacaacggcagtatttattttaacaaatttcagtcacacattataattcgctttgacctgaaaaccgaaacgatcctcaagactaggagccttgactatgccggctacaataatatgtatcactacgcctgggggggacattctgatattgatctgatggtcgacgagtcaggcctgtgggccgtgtacgctaccaatcagaatgctggaaacattgtggtgtctcgcctcgatcctgtgagcctgcaaactctccaaacgtggaatactagctacccaaaacggtcggcgggggaggcctttatcatctgtggcacactctacgtgacaaatggttacagcggcgggactaaggtacactacgcctaccagacaaatgcctcaacatatgagtacattgatatcccttttcagaacaagtacagccatatctctatgctggattataaccccaaagatcgcgcgctgtatgcttggaacaacgggcaccagatactgtacaatgtcaccctgtttcacgtgatcaggtccgatgagctctag

SEQ ID NO: 198087 - DNA, 1377 bp, synthetic construct
  misc_feature 1..1377: note = Description of Artificial Sequence: Synthetic coding sequence
  source 1..1377: mol_type = other DNA
atgggcgaggcccccggccgggagggccggggcccctgcccccagctggaaagccctagaagaaggcgggtgctcccaaccaatcccgaggagtcatggcaggtttactcatccgcccaggattccgagggacgttgtatttgtacggtggttgctccacaacagaccatgtgttcgcgcgacgcacgtactaagcagctccgccaactgctggaaaaagtgcaaaacatgagccagtccattgaagtattggatcgcagaacacagcgggacctccaatacgtggagaagatggagaaccagatgaaaggcctggagtccaagtttaagcaagtcgaagagtcacataagcagcatctggctcgtcagtttaaagccatcaaggcaaaaatggacgaactccgcccattgataccggtccttgaggaatacaaggccgatgccaagctcgtgctgcagttcaaggaggaggtacaaaatctgacatctgtgctgaacgaattgcaggaggagatcggcgcttacgactatgatgaactccagagcagagtgtccaaccttgaggaaaggttgcgggcatgcatgcagaagctggcttgcggaaagttaacaggaatctctgatcccgtcactgttaagacctccggctctaggtttggatcctggatgacggaccccctcgcccccgaaggtgataatcgggtgtggtatatggatggttaccacaataacaggtttgttcgggagtataagtctatggtcgactttatgaacaccgataacttcaccagtcacaggctccctcatccctggtcagggaccggacaggtggtgtacaatggcagcatttactttaataagtttcagtcccatatcataatccggtttgacctaaaaactgagaccattctgaaaacccggtctttagattacgccggatataataacatgtatcattacgcttgggggggacactccgatatagacctgatggtggacgagtctggtctctgggccgtctacgctaccaaccaaaatgctggcaacattgtagtctctaggttggaccccgtcagtctacagaccctgcagacttggaacacctcctatcctaaacgatccgccggagaggcctttatcatttgtggtacgctctacgtgacaaacggatatagcggaggcacaaaagtgcattacgcctatcagacgaatgcttccacctacgagtatatcgacattccttttcagaacaagtacagccatatttctatgctggactacaaccccaaggacagggccttgtatgcatggaacaacggccaccagattttgtataacgtgactctgtttcacgtgatccgctctgacgaactgtag

SEQ ID NO: 198088 - DNA, 462 bp, synthetic construct
  misc_feature 1..462: note = Description of Artificial Sequence: Synthetic coding sequence
  source 1..462: mol_type = other DNA
atgagcgtgcccctgctgaagatcggcgtggtgctgagcaccatggctatgatcacgaattggatgagccagacactcccaagcctggttgggcttaacaccacaaagttgagcgcggccggcggcggcaccttggaccggtccacaggcgtgctgcccaccaatcccgaggagtcatggcaggtgtactcctccgcgcaggatagcgaagggcgctgtatatgcaccgtcgttgctccacaacaaaccatgtgctcacgtgatgccagaacaaagcagctcaggcagcttctggagaaggttcagaatatgtcccagtctatagaagtgcttgataggcgcacccagcgagacctccagtacgtggagaaaatggaaaatcagatgaaggggctggaatccaagtttaaacaggtcgaggagtcacacaagcagcatctggctcgacagttcaagggctag

SEQ ID NO: 198089 - DNA, 729 bp, synthetic construct
  misc_feature 1..729: note = Description of Artificial Sequence: Synthetic coding sequence
  source 1..729: mol_type = other DNA
atgaacctgcacgtgaagaccctgagcctgatgacctggcggagccgttttctggaggagtctttctggagcctcgaggagactgccgctctggccaagcagctcccattaaagtctcccagcgagaatattttcttgcatatcgtggatctgtccgatcccaaacagatatggaaattcgtggaaaatttcaagcaggaacataaactgcatgttctgataaacaacgcggggtgtatggtgaacaaacgagagcttactgaagacggactggaaaagaatttcgctgctaatacgttaggagtctacatattgacgacaggattaatccctgtcttggagaaagagcacgacccgcgggtcattacagtatcatcgggtggaatgcttgtgcaaaagctcaacactaatgaccttcagtccgagcgcacgccttttgatggaaccatggtctacgctcaaaacaagcgtcagcaggtggtcttgaccgagcggtgggcccaagggcatcctgctatccatttctcctccatgcatccaggctgggccgatactcccggcgtgagacaggctatgcccggcttccacgctcgctttggagatcggctgagaagcgaagcacagggagcagacaccatgctgtggctggctctctcatcggctgcagccgcacagccatctggacgtttcttccagggagattttctccctggttgcgaaggttcctag

SEQ ID NO: 198090 - DNA, 492 bp, synthetic construct
  misc_feature 1..492: note = Description of Artificial Sequence: Synthetic coding sequence
  source 1..492: mol_type = other DNA
atggccgaggaccggccccagcagccccagctggacatgcccctggtgctggatcagggcctgacaagacaaatgagattgagagttgaaagcttgaagcagcggggtgaaaaacggcaggacggggagaaattgctacagcccgcagagtcagtgtaccgcttgaatttcactcagcagcagcgactgcagttcgagaggtggaatgtggtgctggataagcccggaaaggtgaccattactgggacttcccaaaactggacccccgatctgacaaacctgatgacaaggcagctgcttgatcccactgccatcttctggagaaaggaagacagcgatgccatcgactggaatgaagcggatgctctggaatttggggaaaggctgtcagatctcgctaagattagaaaagtgatgtacttcctggtgactttcggtgaaggggtggaaccagctaacctgaaagctagcgtagtgttcaatcagctatag

SEQ ID NO: 198091 - DNA, 939 bp, synthetic construct
  misc_feature 1..939: note = Description of Artificial Sequence: Synthetic coding sequence
  source 1..939: mol_type = other DNA
atggacggcggcaaccagagcgagggcagcgagttcctgctgctgggaatgtctgaaagtccagaacagcagcggattctgttctggatgttcctgtccatgtatctggtcaccgttgtcggtaacgtgttgatcattttagccatcagctcggactcccgcctgcatactcctgtctacttcttcctggctaatttatcctttacagaccttttttttgtgaccaacactatacccaagatgctggtaaatctacagtcccataataaagccatcagttatgcgggttgcctcacccaactgtacttccttgtcagcttagtggcactggataatcttatcctggcggttatggcctatgatcggtacgtggccatctgttgcccgttacactacaccacagctatgagtccgaaactctgtatcctgttgctgtctctgtgttgggtcctgtcagtgctttatggtctgatacacacgctgctcatgacaagggttacattctgcgggtcgcggaaaattcactacattttttgtgagatgtatgttttgttgcgaatggcttgctccaatatccagattaatcacactgtcctcattgctaccggttgtttcatttttctgatcccctttggtttcgtaataattagctatgtccttatcatccgcgccatacttcgcatccctagcgtttctaaaaaatataaggcattcagcacctgcgccagccacttaggggcagtgtctctgttttatggtaccctctgcatggtgtatctgaaaccactccatacttatagcgtgaaggacagcgtcgccaccgtgatgtatgcagtcgtgacccccatgatgaacccatttatctactcactacggaataaagatatgcacggcgcactagggcgtttactggataaacattttaagcgactcacatag

SEQ ID NO: 198092 - DNA, 939 bp, synthetic construct
  misc_feature 1..939: note = Description of Artificial Sequence: Synthetic coding sequence
  source 1..939: mol_type = other DNA
atgagcggcaccaaccagagcagcgtgagcgagttcctgctgctggggcttagcaggcaacctcagcagcagcacctactctttgtgttcttcctttcaatgtatctggctactgtcctcggtaacttgttaataattcttagcgtgtccatcgatagctgcctgcacacacctatgtatttctttctgtcaaatctctcctttgttgacatctgcttcagctttacaaccgtgccaaaaatgcttgctaaccatattctcgagacacagaccatcagcttttgtgggtgcctcacgcagatgtacttcgtgttcatgtttgtcgacatggacaatttcttgctggccgtgatggcctacgatcattttgttgcagtgtgccaccccctgcattatacagccaagatgacccaccagctgtgtgccttgctagtcgcgggcttgtgggtggtggcgaatcttaatgtgttactccacaccttactgatggccccgctgtcgttctgcgccgacaacgccattacgcacttcttctgcgatgtcactccattgctgaaattaagttgctctgacactcacttgaacgaggtgattattctctctgagggggccctggttatgatcaccccttttctctgcattcttgccagctatatgcacattacatgcacagtgctgaaggtgccgtctaccaaggggcgctggaaggcattctctacttgcggctctcatctggctgttgtcctgttgttctacagtaccattatcgccgtttacttcaatccgttgtcctcccactccgcagagaaggataccatggcaaccgtgctctacactgtagtcacaccaatgctaaacccatttatttatagtctacggaatagatatttgaaaggtgctctcaaaaaggtggtcggaagggtcgtgtttagtgtgtag

SEQ ID NO: 198093 - DNA, 924 bp, synthetic construct
  misc_feature 1..924: note = Description of Artificial Sequence: Synthetic coding sequence
  source 1..924: mol_type = other DNA
atgaaccacagcgtggtgaccgagttcatcatcctgggcctgaccaaaaagccagagctgcagggaatcatctttttgttcttcttgatagtgtaccttgtcgcttttctgggaaacatgttgatcattatcgctaaaatctacaataacacccttcatactcccatgtacgtgtttcttttgacattggccgttgtcgatatcatctgcacaacatctattatcccaaaaatgcttggaaccatgctcacctcagagaataccatctcctatgctggttgcatgtcccagctgtttctgttcacttggtccctgggggcggagatggtcttattcaccacaatggcttacgaccgctacgtagctatctgctttcctctgcactattccacgattatgaaccatcacatgtgcgtcgcgcttttgtcaatggtcatggcaattgcagtgaccaactcatgggtccacaccgcactcataatgcgactgaccttctgtggcccgaataccatcgatcacttcttttgcgagatcccaccacttcttgcgctaagttgcagtcccgtacgaattaacgaagttatggtgtatgttgctgatataaccctggctataggagattttattctgacgtgtatctcctatggcttcatcatcgtggcaatccttcgtatccggactgtcgaaggaaaaaggaaggccttctcaacttgctcaagccatttaaccgtagtgactctgtactactcacccgtgatctacacatacatccggcctgcctcctcttatacttttgagcgtgataaggtagtggccgccctgtacaccttggtgacgccaacactgaatcctatggtttactcttttcagaatcgtgaaatgcaggctggaatccggaaagtgtttgctttcttaaagcactag

SEQ ID NO: 198094 - DNA, 930 bp, synthetic construct
  misc_feature 1..930: note = Description of Artificial Sequence: Synthetic coding sequence
  source 1..930: mol_type = other DNA
atggagaaccggaacaacatgaccgagttcgtgctgctgggcctgacggagaatcccaaaatgcagaagatcattttcgttgtgttctttgtcatatatattatcacagttgttggttatgttttgattgtcgtcacaatcactgccagcccatctttaggttctccaatgtacctaagtttagcctacttgagcttcatcgacgcctgttattcgtcggtcaatacccccaatcttatcacacattcgttgtacggcaagaaggctattctgtttaacgggtgcatgactcaggttttcggcgagcactttttcggcggggcggagggcatactgctgacggttatggcttacgatcactatgttgccatctgcaaacctttgcattatatgacaatcatgaatcagtgtgtctgcgctctgctcatgggtgtagtttggatgggaggatttcttcacgctacaatccagattctgtttatctttcaactgccattctgcggacctaatgtgatcgatcactttatgtgcgacctgaacccactgctcaacttggcgtgcaccgacactcacatgttggaattattcatcgccgccaattctggctttatctgcctgcttaacttcgccctgttgcttgtgtcctacgtcgtgatcctctgttcgttgaggactcactctctggaggccaggcataaagcactgtctacctgcgtgtcacacatcacagttgtgatcctgttctttgttccttgtattttcgtgtacatgagaccggctgccacgctcccaatagacaaagctgtggctatcttttacacaatgatcacccccatgctgaaccccctgatctatactcttaaaaacgcccaaatgaagaatgctatcaggaaattatgcagtagaaaggatatctccggtgacaagtag

SEQ ID NO: 198095 - DNA, 978 bp, synthetic construct
  misc_feature 1..978: note = Description of Artificial Sequence: Synthetic coding sequence
  source 1..978: mol_type = other DNA
atgttcctgtacctgtgcttcatcttccagcggacctgcagcgaggaaatggaggaggaaaacgccacacttctgaccgagttcgtgttaaccggattcctgcaccaacctgattgtaaaattcctctgttcctggcgttcctggtgatttacctgataacaattatgggcaacttaggactcatcgttttgatatggaaggacccccatctgcacattcccatgtacctgttccttggaagcctggcattcgtggacgcaagtctctcttccacagtcacacctaagatgttgattaacttcctcgcgaagagcaaaatgattagtcttagcgagtgcatggttcagttttttagcctggtgacaaccgtgaccacggagtgctttctgttagccaccatggcttacgacagatacgttgccatttgcaaggctctgctctacccggtcatcatgacaaacgagctgtgcatacagctgctagtattaagttttattggcggcctgctgcatgccctgatccatgaggcctttagttttagattaaccttttgcaatagcaacatcattcagcacttctattgtgacatcataccattactaaaaatcagttgtacagattctagcatcaactttctcatggtgttcattttcgccggtagcgtccaagtgtttaccattgggacgatcttaattagttacacaataatcctgttcaccatcttggagaaaaaatcgattaaggggattcggaaagcagtttccacatgcggcgctcatctgctgagcgtgtcactttattacgggcccctgaccttcaagtatctggggtccgcatcaccccaagcggacgatcaggacatgatggagagcctcttttatacagtgatcgtgcccctcttgaatccaatgatatacagcctgaggaataagcaggttatagcctccttcaccaagatgtttaagtccaatgtttag

SEQ ID NO: 198096 - DNA, 963 bp, synthetic construct
  misc_feature 1..963: note = Description of Artificial Sequence: Synthetic coding sequence
  source 1..963: mol_type = other DNA
atggagaccggcaaccagacccacgcccaggagttcctgctgctgggtttttctgcgactagcgaaattcagttcattctgttcgggttgttcctgtcaatgtacctggtcacgttcactggaaacctactaattattctggctatctgctccgattctcacctccacacgccgatgtacttttttctttctaacctcagtttcgccgatctatgttttaccagcaccacagtgcctaagatgctgttgaatattctgacgcagaacaaatttattacgtacgccggatgtctaagccagattttcttctttacctcattcggatgtctggacaatctgcttctgacagtaatggcctacgaccgcttcgtggctgtgtgtcacccacttcattacacagttattatgaatccgcagctgtgtgggctgttggtcctcggaagttggtgcatatccgtcatgggcagcctcttggagactctcaccgtactgaggttgtccttttgtaccgagatggagataccccactttttttgcgatctgctggaggtgctgaagttggcatgttccgacactttcattaacaatgtcgtcatctacttcgccactggtgtgctgggagtgatttcatttactggcatattcttcagctattataaaatagttttttcaatattgcggatctcaagtgctggccgcaagcacaaggctttttccacatgcgggagccatctgagtgtcgtgaccctattctatggcaccggattcggagtgtatctgtcaagcgctgccaccccatccagccgtaccagcttggtagctagcgtgatgtacactatggtgacccctatgctgaaccccttcatttactccctaagaaatactgacatgaagcgggcactgggacgattgttaagtcgggctacattcttcaacggagacatcactgccgggttgtcctag

SEQ ID NO: 198097 - DNA, 960 bp, synthetic construct
  misc_feature 1..960: note = Description of Artificial Sequence: Synthetic coding sequence
  source 1..960: mol_type = other DNA
atggagcggggcaaccagaccgaggtgggcaacttcctgctgctgggatttgccgaagacagtgacatgcagttgctcctgcatggcctattcctgtctatgtaccttgtgactatcatcggaaacctgctaatcatactgacaatatcctccgatagccacctgcacacgcccatgtatttttttctcagtaatctgtccttcgcggacatctgctttacatcgaccaccgtgcccaagatgcttgtgaacatccagacacaatccaagatgataaccttcgccggatgcctgactcagatattcttcttcattgcctttggctgtcttgacaacctgctgcttacaatgaccgcatacgacagattcgtagctatctgctatccactgcattacaccgttattatgaatccacggctttgtggcttgctggtgcttggcagctggtgcatctcggtgatgggatccttgttggagactttgaccatcctgcgtctttccttttgtacaaacatggagattcctcacttcttctgtgacccgtcagaggtgctaaagttagcatgttccgacacattcattaacaatattgttatgtacttcgtcacaatcgtgcttggggtgtttcctctctgcggcatactgttcagttactcccagatcttctccagcgtgttgcgcgtctcagcccgcggccagcacaaagccttcagcacatgcggatctcatctctcggtcgtctccctgttctatgggaccggactcggggtttacctgagctccgcggttacgccacccagtcgtactagtctggctgcctcagttatgtataccatggtaacccccatgctgaaccccttcatttattccttaagaaacaaggacatgaaaggttctctcggacgcctgctgctccgcgcaaccagcttaaaggagggcactatagcaaagctgtcctag

SEQ ID NO: 198098 - DNA, 939 bp, synthetic construct
  misc_feature 1..939: note = Description of Artificial Sequence: Synthetic coding sequence
  source 1..939: mol_type = other DNA
atggaggccgagaacctgaccgagctgagcaagttcctgctgctgggcctgtcggatgaccccgaactccagcccgtgctctttgggctcttcctttcgatgtatttggtgactgtgttagggaacctgcttataatcctggccgtgtcctccgacagccacctgcacactcctatgtatttcttcctcagcaatctatcgttcgtcgacatctgctttatctcaaccactgtgcccaaaatgttggtatccattcaggctcgtagtaaggacatctcttatatgggttgcttgacccaggtgtattttctcatgatgtttgctggaatggacactttcctattggccgtaatggcctatgatcgattcgtagccatttgtcacccgctgcactacactgtgataatgaatccatgcctgtgcggcctgttggtcctcgccagttggtttatcatattctggtttagtctggtacacattctgctcatgaaacgcctcacatttagcacagggactgagattccacacttcttctgtgaacctgcccaggttcttaaggtggcctgtagcaacactctgctcaataacattgttctgtacgtcgctacggcccttcttggagtattcccggtggcggggatcctgttctcctattcccaaattgtcagctccctgatggggatgagctctacaaaaggcaaatacaaagcatttagcacttgcggcagccacctgtgcgtggtgtccctgttctacgggacgggcctgggggtgtatctttcgagtgcagttactcattctagtcagtcatcctccaccgcctccgtgatgtacgctatggtaaccccaatgctgaatcctttcatttacagcctgagaaacaaagacgtgaagggcgccttggagagactgctttcaagggccgacagctgcccatag

SEQ ID NO: 198099 - DNA, 972 bp, synthetic construct
  misc_feature 1..972: note = Description of Artificial Sequence: Synthetic coding sequence
  source 1..972: mol_type = other DNA
atggacagcgacgccagcctggtgagcagccggcccagcagccccgaaccagatgatctgtttctgccagcacgatccaaaggaagttctgggtctgcgttcacaggaggaacggtgagcagtagcaccccatccgactgtccaccagagctttcggccgagcttcgcggcgcgatggggtcggctggagcgcacccaggcgataagctcggtggcagcggtttcaagtcttcttcttcctcaacgtctagtagcacttcatcagccgcggcatctagcactaaaaaggacaagaaacagatgaccgagccagaactgcaacagctgaggctgaagattaatagcagggaaaggaagaggatgcacgacctaaacatcgccatggatggactgagggaggtcatgccttacgcgcacggcccttctgtccggaaactgtctaagatcgcaacattgctgttggcgcggaactacattctgatgctgacgaacagcctggaggagatgaagcgcctggtgtccgagatctatggcggccatcacgctggcttccatcccagtgcttgcggaggtctggcacactccgcccccttgcccgctgccaccgctcaccccgctgccgcggcccacgccgcccaccatcctgccgtgcaccatccgattctgccacctgccgctgcagcagcggcagccgcggcggccgctgccgccgttagtagcgcatccctccctggtagcgggctgcccagtgtcggttccattagacctccccatggactgttgaagtccccctcggccgccgccgcagcaccactgggaggaggaggtgggggctccggcgcttctggaggcttccagcactggggggggatgccatgtccctgctcaatgtgccaggtacctccgccccatcatcatgtgtcggcaatgggggcaggatccctgcccagactgactagtgacgcaaagtag

SEQ ID NO: 198100 - DNA, 972 bp, synthetic construct
  misc_feature 1..972: note = Description of Artificial Sequence: Synthetic coding sequence
  source 1..972: mol_type = other DNA
atggacagcgacgccagcctggtgagcagccggcccagcagccccgagccagacgatctgttcctgccggcaaggagtaaaggctctagcggtagcgccttcacaggcgggacagtgagttcctctaccccatcagactgcccccccgaactgagcgccgagctgagaggcgcaatgggttctgccggtgcccaccccggggataagctgggcggctccggctttaaaagttcatctagtagcacttcctcctccaccagctccgcagcagcctcctcaactaagaaggacaagaagcagatgaccgaacccgagcttcagcaactgaggttgaagattaattcacgggagcggaagcgaatgcatgatttgaacatcgcgatggacggtctccgcgaggtgatgccttatgctcatggccccagcgtcaggaaactgtcgaagatcgccactctgctcctggcacggaactatatcctgatgctcaccaattcacttgaggagatgaaaagattggtctcagagatctacggtggtcatcatgctggctttcatccgagcgcttgtggaggcctggcgcactccgctcctctgcctgctgctacggcccacccggccgccgcagcgcatgccgcgcaccacccagctgtgcaccacccaattctccctccggcggccgccgcggccgccgctgccgccgccgcagccgctgtgagctcggctagcttacctggatccggattgccttcggtggggtctattcgccctccacatggcttgttgaagagcccatcagccgccgctgctgcccctctcggcgggggtggaggcggatccggtgcaagcggcggattccaacactggggtggaatgccttgcccttgctcgatgtgtcaggttccgcctcctcaccaccacgtgtctgcaatgggtgccggatcactcccccgtctcacctcagacgcaaaatag

SEQ ID NO: 198101 - DNA, 189 bp, synthetic construct
  misc_feature 1..189: note = Description of Artificial Sequence: Synthetic coding sequence
  source 1..189: mol_type = other DNA
atggacagcgacgccagcctggtgagcagccggcccagcagccccgagccggatgacctgtttctgccagcccgtagcaaggggagcagcggatcagccttcaccggcgggactgtgagtagtagcaccccctcagattgccccccggagctctctgcagaactgagaggagctatggggtcagcctag

SEQ ID NO: 198102 - DNA, 1323 bp, synthetic construct
  misc_feature 1..1323: note = Description of Artificial Sequence: Synthetic coding sequence
  source 1..1323: mol_type = other DNA
atggagtaccagatcctgaagatgagcctgtgcctgttcatcctgctctttttgactccgggtatactgtgcatttgtcctctgcaatgcatttgcaccgagcgacaccgtcatgtggattgtagcggcaggaacctgagcactctccccagtgggctgcaggagaacataatccacttaaacttgtcttataatcattttacagatctgcataaccagctcacacaatacactaacctgcgcacgctggatattagtaataacaggctcgaatccctccctgctcacttgccaagatctctgtggaatatgtcagcggctaacaacaatattaagctcctggataagtccgacacggcataccagtggaaccttaagtatttagacgtttccaagaacatgctcgagaaagtggtcctgattaagaatacgctgcgcagcctcgaagtactgaaccttagtagcaacaaattgtggacggtacctaccaatatgccgtctaaacttcacattgtggatctctctaataatagcctgacccagattctccccggaaccctcatcaatctcactaacctcacacatctgtatttgcacaacaataagtttaccttcatccccgatcaatcattcgatcaactgttccaactgcaggagattacactctacaataacaggtggtcttgcgaccataagcaaaatatcacatacctgctgaaatggatgatggaaactaaagcccatgttattggcactccatgttctacccagatatcctccctgaaagagcataatatgtaccccacaccatctggattcacgtcctctctttttacagtgtcaggcatgcaaactgtggataccattaatagcctctcagttgttacgcaaccgaaggttacaaagatccccaaacagtacaggactaaggagaccacttttggggccacactcagcaaggatacaacttttacatccaccgacaaggctttcgtgccttacccagaggacacgagcacggagactatcaactcccacgaggctgctgcagctaccctgaccatccacctgcaggatgggatggtcaccaacacatcattaacgtccagcacaaaaagctcaccgacaccgatgacactgagcattacaagcggaatgccaaacaatttcagcgagatgcctcagcagtcgacgaccctgaacctgtggagagaggagacgacgacaaacgtgaagaccccgctaccatccgttgcgaacgcttggaaagtcaatgcctctttcctcctgctgctgaatgtagtggtgatgttggctgtttag

SEQ ID NO: 198103 - DNA, 819 bp, synthetic construct
  misc_feature 1..819: note = Description of Artificial Sequence: Synthetic coding sequence
  source 1..819: mol_type = other DNA
atgaacagcgacagcagcagcgtgagcagccgggccagcagccccgatatggatgagatgtatctgagagaccaccatcacagacaccaccaccaccaagaatcgcgactcaattctgtgtcctctacacagggagacatgatgcagaagatgcccggcgaatcactctctagagcaggcgcaaaggccgccggtgagtcttcaaagtataagatcaaaaagcaactctcagagcaggacttgcagcaactgcgcctgaaaatcaatgggagggaacgcaaacgcatgcatgatttgaacttggccatggacggtttgcgcgaagtgatgccatatgcacacggcccatccgtgcggaagctgagcaaaatcgcaaccctcctccttgccagaaactatatccttatgttaacttcttcactagaggagatgaagagactggtcggagagatatatggagggcaccactctgcttttcattgcggcactgtgggccactctgccggtcatcccgcgcatgctgctaacagcgtgcacccagtccatccaattctggggggcgctctgtcttcagggaatgcttctagccccctaagcgctgccagtctccctgccatcggcactataaggcctcctcactccctgttaaaggctccaagcacacccccagcgctacagttaggcagcggattccaacactgggctggactcccgtgcccttgtaccatatgccaaatgcccccacctccacacctgagtgcattgtccacagctaatatggcccggctctcagccgagtcaaaagacttgctcaagtag

SEQ ID NO: 198104 - DNA, 375 bp, synthetic construct
  misc_feature 1..375: note = Description of Artificial Sequence: Synthetic coding sequence
  source 1..375: mol_type = other DNA
atgtggaagggctgcctgaccctgtacaccggccggggcggcgagcttcaaaaaattggggaattttgcatggtgtatagtgaggtgccaaacttttctgagccaaaccccgattacagggggcagcagaacaagggcgcccagtcagaacagaagaataattcaatgaacagtaacatgggaacgggtacattcggtccagtgggcaatggtgttcatacagggcctgaatccagagagcatcagttctcgcacgccggtagatcaaacggaaggggtctgattaatccccagctacagggaaccgcaagcaatcagaccgtcatgaccacgatcagcaatggaagggatccacgcagagccttcaagcgatag

SEQ ID NO: 198105 - DNA, 375 bp, synthetic construct
  misc_feature 1..375: note = Description of Artificial Sequence: Synthetic coding sequence
  source 1..375: mol_type = other DNA
atgtggaagggctgcctgaccctgtacaccggccggggcggcgagttacagaagattggcgagttttgcatggtgtattctgaggtcccaaacttttccgaacccaacccagactaccgggggcagcaaaacaagggggcacagtctgagcagaaaaacaacagcatgaacagcaacatgggtactggcacctttggtcccgtgggaaacggcgtccacactggaccagagtccagggagcaccagtttagtcacgcagggcgctcaaacggtcggggccttatcaatccacagctgcaggggaccgcctcaaaccagacagtgatgacgacaattagcaatggccgagaccccagacgagccttcaagcggtag

SEQ ID NO: 198106 - DNA, 615 bp, synthetic construct
  misc_feature 1..615: note = Description of Artificial Sequence: Synthetic coding sequence
  source 1..615: mol_type = other DNA
atgaaccgggtgaacgaccccctgatcttcatccgggacatcaagccagggctcaagaatctgaacgttgtgtttattgtgttggaaatcggtagagttacaaagacaaaagacgggcatgaggttaggagctgtaaggtggccgacaagacgggtagcataaccatctcagtttgggatgagatcggcggcctgattcaaccaggcgatattattcgtttaactcgcgggtatgctagtatgtggaagggctgtctaaccctgtatacaggtaggggcggagaattgcagaagattggagaattttgcatggtgtactccgaagtgcctaattttagcgagcctaaccccgattaccgaggccagcagaataaaggggcccagagtgagcagaagaacaactcaatgaattcaaatatgggaaccggtaccttcggcccggtcgggaatggggtgcatactggacccgaatcacgagagcatcagttttcacatgccggtcgctctaacggtcgtgggctgatcaatccccaattgcagggcacagccagcaaccagactgtcatgacgacaatctcgaacgggagggatccccgtcgggcattcaagaggtag

SEQ ID NO: 198107 - DNA, 636 bp, synthetic construct
  misc_feature 1..636: note = Description of Artificial Sequence: Synthetic coding sequence
  source 1..636: mol_type = other DNA
atgaccaccgagaccttcgtgaaggacatcaagcccggcctgaagaatctcaacctcatatttatcgtgcttgaaacagggagggtgactaagaccaaggatgggcacgaggttcgaacttgcaaggtggccgacaaaaccggcagcataaatattagcgtgtgggatgatgtgggaaatctgatacagcctggggatatcatacggctcaccaagggttacgcttcggtcttcaagggttgtttaactctctataccggacgaggcggcgatttgcagaagatcggagagttctgcatggtgtacagcgaggtccccaacttctcggaaccaaaccccgaatacagcacccagcaggcacccaacaaagccgtgcagaacgatagcaacccatccgcttctcagcctactacaggcccgtctgctgcctctcccgcctccgagaatcagaatggaaacggtttgtcagccccaccagggcccggcggtggacctcatcccccacacacaccttcacaccctccatctacccggattacacgaagccagcccaaccacacccctgccggaccacccggcccctcctccaacccagtcagcaacggaaaggagaccaggaggtcttctaagaggtag

SEQ ID NO: 198108 - DNA, 636 bp, synthetic construct
  misc_feature 1..636: note = Description of Artificial Sequence: Synthetic coding sequence
  source 1..636: mol_type = other DNA
atgaccaccgagaccttcgtgaaggacatcaagcccggcctgaagaatctaaacttgatttttattgttctggaaactggacgtgtgaccaagacaaaggatgggcacgaggtgcgtacgtgtaaggtggccgataagaccgggagcattaacataagtgtctgggacgacgtcggcaacctgattcagccaggtgatatcataaggctcaccaaaggatacgcttccgtgtttaagggttgtcttaccctgtacaccgggcgcggtggtgacctgcagaaaataggggaattttgcatggtatacagcgaggtacccaatttttcagagcccaatcccgagtattcaacacaacaggcacccaataaggctgtacagaatgactcaaatccaagtgctagccaacccacgaccggaccttcagcagcgtcccctgcttcggaaaaccaaaacgggaacggcttgagtgcacctccgggtcctggcggcggtcctcatccacctcataccccaagccatccccctagcactagaataacacggtcccagcctaaccacacacccgccggaccgcccggccccagcagtaacccggtttccaatggaaaagaaactcgtcgctcctccaagaggtag

SEQ ID NO: 198109 - DNA, 636 bp, synthetic construct
  misc_feature 1..636: note = Description of Artificial Sequence: Synthetic coding sequence
  source 1..636: mol_type = other DNA
atgaccaccgagaccttcgtgaaggacatcaagcccggcctgaagaatcttaaccttatctttatagttctggaaactggaagggttaccaagacgaaggatggacacgaggtgcggacctgcaaggtggcagataaaacaggttccattaacatcagtgtgtgggacgatgtggggaatctcatacagcccggggatatcattcggctgacgaagggatatgcctctgtgtttaaaggttgcttaactctatacaccgggaggggaggggatttgcagaagattggtgagttctgcatggtgtacagtgaggttccaaactttagcgagcctaatcccgaatacagtactcagcaggcccctaacaaagcggttcagaacgattccaaccctagtgcctcccaaccaactactgggccctctgccgcttcaccagcgtccgagaaccagaacggcaatgggctctccgccccccctggccctgggggcggaccccatccgccacatacccccagtcatcccccatcaaccaggatcactcgctcccagcctaaccatacaccagccggaccccctggtccctcctcaaatcccgttagcaacgggaaagagactagaaggagctcgaaaagatag

SEQ ID NO: 198110 - DNA, 459 bp, synthetic construct
  misc_feature 1..459: note = Description of Artificial Sequence: Synthetic coding sequence
  source 1..459: mol_type = other DNA
atgaccaccgagaccttcgtgaaggacatcaagcccggcctgaagaacctgaacttgatatttatcgtactcgagacaggaagggtgactaaaacaaaagatggacatgaagttagaacatgcaaagtagcggacaaaaccggctctattaacattagtgtttgggatgacgtaggcaatctgatccaaccgggcgatatcattcgcttaacaaagggttatgccagcgtctttaagggctgcctgactctgtatacggggaggggaggcgatctccaaaagatcggggagttttgcatggtgtactccgaagttcccaatttctccgagcccaaccccgaatactccacacagcaagcccctaataaggccgtgcagaacgattctaacccgtcagccagccagcccaccaccgggccctcagcggcctcgcccgccagtgagaaccagaatggctag

SEQ ID NO: 198111 - DNA, 435 bp, synthetic construct
  misc_feature 1..435: note = Description of Artificial Sequence: Synthetic coding sequence
  source 1..435: mol_type = other DNA
atgaccaccgagaccttcgtgaaggacatcaagcccggcctgaagaatctgaaccttatcttcatcgtcctggaaactggccgggtgaccaaaacaaaagacggacacgaggttcgcacgtgtaaagtggctgacaaaactggcagcatcaacatttcggtttgggatgacgttggcaacctgatccagccaggcgacattattcggttaacgaaaggctatgcgtctgtgttcaaggggtgcctgactctctacacaggccgaggcggggacctacaaaagatcggtgagttctgcatggtgtactcagaggtgccgaatttctctgagcccaaccctgagtattcaacacagcaggccccaaataaggccgtgcagaatgatagtaatcccagtgcttcacagcctaccactggacccagtgctgccagctag

SEQ ID NO: 198112 - DNA, 2409 bp, synthetic construct
  misc_feature 1..2409: note = Description of Artificial Sequence: Synthetic coding sequence
  source 1..2409: mol_type = other DNA
atgggccacccccccctggagttcagcgactgctacctggacagccccgattttagagaaaggctgaagtgctacgagcaagaattggaacgtactaacaaatttattaaagatgtgattaaggatggaaacgcattaatctccgcgatgagaaactactcttccgccgtacagaaattctcgcagactctgcaatccttccagttcgacttcatcggagacacgctcaccgacgatgagatcaatatagcggagtcgtttaaggagtttgcggaactattaaatgaggtggagaatgagaggatgatgatggtgcacaacgcaagtgacttgttgatcaaacctctagaaaatttcagaaaagagcagattggattcaccaaggagagaaagaagaagtttgaaaaggatggggaaaggttctactctctgcttgaccgccatcttcacctttcgtccaaaaagaaggaatcacagctccaggaagcagatctacaggtcgataaggagcgacacaacttctttgagagctctctggactatgtatatcaaatacaggaggtgcaggaaagcaagaaatttaacatcgtcgagccggtgctggcctttctgcattccctcttcataagcaattctttaactgttgaactgacccaggactttctcccttataagcagcagcttcagctcagcctgcagaacacccgcaatcacttcagctcgacacgggaagaaatggaggagttgaagaagcgcatgaaagaggcaccccagacatgcaaacttcctggacagcccaccatcgaaggatatctgtatactcaagaaaagtgggccttaggaatttcctgggttaagtattactgccagtacgagaaagaaacaaagaccttgacaatgacaccaatggagcagaagcccggagctaaacaggggccactcgacttgacattaaaatattgcgtccggcggaagacggagtccatcgacaagcgattctgttttgatattgagaccaacgagagacccgggaccattaccctccaggccctctctgaggccaatcggcgactgtggatggaggctatggacggaaaggaaccaatctatcacagcccaatcactaaacagcaagaaatggagctgaatgaggttgggtttaaatttgtaaggaaatgcattaacattatcgaaacaaagggtatcaaaacggaaggcctataccgcacagtgggctccaacatacaggttcagaagctgctgaacgcctttttcgaccctaaatgtcctggggacgttgactttcacaattctgattgggacatcaagacgatcaccagttctctgaaattctatctccggaacctcagtgaacccgtaatgacctacagactgcataaggagctggtaagtgctgctaagtctgataatctggattaccgtcttggagctatccactcacttgtttataagttacccgaaaaaaacagagagatgctggaacttcttatcaggcacctggttaacgtctgtgagcacagcaaggagaatttgatgactcctagcaacatgggcgttattttcggtcctacattgatgcgcgcccaagaggacaccgttgccgccatgatgaatatcaagtttcagaatatcgtggtagaaatcttgattgagcatttcggcaaaatctaccttggcccccccgaggaatccgccgctcctccagtgcccccccctagagtgaccgccagaagacacaagcccattaccatttccaaaagactgttacgagaaaggacggtgttttatacttcaagcttggacgagtccgaagatgagattcagcatcaaacccctaacgggacgattacatccagtatcgagccacccaagcccccccagcatcctaagctgccgatccaacgcagcggtgagacggacccgggaagaaaaagtccttccaggcctatcctggacggaaagctcgagccttgccctgaggtggacgtgggtaaactggtatctagacttcaggatggaggcaccaagattactccaaaggccacaaacggtcccatgcccggctcaggccccactaaaacgccttcctttcacattaagcgacctgccccaaggccactcgctcaccacaaggaaggggacgccgattcgttttccaaggtgaggccgcctggcgaaaagccaacgattatcaggccgcctgtgcgccctccagatcccccttgccgcgctgcaactcctcaaaagcctgaaccaaagccagacattgtagcaggaaatgccggcgagatcacaagctctgtggtggccagtaggacacggttcttcgaaacggcctctaggaagactggctcaagccagggccgcctgccaggcgacgagagctag

SEQ ID NO: 198113 - DNA, 2085 bp, synthetic construct
  misc_feature 1..2085: note = Description of Artificial Sequence: Synthetic coding sequence
  source 1..2085: mol_type = other DNA
atgggccacccccccctggagttcagcgactgctacctggacagccctgactttcgcgagcgacttaaatgttacgagcaagaactcgagagaaccaataagttcattaaagacgtgatcaaggacgggaacgctctcattagtgcaatgagaaactactcctccgctgtgcagaagttttctcaaacgctgcagagcttccagtttgatttcatcggagataccctgaccgatgacgagataaatatcgccgagagtttcaaagagtttgccgaactgcttaacgaagtggagaatgagagaatgatgatggtccacaacgcctcggacctgctcattaaaccacttgaaaatttcaggaaagaacagatcggattcacaaaggaacgcaaaaaaaaattcgagaaagacggtgaacggttttattccctgcttgacaggcacctgcatctttcctcaaagaagaaggaaagccagcttcaagaagccgatctccaggttgacaaggagcgtcacaactttttcgagagctccctcgactacgtgtaccaaattcaagaagtgcaggaatccaagaaattcaacattgtagaaccagtacttgccttcctccacagcttattcatttctaactccctgaccgtggagctgacccaagacttcctgccatataagcagcagttgcagctgtctcttcagaatacaaggaaccacttctccagtactagggaggagatggaagaactcaaaaagcgaatgaaggaggccccccaaacatgcaaattgcctggacagcccacgatcgagggctatttgtatactcaggaaaagtgggcgctagggatttcctgggtaaagtattattgtcagtatgaaaaagaaacgaaaacattgactatgactccaatggagcaaaagcccggagctaaacagggacctttagatctgactctcaagtactgtgtgcggagaaagacggagagcatcgataagcgcttctgcttcgacatcgagaccaatgagcgccccggcactattacgctgcaggccctgtcagaggccaaccggagactgtggatggaggcaatggacggcaaagagcctatctaccacagtccgatcaccaaacagcaggagatggaactgaatgaggtgggctttaagttcgttaggaaatgcataaatatcatcgagacaaagggcataaaaactgaaggcttgtataggacagtgggttcaaatattcaggtccagaagcttctgaacgccttcttcgatccgaaatgtccaggcgatgtagacttccacaatagcgattgggatatcaaaacaattaccagctccctgaaattctacctgcggaacctcagtgaacctgtcatgacatatcgactccacaaggagctggtttctgcagccaagtccgacaacctggattatcggctcggggccattcactctctggtctacaagttaccagaaaaaaacagagagatgctggagctacttattcgccatcttgtgaatgtctgcgagcatagtaaagaaaatctcatgaccccaagcaacatgggcgtgatatttggtcccacgctcatgcgagcacaagaagatacggtcgctgcaatgatgaacataaaattccagaatatagtggtcgagatactcatcgagcacttcgggaaaatatacctgggaccccctgaggagtccgccgctcctcccgtgccacccccaagagtgactgcccgcaggcacaagcccatcacgatctctaaacgcctgctgagagagcgcaccgtgttctacacctcatcgctcgatgagtctgagggcgatgccgattcattctccaaggttagacctccaggcgagaaaccaactataatcaggccccctgttcgccctcctgaccccccatgcagggctgctacacctcagaagccagaacccaaacccgacattgtggccggcaacgccggagaaatcacgagttccgtggtcgccagccgcacgcgctttttcgagacagccagtcggaagacaggaagctctcaggggagactcccgggagatgagtcttag

SEQ ID NO: 198114 - DNA, 225 bp, synthetic construct
  misc_feature 1..225: note = Description of Artificial Sequence: Synthetic coding sequence
  source 1..225: mol_type = other DNA
atgctggagctgctgatccggcacctggtgaacgtgtgcgagcacagtaaagagaatctcatgactccttctaacatgggcgtaatttttggtccgactctcatgagagctcaggaggacaccgtggccgcaatgatgaacatcaagttccaaaatattgtggtggaaatattgatagagcactttgggaaaatctcctcattctttctgcaccggagtatttag

SEQ ID NO: 198115 - DNA, 3111 bp, synthetic construct
  misc_feature 1..3111: note = Description of Artificial Sequence: Synthetic coding sequence
  source 1..3111: mol_type = other DNA
atggccagcagcgtgggcaacgtggccgacagcaccggcctggccgaattggcccacagagaataccaggccggtgactttgaggcagccgaacgccactgcatgcaattgtggcgccaggagcctgataataccggcgtgctactgctgctttcttctatccacttccagtgtcggcgcttggatcgatcagcccattttagcaccctggccatcaagcagaatcccctcttggcggaagcctactctaacctgggcaacgtctacaaggaacgtggccagcttcaagaggcaatcgaacattatcggcacgctcttaggttgaaacccgacttcatagatggctacataaatctggccgccgccctggttgctgccggcgatatggaaggcgccgttcaggcctacgtgtctgctctgcagtataaccctgacctgtattgcgtcaggtcggatttaggaaatctgctaaaggcactcgggaggctggaggaggccaaggcttgttatcttaaagcaatcgagacccagccgaactttgccgtagcctggagtaacttggggtgcgtgttcaatgcgcaaggtgaaatttggttggccatacaccattttgaaaaggctgttacccttgaccccaatttcctggatgcctacattaatctcggaaatgtgttaaaggaagccagaatctttgaccgggcggtcgccgcatacctaagggcactctcgctgagccccaatcacgcagttgtgcacgggaatctagcatgtgtgtattatgagcagggcctgatagacttggccatcgatacttatcgtcgcgctatcgagcttcaaccccactttcctgacgcctactgtaacctggctaacgctctgaaagagaaaggttctgttgctgaagccgaggactgttacaatacagccttaagattgtgtccgacccatgctgactcattaaacaacctggctaacataaagcgggagcagggcaacatcgaggaggcagttcgcctctacagaaaggcccttgaggtgtttcccgagttcgccgcggcccattcaaacttggccagcgtattacaacagcagggaaaactgcaagaagcactaatgcactataaagaggccatacgtatctctcctacctttgctgatgcgtactctaacatgggaaacactctgaaagagatgcaagacgtgcagggcgccctccagtgctatactcgcgctattcagattaaccctgcctttgctgacgcacactctaatctcgcttccattcacaaggacagcggaaacattccagaggctattgcaagctataggaccgccttgaagctcaaacctgattttcctgacgcctactgtaatctcgcgcactgccttcagatcgtgtgcgactggaccgactatgacgagaggatgaaaaaacttgtgagtatcgttgccgatcagttagagaagaacagacttccatctgtccacccacatcactctatgctgtatcccctgagccacggtttcagaaaagcgattgccgaacgacacgggaatttgtgcctcgacaagattaatgtgctgcacaagccgccctatgagcacccaaaagacttgaagctctccgatggtaggctcagagtcggttacgtgtccagcgatttcggcaatcaccctacgtcccatctgatgcagtccataccgggaatgcacaaccccgataaattcgaagtcttttgttacgccctgtcacctgatgatggcactaatttcagggtgaaagtcatggctgaggccaaccacttcatcgaccttagccagattccatgtaacggtaaagccgccgatcggattcaccaggatggaattcacattctggttaatatgaatggatacacaaagggggcccgcaacgaactctttgccctgcgccctgcacctattcaagccatgtggctgggctatccggggacttccggggccctgttcatggactatattattaccgatcaggaaaccagccccgcagaggtggcagaacaatatagtgagaaactcgcctatatgccgcacactttcttcattggcgatcacgccaacatgtttccccatttgaaaaagaaagccgttatcgacttcaagagtaatgggcatatttacgataaccggatcgttcttaatggtatagacctgaaggcatttctcgatagcctccctgacgttaaaatcgtaaaaatgaaatgccccgatggcggcgataatgccgatagctccaatacggcactgaatatgcctgttatccccatgaacaccattgcagaggcagttatagaaatgatcaacagaggccagattcagatcactattaacggttttagtatcagcaatgggttggcaactactcaaatcaataataaagctgctactggcgaggaagtaccccgtactatcattgtgaccacgaggagtcagtatggcttgccagaggatgcaatcgtctactgtaatttcaaccagctgtacaagattgatccgtccaccctgcagatgtgggctaatatactcaagcgagtcccaaattcagtgctctggttattgcggttccctgctgtcggcgaacctaatatacagcaatacgcccaaaatatgggtctccctcagaatcggattatcttttctcctgtagcccccaaggaggagcatgtccgcagggggcagctggctgacgtgtgtctggacactcccttgtgtaatggacacacaacgggaatggatgtcttatgggcgggaacgcctatggttaccatgccaggagagactttagcctcacgcgtcgccgcttcccagctgacgtgtctgggctgtctggaactcattgccaaaaatcgtcaggaatatgaagacatagccgttaagctgggtacagatctggagtatcttaaaaaggtgcggggtaaggtgtggaagcagcgcatatcatcacctctattcaatacaaaacagtacacgatggagctagaaagactctatctccagatgtgggagcactacgccgccgggaataagcccgatcacatgattaagccagtggaagtaaccgagagtgcatag

SEQ ID NO: 198116 - DNA, 3141 bp, synthetic construct
  misc_feature 1..3141: note = Description of Artificial Sequence: Synthetic coding sequence
  source 1..3141: mol_type = other DNA
atggccagcagcgtgggcaacgtggccgacagcaccgagcccaccaagaggatgctgagttttcagggtctcgctgagctggcccatcgggagtaccaagctggtgatttcgaggcggcagaaagacattgtatgcaattgtggagacaggagccagataatacaggagtattgctactactgtcatctatccatttccaatgcaggcgcctcgatcgaagcgcgcactttagcacccttgcaataaaacagaacccactgcttgctgaggcgtacagcaatcttggaaatgtgtacaaggagcggggccagttacaggaagcgattgaacactatcggcatgctctccggctgaagccggacttcattgacggctacataaatttagctgccgccctcgtagcggctggagacatggaaggtgccgtgcaggcctatgtaagtgcattacagtacaacccagatctatactgcgtgcggtcagacttaggcaatcttcttaaagcccttggccgccttgaggaggcaaaggcttgttacctgaaggccatcgaaacccagccaaactttgcagttgcctggtcaaacttgggatgcgtgtttaacgcccaaggggaaatctggcttgccatccaccattttgagaaagccgtcactctggaccccaactttcttgacgcatatataaacctgggcaatgtgctgaaggaggcgcgcatttttgaccgagcagttgccgcctacttgcgagcgctatctctatcccctaatcacgctgtggtgcatggcaatttggcctgtgtttactacgagcaggggcttatcgatctggcgattgatacgtacagacgagccattgagctgcagccccattttcctgacgcctattgtaatctggcaaatgccctcaaagagaaaggctctgtcgcagaggcagaagattgctataataccgccctaagattgtgtcccacacacgccgactcactgaacaacctggccaacataaaaagagaacagggcaacatcgaagaggccgtccgcctctaccgaaaagccctggaggtttttcccgagtttgccgcagcacattccaaccttgcatcagtcctgcagcaacagggaaaacttcaggaagccctgatgcattataaagaagccattcggatctctcctaccttcgcagacgcttactcgaacatggggaacaccctgaaggaaatgcaggatgtccaaggggccctgcaatgttatacccgcgccattcagattaatcccgcttttgctgacgcacactctaacctggccagcatacacaaagattcaggtaacattcctgaagcaattgcctcctaccgcaccgccctgaaactcaagcccgactttcctgacgcatattgtaacctggcacactgtctgcagatcgtctgtgactggacagattacgatgagaggatgaagaaacttgtgtcaattgtcgccgaccagctggagaagaaccgactaccctccgttcacccgcaccacagcatgctctatccattgtcccacgggttcaggaaagctattgctgagagacacggcaatttgtgtctggataaaatcaacgtgctgcacaaacctccatacgagcaccctaaggacctcaagctgtccgacgggcggctgagggtgggttatgtctcatccgactttggaaatcacccaacatctcatctgatgcagagcattcccggaatgcataaccccgacaaatttgaagtgttttgttacgcactgagccccgatgacgggactaattttagggtaaaggttatggctgaagctaaccattttatcgatctctctcaaataccctgcaacggcaaagccgcagataggattcatcaggatgggatacacatccttgtaaacatgaacggctataccaagggagcacgcaacgaactgtttgcactgcgaccggctcctattcaggccatgtggctgggttaccccggaaccagcggagccctattcatggactacattattaccgaccaggaaacttctccagcggaggtggccgaacagtattcagagaaactggcatacatgccgcacactttcttcattggggatcatgctaatatgttcccgcatctgaagaaaaaagcggttattgacttcaaatccaatggccatatctacgataacagaattgtgctgaatggaattgacttgaaagcattcctcgacagtctccctgatgttaagatcgttaagatgaagtgtccagacggcggcgataatgccgattcttctaacacggcacttaacatgccggtaatcccgatgaacacaatagctgaagctgtgatagaaatgatcaataggggccagattcagattactattaacggcttttccatctccaacgggctggccacaacccagatcaataacaaagcagctaccggagaagaggtacctcgtacaataatcgtgaccactcggagccagtacggcctccccgaggatgcaattgtatactgcaatttcaatcaactgtataaaatagatccctcaaccttgcagatgtgggctaatatcctgaagcgtgtgcccaactccgtcctgtggttgttacggttccctgctgtgggggagcctaacattcagcagtacgcacagaacatggggctgccacagaacagaataatcttttctcccgtggctcctaaagaggagcacgttagaagaggacagttagcagacgtgtgtctggatacacctctgtgtaatgggcatacaactggcatggacgttctctgggctggcacgccaatggtaacaatgcctggggaaaccctggcgagtagagtggctgctagccagctaacgtgcctcggatgtctggagctgatcgccaaaaacagacaggaatacgaggatatcgccgtcaagctgggtacagatttggagtacttaaaaaaggttaggggcaaagtttggaaacaacgcatttcttccccgctgtttaacaccaagcagtacactatggagctcgaacgcctgtacttgcaaatgtgggagcattatgcagcaggtaacaagccagatcatatgattaagccagtggaagtaacagaatctgcttag

SEQ ID NO: 198117 - DNA, 330 bp, synthetic construct
  misc_feature 1..330: note = Description of Artificial Sequence: Synthetic coding sequence
  source 1..330: mol_type = other DNA
atgagcatcaccgacgtgctgagcgccgacgacatcgccgccgccctccaggaatgccgtgaccctgacactttcgagccccagaagttcttccagacatcagggctatctaagatgtcagccaatcaggtaaaggatgttttcaggtttattgacaacgatcagtcaggctatctcgatgaagaggagctcaagttcttcctgcaaaaatttgagagtggggcccgggaattaactgaaagcgagaccaaatctctgatggccgcagccgacaatgacggggatggtaagattggtgccgaggagttccaagagatggtacattcttag

SEQ ID NO: 198118 - DNA, 330 bp, synthetic construct
  misc_feature 1..330: note = Description of Artificial Sequence: Synthetic coding sequence
  source 1..330: mol_type = other DNA
atgagcatcaccgacgtgctgagcgccgacgacatcgccgccgccctgcaggaatgccgggaccctgacacattcgaacctcagaagttttttcagacatccgggctttctaagatgtcggcaaatcaagtcaaggacgtgttccgttttatagacaacgaccagtcaggctaccttgatgaagaagaactcaagttctttctccagaagtttgaaagcggcgcccgagaattgacagaaagcgagactaaaagcttaatggctgccgcagacaatgacggagacggcaagataggagctgaagagttccaagagatggtgcatagctag

SEQ ID NO: 198119 - DNA, 1638 bp, synthetic construct
  misc_feature 1..1638: note = Description of Artificial Sequence: Synthetic coding sequence
  source 1..1638: mol_type = other DNA
atgccccccttcctgctgctgacctgcctgttcatcaccggcaccagtgtctcccctgtggccctggatccgtgctctgcttacataagcctcaatgagccctggcggaataccgaccaccagctggacgagtctcaggggccacccctgtgtgacaatcatgtcaacggggaatggtaccatttcactggaatggcaggcgacgccatgcccactttttgcattcctgagaaccactgtggcacccacgcccctgtatggcttaatggctcccatccgctcgaaggtgacgggattgtgcaaagacaagcttgtgcttcattcaacggtaactgctgcctgtggaacaccactgtggaggtgaaggcatgcccagggggatattatgtgtacagactcaccaagccctccgtatgcttccacgtctattgcgggcatttttatgatatctgtgacgaggactgtcacggctcttgttccgatacttccgagtgtacgtgtgccccaggcacagttctgggacctgaccgtcagacctgcttcgacgagaacgaatgtgaacagaacaatggtggatgttcagagatttgtgtcaacctaaaaaactcctacaggtgtgagtgtggcgtgggacgcgttctccgcagcgacggcaaaacgtgcgaagatgtggaggggtgccacaacaataatggcgggtgctctcactcttgtttgggttcagagaaagggtaccaatgcgaatgtccccgcgggctggttctttctgaagacaatcacacctgccaagtgccagtgctctgcaagtccaacgctatcgaagtgaacatccccagagagctcgtcggcggcctcgagctctttctaaccaacaccagttgtaggggcgtcagtaatgggacacacgtgaacattctgttcagtctgaagacgtgtggcacggtggtggacgtggtgaatgataagatagtggcctcaaacctggtcactggtcttccaaagcagaccccaggatcctctggagattttataatacggacaagcaaactgctaattcccgtgacgtgcgagtttcctcgcctatatacaatttccgaaggttacgtccctaacttaagaaactcccccctggagattatgtccaggaaccacgggattttccccttcaccctagaaatttttaaagacaacgagttcgaagagccctatcgcgaagccctgcccacccttaagctgcgcgattccctttacttcggtatcgagcctgtagtacatgttagtgggttagaatcattggttgaaagctgtttcgccacacctacatcaaagattgatgaggttctgaagtactatctcatcagagacggatgcgtttccgacgattccgtgaagcagtacaccagtagggatcacttggcaaagcattttcaggtcccggtatttaagtttgtgggcaaggatcacaaggaagtgtttcttcactgtagggtcctcgtatgcggtgtactcgatgagaggtccagatgcgcacagggctgccacaggaggatgaggcgcggcgcgggtggggaggattcagccgggctgcaggggcagactctcacaggaggccctataagaatcgattgggaagactag

SEQ ID NO: 198120 - DNA, 966 bp, synthetic construct
  misc_feature 1..966: note = Description of Artificial Sequence: Synthetic coding sequence
  source 1..966: mol_type = other DNA
atgccccccttcctgctgctgacctgcctgttcatcaccggcacctctgtgtcaccagtggccctggatccatgtagcgcctatataagcctgaatgaaccatggcgaaatacagatcaccagttagatgagtctcagggaccccccttgtgtgacaatcatgtgaatggggaatggtatcactttactggaatggcaggggatgcaatgcctactttctgtatcccagagaatcactgcggcacacatgcccctgtgtggctgaacggtagccatcccctggaaggcgatgggatagtccagcggcaggcatgcgccagtttcaacgggaactgctgtttgtggaacactaccgtggaagttaaggcatgcccaggggggtattatgtgtatcgcctaacaaaaccgagcgtgtgcttccacgtttactgcggccatttctacgacatatgtgacgaagactgtcatggatcctgcagcgatacaagcgagtgtacatgtgccccaggcacagtactaggccccgaccgccagacctgcttcgacgaaaatgagtgcgagcagaacaacggcggctgttcagagatctgtgtgaatttaaaaaattcttacagatgtgagtgcggagtaggacgagtgctcagatccgacgggaagacgtgcgaagacgtggagggatgccataacaataacggtggttgtagccacagttgtctgggctctgagaaaggttatcagtgcgagtgcccaagaggcctagtcctgagcgaggacaaccacacgtgccaagtgcccgttctgtgcaagtccaatgcaatcgaagtaaatattccacgcgaactggtgggtggcctcgagctttttttgaccaatacttcttgccgcggcgtgagcaacggcacccacgttaatatcctcttttccttgaaaacttgcgggaccgtcgtggatagttgtttccagtag

SEQ ID NO: 198121 - DNA, 735 bp, synthetic construct
  misc_feature 1..735: note = Description of Artificial Sequence: Synthetic coding sequence
  source 1..735: mol_type = other DNA
atgggcctggagctgttcctggacctggtgagccagcccagccgggccgtgtatatcttcgctaaaaagaatggtatccctctagagctgcgtacggtggaccttgttaaggggcagcataaaagtaaggaattccttcaaatcaactccctgggaaaactgcctactctcaaggatggagatttcatcctgaccgagagctctgcaatcttgatttatctttcctgcaaataccagacgcctgatcactggtaccctagcgacctgcaggcgagagcaagggttcacgagtatctcggttggcacgctgactgcatcagggggacgtttggaatccctttgtgggttcaagtcctgggcccactgatcggtgtgcaggtgcctaaagaaaaggtcgagaggaaccggaccgcgatggatcaagctttgcagtggctggaggataagttcctgggcgatagaccgttcttagcaggtcagcaggtaacactagctgacctcatggccctggaggagttgatgcaaccagtggccctcggttatgagcttttcgagggacgccctcgcctggccgcctggaggggacgagtggaggccttcctcggggccgagctctgccaggaggctcattccataatcttatctatcttagaacaggccgccaagaaaactctccccacgccttcacctgaggcataccaggctatgctgctcagaattgctcggataccatag

SEQ ID NO: 198122 - DNA, 696 bp, synthetic construct
  misc_feature 1..696: note = Description of Artificial Sequence: Synthetic coding sequence
  source 1..696: mol_type = other DNA
atggccagcatggccgccatcggcagctgcagcaaggagtaccgggtgctcttaggccaactgcagaagcagactgatctcatgcaagacacgtcccgcctccttgacccttacatcagaatacaaggcctggacgtgcccaagttaagggagcactgcagggagcggccaggggcatttccatcagaggagacactgaggggacttggcaggcgcggcttcctccaaaccttgaatgcgactttggggtgtgtgcttcataggctggccgacctggagcagcggcttccaaaggctcaggatctcgagcggagcggactgaatattgaagacctggaaaagttacagatggccaggcctaacattctcgggctaagaaacaacatctactgtatggctcaactcctcgataacagcgacacagcagaaccaacaaaggctggaaggggcgcatctcagcctcctacaccaacccccgcaagtgacgctttccagaggaagttagaaggttgcaggtttctccacgggtaccacagattcatgcacagcgtgggacgcgtgttttcgaaatggggcgaatcgccgaaccgatcccgtagacactcaccacaccaggccttgcgcaagggagtccgtcggacacgccccagtagaaagggcaaacgcttgatgacccgtggacagctgcctcggtag

SEQ ID NO: 198123 - DNA, 2940 bp, synthetic construct
  misc_feature 1..2940: note = Description of Artificial Sequence: Synthetic coding sequence
  source 1..2940: mol_type = other DNA
atggccctgttcgccgtgttccagaccaccttcttcctgaccctgctctctctcaggacttaccagagtgaggtgttggctgaacggttgcccctcaccccggtttctcttaaagtgtcaaccaattcaaccagacaaagtctccacctgcagtggaccgtgcacaacctgccatatcaccaggaactgaaaatggtttttcagatacaaatcagcaggatagagacctccaatgtgatctgggtcggcaattattctacaacagtgaagtggaatcaggttctacattggagctgggagagcgagctcccactggagtgtgcaacccacttcgtgaggattaagtccttggtcgacgacgccaagttcccagagcctaatttctggagcaattggtcctcttgggaggaggtgagcgtacaggactctactgggcaggatatccttttcgtcttcccgaaggataagctggtcgaggaaggcacaaatgtcactatatgttacgtttctcgtaacatccagaataacgtgtcctgctacctggaggggaagcaaatccacggcgaacaactggatcctcatgtgacagccttcaatctgaatagcgtcccctttattcgcaataaggggaccaatatttactgcgaggctagccaggggaatgtgtcggaagggatgaagggtattgtattattcgtgtcgaaagtactcgaggaacctaaagacttttcttgcgaaacagaagacttcaaaaccctgcactgcacctgggatcctggcacagacaccgcactcgggtggagtaaacaacctagtcagtcatacacactgtttgaaagcttctccggggaaaagaagctgtgtacccataaaaactggtgcaattggcagatcactcaagacagtcaggagacctacaactttaccctgatcgccgaaaactacctccgcaagcgctctgtgaacatcctgtttaatctgactcacagagtctacctgatgaatccattctccgttaacttcgaaaacgtgaatgccacaaatgccataatgacatggaaagtgcattcaatacgaaataatttcacctacctgtgccagatcgaattacatggagaaggaaaaatgatgcagtacaatgtgtcaattaaagtgaacggcgaatactttcttagcgagctggagcccgctacagaatacatggcccgggtacggtgcgctgacgcttcacacttttggaagtggtctgagtggtcaggacagaacttcaccacgttggaggccgctccttccgaggcacctgacgtatggcggatcgttagcctggagcctggaaatcacacagtcacacttttttggaagcctttgtccaagctccacgcgaatggaaaaattctattttacaatgtagttgtcgaaaatctggataagccttcttcatcggagcttcattctatcccagcacctgccaatagcacaaaactgatactggaccgatgttcatatcagatctgtgtgattgccaacaactcagttggcgcgtcccctgctagtgtgatagtgatcagtgcggaccccgaaaataaggaagtcgaggaggagcggatcgccggcacagagggagggttttctttaagctggaagcctcaacccggtgatgtcatcgggtacgtggtcgattggtgcgatcacacacaggatgtacttggggattttcagtggaagaatgtgggacccaataccactagcactgtgatttccactgatgctttccgacccggtgtccgttacgatttccgcatatacggacttagtacaaagcgcatcgcctgcctactcgaaaaaaagacgggatactcccaggagcttgcccccagcgacaacccccacgtccttgtcgacacactgactagccacagctttaccctcagctggaaggattatagcacagagtctcagcctggcttcatccagggctatcatgtgtatcttaagtccaaggcaagacaatgccatccgcgttttgagaaggctgtcctatctgatggatcagaatgttgcaagtacaaaatcgacaaccccgaggagaaagcccttatcgtggacaatctgaagcctgagtccttctatgagttctttatcactcccttcacttcagccggggaagggcctagcgcgactttcacaaaggtgactactcctgacgaacactcttctatgctgatccacattctgcttcctatggtgttttgtgtgcttttgatcatggtgatgtgttatctgaagtcccagtggattaaagagacttgctaccccgacattcctgacccatacaaatcctcaatccttagcctgataaagttcaaagaaaatcctcatctcattattatgaatgtttcagattgcattcctgatgctattgaagtggttagcaagccggaggggaccaagatccagttcttggggacccgcaagagtcttaccgaaactgagctgacaaaacctaactacttgtacctgctccctactgagaaaaaccactcagggcctggcccctgtatctgtttcgaaaacttgacttataatcaggccgcatccgacagcgggagttgcggacatgtccccgtatcccctaaagcgccgagcatgctcggactgatgaccagtccagagaacgtgctgaaagccttggagaaaaactatatgaactccttaggtgagatccccgccggtgagacatccctcaattatgtctctcaactagcatctcccatgttcggagacaaagattcactcccaacgaatccggttgaagcaccccattgctctgaatacaaaatgcagatggccgtctccctccgtttggcccttccccccccgaccgagaactcaagcctcagctccatcaccttgctcgatccaggggaacactattgctag

SEQ ID NO: 198124 - DNA, 1029 bp, synthetic construct
  misc_feature 1..1029: note = Description of Artificial Sequence: Synthetic coding sequence
  source 1..1029: mol_type = other DNA
atggccctgttcgccgtgttccagaccaccttcttcctgaccctgctgagcctgaggacgtaccagtctgaagtactcgcggagagactgcccctgacacccgtgtccctgaaggttagtaccaactctactcggcagtcattgcatctgcagtggacagtccataatctcccttatcatcaggagttgaagatggtgtttcagatccaaatttcccgtattgagacttccaacgtgatctgggtggggaactactctaccaccgtgaaatggaatcaggtgctccactggagctgggaatcagagctcccattagagtgtgcaacccacttcgtgcgaattaaatccctggtggacgacgctaagttccccgaaccaaatttctggtccaattggtcttcttgggaagaggtaagcgtgcaggacagtaccgggcaggatattctctttgttttccccaaggataaactggtagaggaaggcacgaatgtgactatctgttatgttagcagaaacattcagaataacgtgtcatgctatctcgagggcaagcagatccatggcgagcagctcgatccacatgtgaccgcatttaacctgaattctgtgccattcataaggaataagggcaccaacatctattgcgaagcgtctcagggaaacgtaagtgaaggtatgaaagggatagttctcttcgtttccaaggttcttgaggaacctaaggatttttcgtgtgagaccgaggatttcaaaacgctccactgtacttgggatccagggaccgacactgcgctcggttggtccaagcagccttcgcagtcctacacactgttcgagtcgtttagcggggagaagaagctttgcacacacaagaattggtgcaactggcagatcacacaggattctcaggaaacatacaatttcaccctgatagcagagaattacctgcgcaagaggtccgtaaacatcctatttaatcttacccatcgtggggagacaagggtggttacagcacaccggggacactag

SEQ ID NO: 198125 - DNA, 1398 bp, synthetic construct
  misc_feature 1..1398: note = Description of Artificial Sequence: Synthetic coding sequence
  source 1..1398: mol_type = other DNA
atgaacgcccagctgaccatggaggccatcggcgagctgcacggcgttagtcacgaaccagtacctgctccggcggacctgctgggcggttcgcctcacgcacgttcttccgtggctcaccgtggctcccacctgccccctgcccaccctaggagcatgggtatggcaagcttgctagatggggggtctggagggggagactaccaccaccaccacagagccccggaacattctctggctgggcctctgcacccaacaatgaccatggcttgtgagaccccccccgggatgtccatgcccacgacgtatacaactctcactccactgcagcccctgcctcccatttctacggtgagcgataagttcccacaccaccaccaccaccaccatcatcatcaccaccctcatcatcaccaacgtcttgctggaaacgtgagtggcagttttacactaatgagagacgagcgcgggcttgccagtatgaacaacctttatacaccctaccataaggacgtggcagggatgggccagagcctcagccctctttcttctagcggattgggaagcatccataattcacagcaaggccttccacattacgcccacccaggggcagcaatgccgacagataaaatgctgacaccaaacggttttgaggctcaccaccctgcaatgctgggtcgccacggagagcagcatctgaccccaaccagtgccgggatggttccgattaatgggctcccccctcaccacccccatgcacacctgaatgcgcagggccacggacagttactgggtacagcaagagagccgaacccttcagtgacaggagctcaggtctctaacgggtctaattccggccaaatggaagagatcaatacaaaggaagtagcccagcgcatcaccacagagctaaagaggtactcaatcccccaggcaatcttcgcgcaacgggtcctgtgtcgctctcagggcactcttagtgacctcctgagaaatccgaagccttggtccaaactgaaaagcggcagagagactttccgccgcatgtggaaatggttgcaggagcctgaatttcagcggatgagtgcccttcggctcgctgcgtgtaaacgtaaagagcaagaacacggaaaggaccgcggcaacacccccaagaaaccaagactagtttttacagatgttcagcggcgaacactgcacgccatcttcaaggaaaataaacgaccatctaaggaactacaaatcacaatttcccaacagctgggcctggagctgtcaaccgtgtctaatttttttatgaatgccagacgtagatcattagataaatggcaagacgagggcagcagcaactccggcaactcgtcatcctcatcgtccacttgtacaaaagcatag

SEQ ID NO: 198126 - DNA, 1515 bp, synthetic construct
  misc_feature 1..1515: note = Description of Artificial Sequence: Synthetic coding sequence
  source 1..1515: mol_type = other DNA
atgaaggccgcctacaccgcctaccggtgcctgaccaaggacctggagggttgtgctatgaatccggaactgacaatggagtccctcggcacacttcacggacccgctggaggaggttctggtggaggggggggcgggggcggtggcgggggtggtggaggccccggacacgagcaggagttactggcgtcgccatcgccccaccatgctggaagaggagctgctggtagcctaagaggacccccacccccccctactgcccaccaagagcttgggactgctgctgctgcagcggctgccgcatcaagatcggcaatggtgacatcaatggcaagtatcctagatggaggcgattataggcctgagctgtcgatccccttgcatcacgccatgtctatgagttgcgattcctctccaccaggaatggggatgtcgaacacctacactactctcacacccctccagcccctgcctccaatcagcactgtctctgacaagttccaccatccacacccccaccaccacccccatcaccaccaccaccaccatcaccagagattgtcaggcaacgtcagtggtagttttacactgatgcgcgacgaaaggggcttacctgctatgaataatctgtatagcccttacaaggaaatgcctgggatgtcacagagtttgtccccactggccgccactcctctaggcaacgggctgggcggattgcacaatgcccaacagtcgctgcctaactacggtcctcccggtcacgacaagatgttgtcaccaaacttcgacgcgcaccacaccgccatgctgaccagaggcgaacagcatttaagccgcggactcggcacaccacctgcagccatgatgagccacctgaacggcttgcatcaccccgggcatacacagagccacggacccgtactagcgccgtctcgggaaaggcctccaagttcaagctcaggctcccaagtggcaacctccggccagcttgaggaaattaatacaaaagaagtagctcagcggatcacagcagagctgaaacgctacagtattcctcaggctatttttgcacagagagtcctatgccgctcccaggggactctttcagacctgcttcgtaatccaaagccatggtccaaactgaaatccgggagagagacttttaggcgtatgtggaaatggttgcaagagcctgaatttcagcggatgtctgctcttcgtctcgctgcctgtaagagaaaggagcaagagcccaataaggataggaacaatagccagaaaaagagtaggttagtgtttactgatcttcaaagacggactctatttgccattttcaaagagaataagcggccctctaaggagatgcagatcaccatcagtcaacagctggggctggaactgactactgtttccaacttttttatgaacgcccggagaaggagcctcgagaagtggcaagatgatttatctacaggaggctcctcctcaacttcctcaacttgtacaaaggcttag

SEQ ID NO: 198127 - DNA, 1458 bp, synthetic construct
  misc_feature 1..1458: note = Description of Artificial Sequence: Synthetic coding sequence
  source 1..1458: mol_type = other DNA
atgaaccccgagctgaccatggagagcctgggcaccctgcacggccccgccggtggcggatcaggtggcggcggcggcggcggtggcggggggggtggaggaggccccggtcatgaacaggagctcctggcaagccccagtccacatcatgcaggccgtggtgcagccggcagcctgaggggccctccacctccaccaaccgctcatcaggagcttggaactgccgcagcggctgctgctgctgcttcacggtcagccatggtaacgtccatggccagcatcctggacggcggagactatcgccctgaactaagcataccactgcatcacgccatgagcatgtcctgcgatagcagcccccccggcatggggatgagtaacacctatacaaccctcacccccctgcaacctttacctccgatttccaccgtcagcgacaaattccaccatccccatccccaccaccaccctcatcatcaccaccaccaccatcaccagcgactatctggcaacgtatccggatcttttacacttatgagagatgagcgtggcctccccgccatgaataacctgtactcaccatataaagagatgcccggtatgagccagagcttaagcccccttgctgcaactcctcttggaaatgggcttggagggctgcacaatgcacagcagtcactgccgaactacggccccccagggcatgacaaaatgttgtctcctaattttgacgcccatcacacagcgatgctgacgagaggagaacaacacctatctagaggcttgggcactccgcccgccgctatgatgagtcacctgaatgggctgcaccaccctggacatacacaaagccacggccccgtcctcgctccatcacgtgagcgtcctccttcatcgtcctcaggcagccaagttgccaccagtggacagcttgaagagataaatacaaaagaagtggcccaacggattacagccgaactgaaacgctacagcattccacaagccatcttcgcccagagagtgctatgtcggagccagggcacgcttagcgacctcctgcgtaaccccaagccctggtctaagctgaagtctgggcgagagacttttagaagaatgtggaagtggctccaagaacctgagttccagagaatgagtgccttacgtctggcagcctgcaagcgtaaagaacaggagccaaataaagaccgtaataacagccaaaagaaaagcaggctcgttttcaccgatctgcaacgacgtacactcttcgctatttttaaggagaacaaaaggccatcaaaggagatgcagatcactataagccagcagctgggcctggagttgacaactgtgagcaatttttttatgaacgcacgccggaggtccctggagaagtggcaagatgacctctcaaccggaggatcaagtagtacttcctcaacatgcacaaaggcctag

SEQ ID NO: 198128 - DNA, 450 bp, synthetic construct
  misc_feature 1..450: note = Description of Artificial Sequence: Synthetic coding sequence
  source 1..450: mol_type = other DNA
atggtggacgacgccggcgccgccgagagccagcggggcaagcagacacctgcccatagtctagagcagctcaggcggctgccactgcctcccccccagatacgtattaggccctggtggtttcctgtacaagagctgcgcgatccactcgtcttttatttggaggcttggctggccgacgaattgtttgggcccgatcgagccattatcccagaaatggagtggacttcccaagccttactgacagttgacatagtggactctggcaatttggtcgagatcacagtatttggccgacctagagtgcaaaaccgtgttaaaagcatgttgctctgcctggcgtggtttcatcgtgagcatcgcgccagagcagagaagatgaaacatcttgagaagaacctgaaagcccacgcttccgatccacactctccccaagacccggtggcctag

SEQ ID NO: 198129 - DNA, 387 bp, synthetic construct
  misc_feature 1..387: note = Description of Artificial Sequence: Synthetic coding sequence
  source 1..387: mol_type = other DNA
atggcccccgtgaagaagctggtggtgaagggcggcaagaagaagaaacaggtcctgaagtttacactggactgcacccatcccgtggaagatgggatcatggacgcagcaaatttcgagcaattccttcaggaaaggatcaaggtaaatgggaaagcaggaaatctgggtgggggcgtggtgaccatagagaggagcaagagcaaaatcacagtgacctctgaagttcccttctccaagcgttacttgaaatatctgacgaagaaatacttgaaaaagaataacctgcgcgattggctgcgtgtagtggccaatagcaaggaaagttacgaactgaggtactttcagatcaatcaggatgaggaagaggaagaagacgaggattag

SEQ ID NO: 198130 - DNA, 975 bp, synthetic construct
  misc_feature 1..975: note = Description of Artificial Sequence: Synthetic coding sequence
  source 1..975: mol_type = other DNA
atggagcccgcccccagcgccggcgccgagctgcagccccccctgtttgctaatgcttctgacgcctaccccagtgcatgtccgtctgccggagctaacgcctcaggccctcccggcgccagatctgcaagctccctggcccttgcaattgcaattactgctctgtactcggcagtttgtgccgtgggattgctgggaaacgtgcttgttatgttcggaatagtccgctacaccaagatgaaaaccgctaccaatatctacattttcaacctggctctggctgatgcactcgccacctctaccctgccttttcagtcggcgaaatacttgatggaaacctggccctttggtgaattgctatgcaaggccgtactgagcatcgactattataatatgttcacatccatatttactctcaccatgatgtccgtggatagatatatcgcggtctgtcacccggtcaaggctttggattttcgcacacccgctaaagccaaactgatcaatatctgcatttgggtcctcgcgtcaggtgtcggtgtccctataatggtaatggccgtcacaaggccgcgtgacggagccgtggtgtgtatgctgcaatttcctagcccgtcctggtactgggacactgtgacgaagatctgtgtcttcctgttcgcgttcgtggtgtgttgggcccctattcacattttcgtcatcgtgtggacgcttgttgacatagatcggcgggaccctctagtagtggcagccctccatctctgcatcgccttggggtacgcgaactcctctctaaaccctgtgctgtatgcctttttagacgagaacttcaagagatgtttcagacagctctgccgaaaaccctgcggaagacctgacccttcatccttctctcgggcccgtgaggccacagcaagagagcgagtgaccgcatgtaccccttctgacggtcccggtggaggtgccgccgcttag

SEQ ID NO: 198131 - DNA, 1143 bp, synthetic construct
  misc_feature 1..1143: note = Description of Artificial Sequence: Synthetic coding sequence
  source 1..1143: mol_type = other DNA
atggacagccccatccagatcttccggggcgagcccggccccacctgtgccccttccgcctgcttacctcccaactcctctgcctggttcccaggctgggccgagccagattccaacgggtcagcagggagcgaagatgcccaacttgaacccgcacacatctccccagcgattcctgtgattatcacggcggtgtactcagttgtttttgtagtgggactggtaggtaacagcctcgtgatgttcgtgattattaggtacacaaaaatgaagactgccactaacatctatatctttaatctggcattggcggatgccctcgtgaccactactatgccgtttcaatctacagtgtatctgatgaattcatggcctttcggagacgtattgtgtaagatagtcatttccatagactattacaatatgtttaccagcatcttcactctgactatgatgtccgtagaccgctatattgctgtgtgtcacccagtcaaggcactcgatttcaggacacctttgaaagccaaaattatcaatatctgcatttggctgctcagctccagcgtcggtatcagcgcgattgtcctaggcggaactaaggtgcgcgaggatgtggatgtgatcgaatgtagcttgcagtttcccgacgacgattacagttggtgggacctgtttatgaaaatttgtgtgttcatctttgcctttgtaataccagtcctcatcatcatcgtctgctataccctgatgatactgcgtctcaagagtgtgcgcctcctgtccggcagccgcgaaaaggacaggaacctgaggaggattactcgactggtgctggtggttgttgcagttttcgtcgtatgctggacgcccatccacatctttatcctggttgaggccctgggctccacaagccactctaccgcagccctctcatcatattacttttgcatagccctcggatacacaaattcatccctgaatccaatcctgtacgcttttcttgatgaaaattttaaacggtgttttcgggatttctgcttcccgctgaagatgagaatggaaaggcagtctacgagtcgagtgaggaatacagtgcaggacccagcctatcttagggacatcgacggtatgaacaagccagtctag

SEQ ID NO: 198132 - DNA, 1101 bp, synthetic construct
  misc_feature 1..1101: note = Description of Artificial Sequence: Synthetic coding sequence
  source 1..1101: mol_type = other DNA
atggacagccccatccagatcttccggggcgagcccggccccacctgtgccccatccgcgtgcctgcccccaaattcatctgcgggatccgaggacgcccaactggaaccagcacatatcagccccgctatacctgtcatcatcactgccgtctacagcgtggtgtttgtcgttggcctggtcgggaactcactggtgatgttcgtaataatcaggtataccaagatgaagaccgctaccaatatctacatattcaatttagccttagccgacgccctcgtaacaactaccatgcctttccagagcaccgtttacctaatgaacagctggcctttcggcgatgtactctgcaagatagtaatatccattgattactataatatgtttacctccatcttcaccctgacaatgatgagtgttgatcgatacattgccgtatgccaccctgtcaaggccttagactttaggacaccgcttaaagccaagattattaatatctgcatctggttacttagttcaagtgttggcatctctgccattgtgctaggcggtacgaaggtgagagaggatgtcgatgtcatagagtgttccctgcagtttcctgacgacgattactcttggtgggatctctttatgaaaatttgtgttttcatttttgcatttgttatccctgtattgattattatcgtctgctacacactgatgatcctgagacttaaatctgtccgcctgctcagtggtagcagggagaaagacaggaacctgcggcgaatcacccgccttgttctggtagtggtggccgtgttcgtggtgtgctggactcctatacatatttttatcctggtggaggcgcttgggtcaacctctcatagtacagccgcattatcatcctattatttctgtatcgccctggggtacaccaactcatctctgaaccccattttgtacgccttcctggatgagaattttaaaagatgcttcagggatttctgtttcccccttaagatgagaatggagcggcaatccacttccagggttcggaacacagtccaggacccggcataccttagggacattgatgggatgaataaaccagtctag

SEQ ID NO: 198133 - DNA, 1143 bp, synthetic construct
  misc_feature 1..1143: note = Description of Artificial Sequence: Synthetic coding sequence
  source 1..1143: mol_type = other DNA
atggacagccccatccagatcttccggggcgagcccggccccacctgcgcccctagcgcctgtttgccacccaactcgtctgcatggttccctggctgggccgagccggattcgaatggaagcgcaggctcagaggacgcccagctcgagcccgcccacatttctcctgcgatcccggtcattatcactgcagtgtatagcgtggtgtttgtcgtcgggttagtgggaaactccctagtgatgtttgttatcattagatacactaaaatgaagacagccactaacatttatatatttaacctggctctggcagacgccctggtgacaaccactatgccattccagtcaacagtgtatctcatgaattcatggccgttcggggacgttttgtgcaagattgttatttcgatagattattacaacatgttcactagtatttttacactcacaatgatgagtgtggatagatatattgccgtctgccatccagtgaaggccctcgattttcgaacacccctgaaagcaaaaatcatcaatatctgcatctggctcttgagctcttccgtcggtatttcggccattgtgctggggggaacaaaggtgcgcgaggacgtggacgtcattgaatgttctctgcaatttcctgacgatgattacagctggtgggacctgttcatgaaaatttgcgttttcatcttcgcattcgtgatccccgtcttaatcatcattgtatgttacacattaatgattctgaggcttaaatctgtgcgtctgctttctggctcccgagagaaggataggaatctgagacgcatcactaggctggtgctggtggtggtggccgtgtttgttgtctgctggacacccattcacatcttcattctagttgaggctctcggcagcacttcacactcgacagccgccctctcctcatattatttctgcattgcgctcggctacaccaactccagcctcaaccctatcctttatgctttcttggacgagaattttaaacggtgtttccgggatttctgttttcctctcaaaatgcgcatggagagacagtctacctctcgcgtacgaaacactgtccaggacccagcataccttcgggatatcgacgggatgaacaagcccgtctag

SEQ ID NO: 198134 - DNA, 1344 bp, synthetic construct
  misc_feature 1..1344: note = Description of Artificial Sequence: Synthetic coding sequence
  source 1..1344: mol_type = other DNA
atgagccggcggccctgcagctgcgccctgcggcccccccggtgctcttgctccgcgtccccatccgctgtgaccgccgcagggaggccccggccttccgacagttgcaaagaggaatcctccacccttagcgtgaagatgaagtgtgacttcaactgtaaccatgtccactctggcctcaagcttgttaagcccgacgacattggccgattagtcagctacactcccgcttatttagagggtagctgcaaagattgtattaaggattacgaacgactcagctgtataggatcccccatcgtctcaccgaggatcgtccagcttgaaacagagtcaaaaaggctgcataataaagaaaatcaacacgtccaacagaccctaaactccacgaatgagatcgaggcattggagacctctagactgtatgaagactcgggctattcttctttctccctgcaatccggactgagtgaacatgaggagggctcgctgttagaggagaattttggcgatagtcttcagagctgcctgctccagatacagtcccccgaccaataccccaacaaaaatctcctccctgtgctgcactttgaaaaggtggtttgtagtacgctgaagaaaaatgcaaaacgcaatcctaaagtggacagggaaatgctaaaggaaataattgcacgaggaaacttcaggctgcagaacatcatcggaagaaaaatggggctcgagtgtgtcgacatcctgagcgagttattccgccggggtctacgccatgttctagccaccatactggcacagctgtccgacatggatttgatcaatgtgtcgaaggtgtcaaccacatggaaaaagattctcgaagacgataaaggggcattccaattatacagcaaagcaattcagcgagtaactgagaacaataacaagttttcgcctcacgcatcgacccgagagtatgtcatgtttcgcacaccactggcttcagttcagaaatcggctgctcaaacatctctgaaaaaagacgcccagactaaactgtccaatcagggcgaccagaagggcagtacgtacagtcgacataatgagtttagcgaggtggccaaaaccctcaaaaaaaacgagtccctgaaggcttgcataagatgcaacagccctgcgaagtacgactgctatctgcagcgtgccacctgcaaacgggaaggatgtgggttcgattattgcactaagtgcctgtgtaattaccacacgactaaagactgctccgacgggaagctgctcaaggcctcgtgtaaaatcggacccctgcctggcactaaaaaatcaaaaaagaatctgaggaggctttag

SEQ ID NO: 198135 - DNA, 1203 bp, synthetic construct
  misc_feature 1..1203: note = Description of Artificial Sequence: Synthetic coding sequence
  source 1..1203: mol_type = other DNA
atggacagcagcgccgcccccaccaacgccagcaactgcaccgacgctctcgcctattcatcctgtagtcccgcacccagtcccggttcttgggtaaacctttcccacctggatggtaacttgagtgatccttgtggcccgaataggacggatttgggcggacgcgattccctgtgtccgccaactggatccccctctatgataacagcgataactattatggctctgtattccatagtatgcgtcgtcggcctgtttggcaatttcctggttatgtatgtaattgtgagatacaccaaaatgaagacagctactaatatctatatctttaatcttgctcttgcagatgctttggccacatctaccctgcccttccaaagcgtcaattatctcatgggcacatggccatttgggacaatcctgtgtaagattgtcatttctattgattactacaacatgttcacctctatttttactctgtgcacaatgagcgttgaccggtacatcgccgtgtgccatcccgtcaaggctcttgacttccgcacaccacgcaatgccaagatcattaacgtgtgtaactggatcctcagttcagccattggtctgccagtgatgtttatggcaaccactaagtacagacaggggtctattgactgcacactgacattcagtcatcccacctggtactgggaaaacctgctgaaaatatgcgtgtttatttttgcctttattatgccagtgctgatcatcacggtgtgctatggcctgatgatcctgcggctaaaatccgtgaggatgctgtccggatccaaagaaaaagataggaacctgagacgcataaccagaatggtgttggttgttgtggcagtgttcatagtctgctggacgccaatccacatctacgtgatcatcaaagctctggtcaccatacctgaaactaccttccagacagtgtcttggcacttttgcatcgcccttggctacacaaactcctgcctgaatccggtgctgtatgccttccttgatgaaaatttcaaacgctgcttcagagaattttgtattcccacctcctcgaacatcgaacagcagaactctactaggattagacagaacacaagagaccatccatcaacagcaaacactgttgaccgcaccaatcatcagctggagaacctagaggccgaaacagccccgctcccatag

SEQ ID NO: 198136 - DNA, 1257 bp, synthetic construct
  misc_feature 1..1257: note = Description of Artificial Sequence: Synthetic coding sequence
  source 1..1257: mol_type = other DNA
atggacagcagcgccgcccccaccaacgccagcaactgcaccgacgcactcgcgtattcatcctgcagtccagccccttctcccggctcctgggtgaacttgtcacacctggacggcaacctgtccgacccctgtggtccaaacaggactgatctagggggtcgggattccctctgtcccccaactggcagtccaagcatgattactgctatcacaataatggctctctatagtatcgtttgcgttgtgggcctgtttgggaatttccttgtgatgtacgtcatagtcagatacactaagatgaagactgccacaaacatttacatctttaatctcgctctggccgatgccctggccacaagcacgctaccctttcagtcagttaattacctgatgggtacgtggccctttggaacaatcctttgcaaaattgtaataagtatcgactactataatatgtttaccagcatattcaccctctgtacaatgtcagtcgatcgctacatcgctgtgtgtcaccctgtgaaggccctcgacttccggacgccgcgtaacgccaagattatcaacgtttgtaactggattctttcaagtgccatcggtctcccggtgatgtttatggcaactaccaagtaccgtcagggaagcatagactgtactctgaccttcagccaccctacttggtactgggaaaatctactgaaaatctgtgtatttatcttcgctttcattatgcctgttctcattatcacagtctgttacggattgatgatcctgcgccttaagtccgtcaggatgctctccgggagtaaagagaaggataggaacctgcgaaggattacaaggatggttctcgtggtggtggcagtcttcatcgtctgctggacgccaatccacatctatgttattatcaaagccctggtgaccattcctgaaacaacctttcagaccgtcagttggcacttctgcattgctctgggctacacgaattcatgtctaaatcctgtcctctatgctttcctggatgaaaactttaaacgatgcttcagagaattttgcatccctacttcatcgaatattgagcagcagaacagcacaaggataaggcaaaatacacgggaccacccttccacggcgaacaccgtggaccggacaaaccaccagcccccactggctgtgtcaatggctcagatcttcaccagataccctcctcctacccatagagaaaaaacctgtaacgactacatgaagcgctag

SEQ ID NO: 198137 - DNA, 1209 bp, synthetic construct
  misc_feature 1..1209: note = Description of Artificial Sequence: Synthetic coding sequence
  source 1..1209: mol_type = other DNA
atggacagcagcgccgcccccaccaacgccagcaactgcaccgacgcgcttgcctactctagctgttctcccgctccttcaccaggaagttgggttaatctgtctcatctcgacggaaaccttagcgacccttgtggccctaaccggacagatctgggcggccgggatagcttatgtcctcccacaggatccccaagcatgattaccgccatcacaattatggctttgtattcaatcgtgtgtgtagtagggctgttcggcaactttttagtgatgtacgtgattgtgaggtatacaaagatgaagactgcaacaaatatttacatcttcaatctggccctggccgatgcgctcgccacttcaactctaccatttcagtccgtcaactacctgatgggcacttggccgtttggaacaattctctgtaaaattgtgatctccatcgattactataacatgttcacctccatcttcactctttgcacaatgagcgtggacagatatatcgccgtgtgccaccctgttaaagctctcgactttaggacgccccgcaacgctaagatcattaatgtatgcaattggatattgagcagcgcaatagggctgccagtgatgttcatggccacaacaaagtatagacagggctcgatagactgtacactgactttcagtcaccccacttggtactgggaaaatttgctcaagatctgtgtgtttatttttgcatttatcatgcccgtgctgataattactgtgtgttatggtctgatgattctcagactcaaatcagtacgtatgttatctggctcaaaggaaaaggatcgtaatctacgtagaataaccaggatggtgctcgtcgttgtcgctgtgttcatcgtatgttggacgcccattcatatttacgtgattatcaaggcccttgtcaccatccctgagactacttttcagaccgtgtcctggcacttttgtatagcacttggctacacgaactcttgtcttaatcccgttctctatgcttttctagacgagaacttcaagagatgcttcagagagttttgcattcctaccagttcaaacatcgaacagcagaactcaacacgaatccgacagaatacacgagatcacccaagcactgcgaatactgtagatcggaccaatcatcagataagagacccgattagtaacctacccagggtaagtgtgttctag

SEQ ID NO: 198138 - DNA, 1212 bp, synthetic construct
  misc_feature 1..1212: note = Description of Artificial Sequence: Synthetic coding sequence
  source 1..1212: mol_type = other DNA
atggacagcagcgccgcccccaccaacgccagcaactgcaccgacgccctggcctacagtagctgctctcctgccccctctcccggaagttgggtgaatctgagccacctggacgggaatttatctgatccatgcgggccgaatcgaaccgacttgggcgggagagatagcctgtgcccgcccactggaagtccctccatgatcaccgcaatcaccattatggccctttatagcatcgtctgcgtggtgggacttttcgggaacttcctggtcatgtatgtcattgtcagatacactaagatgaaaactgcaaccaacatctacatttttaatctcgcactagctgatgccctggctaccagtactctgccttttcaatctgtcaattatctgatgggaacatggccattcgggaccattctgtgtaaaatcgtcatctcgattgattactacaacatgttcacaagcatcttcactctctgtacaatgagcgtggatcgttatatcgctgtgtgtcaccccgtgaaggcacttgatttccgcaccccaaggaatgcaaaaatcataaatgtctgtaactggatcctgtcaagcgcaattggcttacccgtgatgttcatggccaccaccaagtaccgccaaggttccatagattgtacactgaccttttctcatccaacgtggtactgggagaacttattgaaaatctgcgtgtttatcttcgcatttataatgccggttctcattatcacagtgtgctacggactgatgatcttgcgcctcaaatcagttcgcatgctgtccggcagcaaagagaaggataggaacctgcgacggataacccgaatggttctagtggtggttgccgtctttattgtgtgctggacacctatccatatctacgtgataataaaggctctcgtgacaattcctgagacaacattccagactgtcagttggcacttttgtatagccctcgggtacaccaatagctgtttgaacccggtcctctacgccttcctcgacgaaaactttaagaggtgttttagagaattctgtatccctacctcctctaatatcgaacaacagaattccactaggattaggcagaacacaagggaccatcccagcaccgcaaacaccgtggatcgtacaaatcatcaagggcctcctgcgaaattcgtagccgaccaattagcaggctcatcctag

SEQ ID NO: 198139 - DNA, 1263 bp, synthetic construct
  misc_feature 1..1263: note = Description of Artificial Sequence: Synthetic coding sequence
  source 1..1263: mol_type = other DNA
atggacagcagcgccgcccccaccaacgccagcaactgcaccgacgccctggcctattctagttgcagcccagccccgtcacccggttcctgggttaatttgagccacctggatggaaatcttagtgatccatgcggcccaaataggactgacttgggcggcagagacagcctctgcccgcctactggaagcccgtctatgatcaccgcgataacaatcatggccctttacagcattgtctgtgtggttggtctttttggtaacttcttagtcatgtacgtcatcgtacgttacactaaaatgaaaacagctacgaacatttatatttttaacctggccctggcagacgctctggccacatctactctgcctttccaaagcgtcaactaccttatgggaacctggcctttcggcactatactctgcaaaatcgtcatttcaatcgactactacaatatgttcacatctatttttaccctgtgcacaatgtcagttgaccgatatatcgcagtttgccatcctgtgaaagctttagacttccgaactccacggaatgcgaaaatcatcaacgtctgcaattggattctctcttccgctatcggccttcctgttatgtttatggctacaactaagtaccgccaagggagtatagattgtacacttaccttttcccatccaacctggtattgggagaacctgcttaagatatgcgtgtttatattcgccttcatcatgccagtgcttatcattacggtctgttacggacttatgatcctgaggttgaaatcagtgcggatgctgtctggctccaaggagaaggataggaacctgaggagaatcacccggatggttcttgtcgtggtggccgtgttcattgtctgttggaccccgattcatatatatgtaataatcaaggctttggtgacaatacctgagaccacctttcaaacagtttcttggcacttttgcatcgcactggggtatactaattcctgcctgaaccctgtactttatgccttccttgacgaaaatttcaaacgctgctttcgagagttctgcatcccaacttcttctaacattgaacagcagaattcaacacgtattagacaaaatactcgagaccatccaagcaccgccaacactgtcgatagaacaaatcaccaggtggagttgaatcttgactgtcactgcgagaacgcaaagccatggcctctgtcatacaacgctggacagtctccctttccttttccagggcgagtatag

SEQ ID NO: 198140 - DNA, 1179 bp, synthetic construct
  misc_feature 1..1179: note = Description of Artificial Sequence: Synthetic coding sequence
  source 1..1179: mol_type = other DNA
atggacagcagcgccgcccccaccaacgccagcaactgcaccgacgctctggcatatagctcatgcagccccgcaccttcccctggcagctgggtgaatttgtctcatctcgatggaaaccttagtgatccttgtggccctaatagaaccgatctgggcggacgagacagcttatgcccccccaccggaagcccaagcatgatcacagccattacgattatggccttatatagcattgtgtgtgttgtggggctattcgggaacttcctagtgatgtacgttattgtccgatatacgaaaatgaaaacagcgactaacatttatatcttcaatctggctcttgccgacgcactggccacttccaccttgccattccagagtgtcaactatctcatgggaacatggcctttcgggaccattctctgcaaaattgtaattagtattgattactacaatatgttcacatccattttcacactgtgtaccatgagcgtggataggtacattgctgtgtgccatcccgtaaaagcactagattttaggacacctcgcaacgccaagatcatcaacgtctgtaactggatactgtcaagcgccatcgggctgcccgtgatgttcatggcaaccacaaagtaccgacagggcagcattgattgtaccctgaccttcagccaccctacctggtattgggaaaaccttctgaagatctgtgtttttatattcgcgttcataatgccagtcctgataataacggtttgctacggcctcatgatcctgcgcctgaagtcagtcagaatgttatcagggtcaaaagaaaaggacaggaacttaaggcgaattacgcgtatggttttggtggttgtcgccgttttcattgtctgctggacacctatccatatttacgtgataattaaggctttagtgactatccctgagaccacattccagacagtcagttggcatttttgcatcgcgctgggctatacgaattcatgccttaacccagtactgtacgcctttttggatgagaattttaagcgctgtttccgtgagttttgtattccaacatcttctaacatcgagcagcagaatagtactagaattaggcaaaacactcgtgaccatccatctaccgcgaatactgttgatagaacgaaccaccaggtcagatcactctag

SEQ ID NO: 198141 - DNA, 1482 bp, synthetic construct
  misc_feature 1..1482: note = Description of Artificial Sequence: Synthetic coding sequence
  source 1..1482: mol_type = other DNA
atgtgcctgcaccggcgggtgcccagcgaggagacctacagcctggacagatttgctcagaaccccccgctgtttccacctccttctctgccagcttcagaaagccgtatggcacatgcccctctcctgcagaggtgtggggccgccagaaccggattctgcaagaagcagcaagaactatggcagcgcagaaaggaggctgccgaggcgctgggcacacgtaaggtgagcgtgctgctcgccacctctcatagcggtgcgaggccagccgtttccacaatggactcaagtgcagcccctactaatgcgtcgaactgtactgacgctctggcctactcgtcttgttcgcctgccccatcccccgggtcgtgggtaaatttgtcgcaccttgatggaaatttaagtgacccctgcgggcctaaccgtactgacctcggaggcagggactccctgtgccctcctaccggcagccctagtatgattaccgccatcactatcatggcgctctactcaatcgtctgcgtagttggcctgtttggtaacttcctcgtaatgtatgtcatcgtccgttacacaaaaatgaagaccgccaccaacatttatattttcaacttggctctggctgacgcgcttgctacctctacattaccattccaaagtgtcaattacctcatgggaacctggccctttgggactatactttgcaagatcgtgatctccatcgactactacaacatgttcacctctatcttcactctttgtacaatgtcagtcgaccgctatatcgcagtttgccatcccgtgaaggcactggattttcggaccccgagaaatgccaaaataatcaacgtgtgcaattggattctgtcgagcgctattgggctgccggttatgttcatggctacgacaaaataccggcagggcagtatcgattgcactctgacattctcccaccccacctggtactgggaaaacttactcaaaatctgcgtctttatatttgcattcatcatgccagtcctgataattaccgtgtgttatggactgatgatcctgagactgaagtcagtaaggatgctgagtggtagcaaggaaaaagaccgaaatctcagacgcattactagaatggtgctggtcgtcgtcgctgtcttcatagtgtgttggaccccaatccacatttacgttatcataaaagccctcgtgacgatacccgagaccacatttcagaccgtatcatggcatttttgtattgccctaggatatacaaacagttgcctgaaccccgttctgtatgccttccttgatgagaacttcaaacgatgcttccgagaattctgcatccctacctccagtaacatagaacagcagaacagtacccgaatcaggcagaacacccgcgatcacccgtccaccgccaacacggttgatcgaaccaatcatcagttagaaaatctggaggctgagacagctccactcccttag

SEQ ID NO: 198142 - DNA, 1194 bp, synthetic construct
  misc_feature 1..1194: note = Description of Artificial Sequence: Synthetic coding sequence
  source 1..1194: mol_type = other DNA
atggacagcagcgccgcccccaccaacgccagcaactgcaccgacgctcttgcatactcttcttgcagcccagcaccctctcctggtagttgggtcaatctgagtcaccttgatggtaacctctccgatccgtgtgggccgaaccgcaccgacctcggcggcagggattccctgtgtccccctacaggatcaccaagcatgattactgcaatcaccattatggccttgtattctatcgtctgcgtggtgggcctgttcggaaactttctggttatgtatgtaatcgtacgctacacaaagatgaaaacagccactaacatctacatctttaacctggctctggcagacgctttagccacatccacactgcctttccagtcggtcaattacctaatgggtacctggccctttgggactatactatgtaagatagtgatttcaattgactactacaacatgtttacaagcatatttacgttgtgtactatgtcagtagaccgatacatcgccgtgtgccaccccgtcaaggctctggacttccggacaccccgcaatgccaaaattataaacgtttgcaattggattctgtcatctgctatcggcctcccagtaatgtttatggcaaccaccaagtatcgccaaggaagtattgactgtactctgaccttctcgcacccgacttggtattgggagaacctgttaaagatctgcgtgtttatcttcgcattcattatgcccgttcttatcatcaccgtttgctatggcctgatgatcctgcggttaaagtctgtgcgcatgctgtctggctctaaggagaaggatcgaaatctcagaaggatcactcgtatggtgctcgttgtggtggcagtgttcattgtctgttggacccccattcacatttatgttataattaaggcactggtcacgattcctgaaaccacctttcagaccgtgagctggcatttttgtatcgcgcttggctacactaactcctgtctgaaccccgtactttacgccttcttagacgagaacttcaaacgatgtttcagggagttctgcatccccaccagctccaacattgagcagcaaaacagtacaaggatccggcagaatacgagagatcatccctccacggcaaacactgtcgacaggacgaaccaccagcgtgagcgccgacagaaatctgattggtag

SEQ ID NO: 198143 - DNA, 1221 bp, synthetic construct
  misc_feature 1..1221: note = Description of Artificial Sequence: Synthetic coding sequence
  source 1..1221: mol_type = other DNA
atggacagcagcgccgcccccaccaacgccagcaactgcaccgacgctctcgcttatagttcatgctctcctgctcctagccctggctcttgggtgaacttatcacacctggatggaaacctgagcgacccgtgtgggcccaaccgcactgatctaggtggacgtgattcgctgtgtcctcctaccggctctccctccatgattacagctatcaccattatggctctctattctattgtctgcgtggtgggcctgttcggaaattttttggtgatgtacgtcatcgtgcgttacaccaaaatgaagactgcaacaaacatttatatttttaacctggcgcttgctgatgcactggccacttctaccctgcctttccaatccgtcaattatctaatggggacttggcctttcggtaccattttatgcaaaatcgtgatctcaatcgattattataatatgtttactagcatctttacattatgtactatgtccgtcgatcggtacatcgctgtatgtcaccccgtgaaggcgctggatttccggactccaagaaatgcgaagattatcaatgtatgtaactggatcctgtcctctgcaatcggcctgcccgttatgttcatggctacaactaagtacagacagggcagtatcgactgcacacttactttttcccatccgacatggtattgggagaaccttctgaaaatttgcgtctttatttttgccttcataatgcctgtcctaatcatcacagtctgttacggcctcatgattttacgtctcaaaagtgtgagaatgctgtccggcagcaaggagaaagacagaaatttaaggcggatcacaagaatggtcttggtggttgtggccgtgttcatcgtgtgttggacccctatacacatctatgtcatcatcaaggctcttgtcaccatccctgagactacttttcaaactgtgtcttggcatttttgtattgcattgggatacacgaattcttgcctgaatcccgtcctctacgcatttctcgacgaaaatttcaaacgttgcttccgagagttctgcataccgacctctagtaatattgagcagcagaatagtactagaatcagacagaatacccgagatcaccctagcactgcaaacacagtcgatcggacgaatcaccagaaaattgacctgtttcagaagtcttcccttttgaactgcgagcacacaaaaggatag

SEQ ID NO: 198144 - DNA, 960 bp, synthetic construct
  misc_feature 1..960: note = Description of Artificial Sequence: Synthetic coding sequence
  source 1..960: mol_type = other DNA
atgatgcgggccaagagcatcagcaccaaggccggcaagcccagccgctacacaaaaatgaagactgccacaaacatctacatttttaaccttgcgctcgccgatgctctagcaacctcgactttaccctttcaaagcgttaattacttgatgggaacctggccatttgggaccatactgtgcaagatcgttatatcgattgactattataatatgttcacatccatttttaccctgtgcaccatgagtgttgacaggtacatcgctgtgtgccatcctgtgaaggcattggattttagaacacctcggaatgcaaaaattatcaacgtatgcaactggattctctcatctgccataggtctgccagtcatgtttatggcgaccacaaaatataggcaaggttcgatcgattgtacgctgaccttcagccatccaacgtggtattgggagaacctactcaagatctgtgtgtttatcttcgcttttattatgccggtgctcattatcacagtgtgttacggactgatgatcctgaggcttaagtcggtgaggatgctctcaggaagcaaggaaaaggatagaaacctgcgacgtatcacacgaatggtactggttgtagttgccgtcttcatcgtgtgttggaccccaatccatatttatgtgattatcaaggccctggtaactattcctgagaccacttttcagacagtgagctggcacttttgcattgccctgggatataccaacagttgccttaaccctgtactgtacgcctttctggacgagaatttcaagagatgtttccgagagttttgtattccgacttcatcaaacattgaacagcagaatagcacaagaatccgccagaacacccgtgatcaccccagtacagctaatacagtggaccgaacaaatcaccagctagagaacctagaggctgagacagcccccctgccctag

SEQ ID NO: 198145 - DNA, 1209 bp, synthetic construct
  misc_feature 1..1209: note = Description of Artificial Sequence: Synthetic coding sequence
  source 1..1209: mol_type = other DNA
atggacagcagcgccgcccccaccaacgccagcaactgcaccgacgccctagcatactcctcatgttctccggccccatccccagggtcctgggtgaacctgagtcatcttgatggcaacttaagtgatccctgcggtcctaaccgaaccgacctgggcggccgagactctctttgcccccccactggatccccatcaatgatcacagcaatcacgatcatggcactgtacagcatcgtttgtgtcgtgggactgttcggtaattttttggtgatgtacgttattgtgaggtacacaaagatgaaaacggccacaaacatttacatctttaatttagcgctggcggacgccctggctacatctactctgccattccaaagtgtgaactatcttatgggcacatggcccttcggcactattttgtgcaagatcgtaatctctatagactactataatatgtttacgagcatattcacgttatgcactatgtccgtagataggtacatcgccgtgtgtcatccagtcaaggccctcgacttcagaacgccccgtaacgccaagattatcaatgtttgcaactggatcttgagcagcgccataggtctccctgtcatgttcatggcgactaccaagtataggcaaggatccattgattgtacactcacatttagccatcccacctggtactgggaaaatctgttgaaaatttgtgtctttatctttgctttcattatgccggtactgattataacagtgtgctacggactgatgatacttagactgaagagcgtcagaatgctctcgggatctaaagagaaggaccggaacctgaggcgcataaccagaatggtgctagtcgtcgtcgccgtgtttattgtctgttggactcctattcacatctacgtgatcatcaaagccctcgtgacaatccctgaaacaacatttcagactgtcagctggcacttctgtatcgccctgggctacaccaactcttgcctaaatcccgtgctttacgcttttctggatgagaacttcaaacggtgtttccgagagttttgtattcctaccagcagtaatatagaacaacagaattcaacccgcataagacaaaacacgcgagaccatcctagcacagccaatactgtcgacagaaccaatcaccagatccgtgaccctataagtaacctgccacgagtgtctgtgttttag

SEQ ID NO: 198146 - DNA, 492 bp, synthetic construct
  misc_feature 1..492: note = Description of Artificial Sequence: Synthetic coding sequence
  source 1..492: mol_type = other DNA
atggtgcaggcccggaccggcttctgcaagaagcagcaggagctgtggcaacgcagaaaggaagccgccgaagcactgggcacaagaaaagtctctgttttacttgcgacatcacactcgggcgctcggcccgctgtcagtacaatggattcatcggctgctcccacaaatgctagtaattgcactgatgccttagcttacagctcatgctcccccgcaccatcccctgggtcatgggtaaacctgagccatctggacggcaatctgtcagacccatgcggcccaaaccgtacggatctgggtggacgggatagcctatgcccccccaccggctcccccagtatgattaccgccatcacaatcatggcactgtatagcatagtgtgcgttgtgggtctgttcgggaactttctggtcatgtacgtgatagtccgctatacaaagatgaaaactgccacaaatatctacatctttaacctcgctctagcctag

SEQ ID NO: 198147 - DNA, 903 bp, synthetic construct
  misc_feature 1..903: note = Description of Artificial Sequence: Synthetic coding sequence
  source 1..903: mol_type = other DNA
atgaagaccgccaccaacatctacatcttcaacctggccctggccgacgctcttgccacaagcaccctcccattccaatcagtcaactaccttatggggacttggccatttgggacgattctatgcaaaatcgtgatttccattgattattataacatgttcacctcaatttttactctgtgtaccatgtctgtcgatcgctacatcgctgtctgccatcctgttaaggcactggattttcgcaccccccgcaacgcgaagataataaacgtctgtaattggatcctgtccagcgctattgggctgccagtcatgtttatggccactacaaagtatagacagggttccatcgactgtactctgaccttttctcatcccacatggtactgggaaaacctgctcaaaatctgcgtctttatatttgccttcatcatgcctgttctgattattaccgtttgttatggattgatgatcctgagattaaagagcgtccgtatgctgtctggctcaaaggaaaaagacagaaatctgagacggatcaccaggatggtgttggttgtggtcgcggtgttcatagtgtgctggactcctattcatatttacgtgatcataaaggccctcgttacaatcccagaaaccactttccagactgtgtcatggcacttttgcatcgcgctcggttatacaaactcttgtctcaatcccgtcctgtacgcatttctggacgaaaattttaaacggtgttttagggagttctgcatccccacaagttcaaacatcgagcagcaaaattccactagaatccggcagaacacacgggaccacccaagtacagccaatacagtagaccgcacaaaccatcagcttgaaaatctcgaggctgagactgcccctttaccctag

SEQ ID NO: 198148 - DNA, 903 bp, synthetic construct
  misc_feature 1..903: note = Description of Artificial Sequence: Synthetic coding sequence
  source 1..903: mol_type = other DNA
atgaagaccgccaccaacatctacatcttcaacctggccctggccgacgcgctggccactagtaccttgccttttcagtccgtcaactatctcatgggtacctggccatttggaaccatcttgtgtaagattgtcatctccattgactactataatatgttcaccagcatcttcacactctgtacgatgagtgtcgaccgctacatcgcagtgtgccacccagtgaaagcactggatttccggaccccccgtaacgccaaaattataaatgtgtgtaactggatcctgtcaagcgccatcgggctccctgtgatgttcatggctaccaccaaatatcgtcagggctcgatcgactgcacgttgaccttttctcatccaacatggtattgggaaaacctccttaaaatttgcgtgtttattttcgccttcatcatgcccgtgctcatcatcactgtctgctacgggcttatgattcttcggttgaaaagcgttaggatgctgtccggatctaaggagaaagatcgcaacctgcgtcgaatcactcgaatggttctggtcgtggttgccgtgtttattgtgtgttggactcccatccacatctatgttataattaaggccctggtgacaatcccggaaactactttccagaccgtgtcttggcacttttgtattgcattgggttatacaaattcttgcctgaaccccgtcttatacgccttcttggacgagaatttcaaaagatgcttccgggagttctgcattccgacatcgagcaacatcgaacagcagaacagtacccgcatccggcagaacacccgcgaccatccatctaccgccaatacagttgacaggactaaccaccagttagaaaacctggaggcagagacagctccactgccctag

SEQ ID NO: 198149 - DNA, 903 bp, synthetic construct
  misc_feature 1..903: note = Description of Artificial Sequence: Synthetic coding sequence
  source 1..903: mol_type = other DNA
atgaagaccgccaccaacatctacatcttcaacctggccctggccgatgcgctggctacttctaccttgccttttcagtcagtcaattatctcatgggaacatggccgtttggcaccatcctctgcaaaatcgtgatttccatcgactactacaacatgttcacctctatttttacgctgtgtaccatgtctgttgatcgatatatcgccgtctgccatcccgtgaaggcactcgatttcaggaccccccggaacgcaaaaataatcaacgtgtgcaattggatcctatcatcggctattggtctgccagtgatgttcatggccacaactaagtatcgacagggttccatcgattgtacattgacttttagccaccctacatggtactgggagaatttgctgaaaatctgtgtgttcatcttcgcctttataatgcccgtgctgatcattactgtatgttatggactgatgatactgcgactgaagagcgtgcgaatgctttctggtagtaaggagaaagatcgtaatctgcgtaggattacaagaatggttttagtggtggttgccgtgtttatcgtttgctggacccctatccatatttacgtaatcattaaagcattagtgactatccccgaaactacctttcagactgtttcatggcatttctgtatcgctttgggctacactaatagttgcctgaaccctgtgctgtacgccttcctagacgaaaattttaagcgatgcttccgcgaattctgtataccaaccagcagcaacatcgagcaacaaaacagcacacggatcagacagaacactagagatcacccgagtacagcaaatacagtagaccgtacgaatcaccagctggaaaatcttgaagcagaaaccgcaccgctcccctag

SEQ ID NO: 198150 - DNA, 1209 bp, synthetic construct
  misc_feature 1..1209: note = Description of Artificial Sequence: Synthetic coding sequence
  source 1..1209: mol_type = other DNA
atggacagcagcgccgcccccaccaacgccagcaactgcaccgacgctctcgcctactccagctgttcccctgctccgtcccccgggagctgggtgaacctgagtcacctagatggaaatctttcggacccatgcggaccaaaccggactgatctcggcggtagggactccttatgccctcccacagggagcccttctatgattacggcaattaccataatggccttgtattcgatcgtgtgtgtggttggcctgtttgggaattttttggtgatgtatgtgatagtgcgatatacgaaaatgaaaacggccaccaatatttatatctttaacctggccctggctgatgcccttgccacaagcacacttcctttccagtcagtaaattatctaatgggcacctggcctttcggcacaatactatgtaaaatcgtcatctctatcgattactacaacatgttcacatccatttttacactgtgcaccatgtctgtggaccgttacattgccgtgtgccatcctgtgaaagctcttgactttagaaccccacgaaatgccaagattatcaatgtgtgtaattggatcctgtcgtccgccatcgggctgcccgttatgtttatggctacaaccaaatatcgccagggctcaatcgactgtactctgacatttagccacccgacctggtactgggaaaaccttcttaagatctgtgtgttcattttcgccttcataatgcctgttttaatcataactgtatgctatgggctgatgatcctgagactgaagtccgtacggatgctttccggcagtaaggagaaggacaggaacctacgcaggataacccggatggtgctcgtagtggtcgctgtgtttatcgtgtgctggacgcccatccatatctatgtgatcatcaaggctcttgtcactatcccggaaaccactttccaaactgtgtcttggcacttctgtattgccttgggttatacaaactcctgcctcaaccccgtcctctatgcatttctcgacgaaaactttaagagatgcttcagagagttctgcatccctaccagttcaaacatagagcagcagaattcaactcgtattcggcaaaatacgcgagaccacccgagcaccgctaacacagtggaccgaactaatcaccagatccgcgaccctatttcaaacttgccgagagtctctgtcttctag

SEQ ID NO: 198151 - DNA, 561 bp, synthetic construct
  misc_feature 1..561: note = Description of Artificial Sequence: Synthetic coding sequence
  source 1..561: mol_type = other DNA
atggacagcagcgccgcccccaccaacgccagcaactgcaccgacgcattggcttattcgagctgctctcccgccccgagcccggggagctgggtgaatctttctcacctggatggaaacctttctgatccttgtggacctaaccggacagatttaggaggcagggactctttatgtcccccaacgggctctcctagtatgataaccgccattactattatggccctatatagcatagtgtgcgtcgtgggcttattcgggaattttctagtgatgtatgtcatcgtccgctttcatcgcctgtacacaaatatcttatccagtaaccttgtgctgggaaagccggccgaagatctttgcttccatctgcgcctgcactatgcttcagcccaccactaccgcgtgctgtggactgatgatctcgccccgcaagaatgtccccacgctctatggttgcagcggaaagggcaggaatccagcaaggatcaccaggatggagccggggggggaggctgtgtgcataggctgcttgattcacattctcatctaaggcaccactag

SEQ ID NO: 198152 - DNA, 1170 bp, synthetic construct
  misc_feature 1..1170: note = Description of Artificial Sequence: Synthetic coding sequence
  source 1..1170: mol_type = other DNA
atggacagcagcgccgcccccaccaacgccagcaactgcaccgacgcgcttgcctacagttcctgcagccccgccccctcacccggctcctgggtgaacctttctcatcttgatgggaacctgagtgatccttgtgggccaaatcggaccgatctgggaggccgcgattctttgtgtcctcctacaggttccccatctatgatcacggccattacgattatggccctgtactctatcgtttgtgtcgtggggttattcggtaactttctcgtgatgtatgttatcgttcgatataccaaaatgaagaccgctacaaatatctacatttttaacctggccttagctgacgcgctcgccacatctaccctgccattccagagcgtaaactatctgatggggacatggccttttggaaccattttatgcaagatcgtaatttctattgactattataatatgtttacatctattttcaccctttgcaccatgtcagtggaccggtacattgcagtgtgtcacccggtaaaagcccttgatttcagaacgccccggaatgcgaaaatcatcaatgtgtgtaactggatacttagcagtgccatcggcttacctgtcatgtttatggcaacaaccaaatacaggcagggatctattgattgcacgctcactttcagtcaccccacttggtactgggagaatctgctgaaaatctgcgtgttcatttttgccttcattatgcccgttcttatcattactgtttgttatggccttatgattctccgcctcaagtcggtccggatgctctccggcagcaaagagaaagacaggaacctgcgaagaatcactcggatggtgctcgtggtcgttgctgtgttcatcgtctgttggaccccgatacatatctacgtcatcattaaggcactggtcactattcccgagacaacatttcagaccgtgtcgtggcatttttgcatcgccctgggctacactaacagttgtctcaacccagttctgtacgcctttctggatgaaaattttaagagatgtttcagagaattttgtattcccaccagctctaacatcgagcagcagaacagcactcggattcggcagaacaccagagaccatccaagcaccgccaacacagtggataggactaaccaccaaagctag

SEQ ID NO: 198153 - DNA, 1095 bp, synthetic construct
  misc_feature 1..1095: note = Description of Artificial Sequence: Synthetic coding sequence
  source 1..1095: mol_type = other DNA
atggcccagcagtggagcctgcagcggctggccggccggcacccccaggattcatacgaagactccactcagtctagcatcttcacttacacaaatagtaactccactaggggaccatttgagggaccaaattatcacattgctccaaggtgggtgtatcacctgacctccgtctggatgatttttgtggttactgcttccgtgtttactaacggtctcgtgctggctgctacaatgaaatttaagaaactgaggcacccattgaactggattctggtcaacctggcagtggccgacctggctgagacagtcatagccagtacaatatccattgtgaatcaagtctccgggtactttgtgttaggtcaccccatgtgcgtcctcgaaggctatacagtcagcctgtgcggcatcactggtctttggagcctagcaatcatcagctgggagagatggttggtggtgtgcaaaccatttggtaatgtacgttttgacgcaaaactagctattgtgggaattgcctttagctggatctggagcgctgtgtggacggcacctccaatatttggatggagcagatactggccccatggtctgaaaacttcctgtggccctgacgtattttccggtagcagctacccaggtgtccaaagctatatgatcgttttgatggtgacatgctgtataatccctctggcaatcatcatgctttgttacctgcaagtctggcttgcaatacgggccgtcgcaaagcaacaaaaggagtccgagagtacacagaaggccgagaaggaggttactagaatggttgtagtgatgatctttgcatactgcgtgtgttggggtccctacaccttttttgcttgtttcgctgccgccaaccccggttacgcttttcaccctctaatggctgccctgcccgcctacttcgcaaagagcgcaacgatatacaatcccgtcatctacgtcttcatgaaccgccagttcagaaattgcatcctccagctcttcggcaaaaaagtggacgacggaagcgaattatcctccgcctccaagacagaagtgagttctgtttcaagcgtatccccggcgtag

SEQ ID NO: 198154 - DNA, 1095 bp, synthetic construct
  misc_feature 1..1095: note = Description of Artificial Sequence: Synthetic coding sequence
  source 1..1095: mol_type = other DNA
atggcccagcagtggagcctgcagcggctggccggccggcacccccaagactcatatgaggactcaacgcaaagctctattttcacctacactaatagtaatagtacacgagggccatttgaagggccaaactaccacattgcgccacggtgggtgtaccacctcacctccgtgtggatgatattcgtagtcatcgctagcgtttttaccaacggtctggtgcttgccgccactatgaagtttaaaaagctgaggcacccactcaactggatcctggtgaatctagccgtcgctgatctagccgaaacagtgattgcctcgacaattagcgtggtgaatcaagtatacggatatttcgtacttggccaccctatgtgcgttctggaaggctatacagtgagtctgtgtggcatcaccggattatggtcacttgccattatttcttgggagcgatggatggtcgtttgtaagcccttcgggaatgttaggttcgatgccaaattggctatagtaggcattgccttttcgtggatctgggccgccgtctggaccgctccaccaatctttgggtggtctagatactggccgcacggccttaaaacctcctgcggccctgatgttttttccggctctagctaccctggggttcaatcttatatgattgtgctgatggttacatgttgcattacacccctcagtattatcgtgctttgttatctgcaggtctggctggctatccgggccgtggctaagcagcaaaaggaatccgagagcacacagaaggctgaaaaagaggtgacacgcatggtggtggtgatggtgctggcattttgtttctgttggggcccatatgcattttttgcatgttttgccgccgccaatcccggttacccgttccaccctctcatggctgcccttcccgccttcttcgccaaatccgctaccatatataaccctgtgatttacgtcttcatgaataggcagttccggaattgcatactccagctctttggaaaaaaggtcgacgacggcagtgagctgagtagtgcctccaaaacagaggtgtctagcgtcagcagcgtgagcccagcttag

SEQ ID NO: 198155 - DNA, 1047 bp, synthetic construct
  misc_feature 1..1047: note = Description of Artificial Sequence: Synthetic coding sequence
  source 1..1047: mol_type = other DNA
atgcggaagatgagcgaggaggagttctacctgttcaagaacatctcttctgttgggccgtgggacggaccccaatatcatatcgcccctgtctgggccttctacctgcaagccgcttttatgggtaccgtcttcctgattgggtttcctctcaatgccatggtcttggttgccactttacggtataagaaactgaggcagcctctgaattacatactggttaacgtttcatttggaggattcttactgtgcatattttccgtctttccggtgttcgtggcatcgtgcaatggatatttcgtgttcggccggcatgtgtgcgccctcgaagggtttctaggcacagttgcgggtttggtaactggctggtcccttgcctttttggcgttcgagagatacatagtgatatgcaaaccttttggtaactttcgcttttcttctaaacacgcgctgacagtggttctggcgacgtggacaatcggcatcggcgtgagcattcctccgtttttcggctggagcaggtttatcccagagggacttcagtgcagttgcggccctgactggtacaccgttggaaccaaataccggtctgaatcatatacctggttcctgttcattttttgcttcattgtgcctttgtcactaatctgcttctcatacactcaacttttacgagccctgaaggccgtcgctgcccagcaacaggagagcgctacaacacaaaaagcggagcgagaggtctcccgaatggtggtggtgatggtcggttcgttttgcgtgtgttatgtcccttacgcagccttcgccatgtacatggtgaataaccgtaatcacgggctagacttgagattggtgactattcccagctttttctcaaagagtgcttgcatctataaccctatcatttactgctttatgaacaaacagttccaggcatgcataatgaagatggtgtgcggcaaggctatgaccgatgagtctgacacgtgttcgtcgcagaagaccgaggtgagcaccgtgtcctctacacaagtgggacctaattag

SEQ ID NO: 198156 - DNA, 972 bp, synthetic construct
  misc_feature 1..972: note = Description of Artificial Sequence: Synthetic coding sequence
  source 1..972: mol_type = other DNA
atgtacagcggcaaccggagcggcggccacggctactgggacggcggcggagccgctggcgctgagggtcccgcccctgcagggaccctcagccccgccccgcttttctctcccggaacgtacgaacggctggcactgctccttgggagcattggacttctgggcgtgggaaataacctcctggtgctggtactttactacaaatttcaacgcttgaggaccccaacccatctgctgttagtgaatatttctctgtctgatctgctggtctccctgtttggagtgacatttacctttgtgagctgcctgagaaatggctgggtgtgggacacagtgggctgcgtgtgggacggctttagcggttccctcttcggatggattagccagctgcaggcagcaacacgggaggcccgagcctctatgggtcccgtccagcagggaaccatttgtatgcagcttagatgtgtggaggacctgcaaactatccaggtcatcaaaatcttgaagtacgagaagaagctcgcgaagatgtgttttcttatgatttttaccttcctggtatgctggatgccatacattgtgatctgctttctcgtggtcaatggacacggacatttagtgacacccaccatcagcattgtttcctatctatttgctaaaagcaatactgtgtacaatcccgtgatctacgtgtttatgatccgaaagtttaggcggtcccttcttcagctactctgtctgcgattgctcagatgccagcggcccgctaaagatctacccgctgctgggtctgagatgcagatcagacctatcgtgatgtctcaaaaggatggggacagacctaagaaaaaggtgacgtttaattcttctagcataatcttcattatcaccagcgacgaaagcctgagtgtggacgacagtgacaaaacaaacgggtccaaggtggacgtcatccaggtgcgccccttgtag

SEQ ID NO: 198157 - DNA, 1209 bp, synthetic construct
  misc_feature 1..1209: note = Description of Artificial Sequence: Synthetic coding sequence
  source 1..1209: mol_type = other DNA
atgtacagcggcaaccggagcggcggccacggctactgggacggcgggggggcagcgggagcagagggccccgcacctgcaggcacactgtcgcccgcaccactgttcagccccggcacctacgagcgcctggctcttctcctcggaagcattgggcttctaggtgttggaaacaacctgcttgtgctggtcctgtattacaagttccagcgcttgcggacccctacacatctcttgctggtgaacatcagcttatcagacttattggtgtctttatttggagtaacattcacattcgtaagctgtcttaggaatgggtgggtatgggatacagtggggtgcgtgtgggacgggtttagtggaagcttgttcggcatcgtgtcaatcgccacccttactgtgctggcatacgagcgatacattcgagttgtgcacgctagagtaattaatttctcttgggcatggcgagcgataacctacatctggctatacagcctggcctgggccggcgcacctttactgggttggaaccgatatattctggacgtacacggattggggtgtactgttgattggaagagtaaagatgcgaacgactcctcctttgtgctgtttctgtttctcgggtgcctagtggttccattgggtgttatcgcccattgttacggtcacattctctattctatccgcatgcttcgctgtgtggaggacctgcagacaatccaggttattaagatactgaaatatgagaaaaaactggcgaaaatgtgtttcctcatgatatttacattcctcgtatgctggatgccatatatagtcatttgttttctcgtcgttaatggccatgggcacttagtcacccctaccatttcgatagtgtcatacctatttgctaaatctaacaccgtgtacaacccagtaatctacgtgtttatgatcagaaaattccgaaggagcctcctccagcttctttgcttacgactgctccgctgccagagacctgccaaggatctgccagccgcagggtctgagatgcaaatccggcccattgtcatgagtcagaaagacggagacaggccaaagaaaaaggtcacattcaactcctcttccattatctttattatcacaagcgatgagtccctcagtgtggatgactccgataaaacaaatggatccaaggtggacgttattcaagtccgacccctctag

SEQ ID NO: 198158 - DNA, 2886 bp, synthetic construct
  misc_feature 1..2886: note = Description of Artificial Sequence: Synthetic coding sequence
  source 1..2886: mol_type = other DNA
atgtggcggctgcggcgggccgccgtggcctgcgaggtgtgccagagcctggtcaagcacagctcaggcatcaagggaagccttcccctgcagaagctgcatctggtgtccagatcaatctatcactcacaccaccctacccttaagcttcaacgcccccagctgagaactagttttcaacagtttagctcactgacgaaccttccactgcgtaagcttaaattcagtcccatcaagtatggataccagccccgtcggaatttttggcctgccaggctggccactcggctccttaagctgagataccttatactgggaagcgctgtgggaggaggatataccgctaagaagacctttgatcagtggaaggatatgatcccagacctgagcgaatacaaatggatcgtgccagatattgtgtgggagatcgatgagtatatagacttcggctcccccgaggagactgcattccgcgcaacagaccgtggttccgagtcagacaagcacttccggaagggactccttggtgaactcatcctgcttcaacagcagattcaggaacacgaagaggaggcccgtagggcggcaggccagtattctacaagctacgctcagcaaaaacgtaaagtatctgacaaagaaaagatcgaccagctacaggaggagctgcttcacacacagctaaagtaccaacgcatcctcgaacgactggagaaggaaaataaggaactgaggaagctggtactgcagaaggatgataaaggcattcatcaccgcaagttaaagaagtcattaattgacatgtatagtgaggtgctggatgtgctatctgactatgacgcctcatataacacgcaagatcacctaccacgggtcgtcgtggtaggtgatcagagcgctggaaagaccagcgttttggagatgatcgcacaggctaggatttttcccaggggatccggtgaaatgatgacccgcagtcccgtaaaagttaccttgtctgaagggccgcaccatgtggctctttttaaggactccagccgcgagttcgatctgaccaaagaggaagatctggccgctcttcggcacgaaattgaactgcggatgcggaaaaatgtgaaggaaggttgcacagtaagccctgagaccatttctctaaatgtcaaaggcccagggcttcagagaatggtcctggttgatctacccggtgtgatcaacacggttacttcaggcatggccccagacacaaaagaaacgatcttttctatctcaaaagcttacatgcagaaccccaatgccattattctttgtatccaagatggctctgtggatgccgaacgaagcattgtgaccgacctcgtgtcccagatggatccccacggacgaagaacaatcttcgtgcttacgaaggttgacctggcggagaaaaatgtagcctctccaagccggattcagcaaattattgagggaaaactgttcccaatgaaagcactggggtacttcgccgtcgtgaccggcaaggggaattcctctgaatcaatagaagctatacgagaatatgaggaggagttttttcaaaacagcaaactgctaaaaacttccatgctcaaggcacaccaggttacaaccaggaacctgagcctcgctgtgtctgactgtttctggaagatggtgagagagtccgtggagcagcaggccgattcatttaaggcaacgagatttaacttagagacagaatggaaaaataattacccaaggctgcgggagctcgaccgaaacgagttgttcgagaaggctaagaatgagatcttagacgaggtgatttctctgagtcaggtgacacctaaacattgggaggagattttgcaacagtccttgtgggagagggtgagcacccatgtcatcgagaatatatatcttcctgcagcacagactatgaacagtggaacgtttaacacaactgtagacatcaagctcaagcagtggacggataaacaactccctaataaggcagtagaggtcgcttgggagaccctacaagaggaattctcccgattcatgaccgagccgaagggcaaagaacacgatgacatctttgataagttgaaggaggccgtgaaggaggagagtatcaagcgccacaaatggaatgatttcgccgaggacagcctcagggtcatccaacacaatgccctggaggatcgaagtatttccgacaaacagcagtgggatgcggcaatctacttcatggaagaggcattacaggcacgtcttaaagacactgagaatgccatagaaaatatggtaggcccagactggaagaagaggtggctctactggaaaaaccgaacccaggagcaatgtgtacacaacgagacaaaaaacgaattggaaaaaatgctgaagtgcaacgaggagcaccccgcatacctggcatcggatgaaataacaacagtgaggaagaatctggagtccagaggcgtggaggttgatccgagtctgatcaaggacacgtggcaccaggtttacagacgtcattttctgaagaccgccctgaatcactgcaatctgtgtcgcagaggcttctattactaccaacggcactttgtcgacagcgagctggagtgcaacgacgtcgtgttattttggcgcatccagcggatgttagcaatcaccgccaacacgctgcgccagcagctgactaacactgaggtccggcgactcgaaaagaacgtgaaagaggtattggaggactttgccgaagatggcgagaaaaaaattaagctcctgacaggtaaacgggtccagcttgcagaagatctcaagaaagtgcgagagattcaggagaaactggatgctttcatcgaagctttgcaccaagaaaaatag

SEQ ID NO: 198159 - DNA, 3048 bp, synthetic construct
  misc_feature 1..3048: note = Description of Artificial Sequence: Synthetic coding sequence
  source 1..3048: mol_type = other DNA
atgtggcggctgcggcgggccgccgtggcctgcgaggtgtgccagagcttggtgaagcactcctctggcataaagggtagcctcccactgcagaagctgcaccttgtgagtaggtctatctatcacagtcaccaccctacactcaagctgcagagaccacagctgaggacctcttttcagcagttcagtagcctgacgaacctgcccctccgtaagctgaaattctccccaattaaatatggttaccaacctaggaggaacttctggccggccagacttgcaacaagactgttgaagctgcggtatctgatcctgggctccgccgtcgggggcggctacaccgccaaaaaaaccttcgatcagtggaaggatatgatccctgatttgagcgaatataagtggatcgtgcccgacatcgtgtgggagatcgacgagtacatagatttcgagaagatccgcaaggctctgccatcaagcgaggaccttgttaagctggcccctgattttgacaagattgtggagtccttgtccctccttaaagatttttttacctccggtcataaattggtgtccgaagtcatcggagcctccgatctcctcttgctgctgggttctcctgaagagacagcatttcgggccactgatagagggtccgagagcgacaaacactttaggaagggactgttaggggagctcatcttgctgcagcagcaaattcaggaacacgaggaagaagccagaagggcggccggtcagtactcgactagttatgcccaacaaaaaagaaaagtttccgacaaggagaagattgatcagctgcaggaagagctcctgcatactcagctgaaataccaaagaatcctcgaacgtctggagaaggagaacaaggaactgcgtaagctagtccttcaaaaggacgacaagggtattcaccaccgcaagcttaaaaaaagcttgatcgatatgtacagtgaggtcctcgacgttctgtccgactacgacgcctcctataacacacaggatcatctgccgcgtgttgtggttgtcggcgatcagtcagctggaaagactagtgtgctggagatgatcgctcaggctcgcatctttcctaggggaagcggagagatgatgacaaggagtcctgtaaaggtgactctgtcagagggccctcaccacgtcgcactgttcaaggactcctcaagagagtttgatctgactaaagaagaagacctggcggcactacggcatgagatagagttacgaatgaggaagaacgtgaaggagggctgtaccgtgtctcctgagacaatttctcttaacgtgaaggggcctggactgcaacgcatggtgcttgtagatctgcccggtgtgattaataccgtgacaagcggcatggcgccggatacaaaggagacaatcttttctatcagcaaagcttacatgcagaaccctaatgcaatcatactctgcatccaagacggatccgtcgatgctgaaaggagcatcgtgaccgatctggtatcacagatggacccacacggaagaaggacaatttttgtgttgactaaggtcgacctcgctgaaaagaacgtagctagcccttcacggatccagcagatcatcgagggcaaactgtttcccatgaaggctttaggctattttgccgtcgtaaccggtaaggggaactccagcgaaagcatcgaagcaataagggagtatgaggaggagttttttcagaactccaagttgctgaaaactagcatgctcaaggcccaccaggtcacaacacgaaatctgagcttagccgtgtctgactgtttttggaagatggttagggagtctgtggaacagcaggccgactctttcaaagcaactaggtttaacttggaaacagagtggaagaacaactacccacgtttaagggagttggatcgcaatgaactcttcgagaaggccaaaaatgaaattttggatgaggtgatatcactgagccaggtgacccccaagcactgggaggagattctgcagcaatcactgtgggagcgcgtgtctacacacgtgattgagaatatctacctgcccgccgctcaaactatgaatagtggaacctttaataccacagtagatattaaactgaagcaatggacagataaacagttgcctaacaaagccgtggaagtcgcttgggaaacactacaagaagagttctcacggttcatgacagaaccgaaaggcaaagagcatgacgacatatttgataaactcaaagaggccgtaaaagaggagtcgatcaaaaggcacaaatggaacgatttcgccgaggatagccttcgcgtgatacagcacaatgccctggaggatagatcaatctctgacaagcagcagtgggatgccgccatttatttcatggaggaagccctgcaggccagactgaaggatacggagaacgctatagagaatatggttggcccagactggaaaaaaagatggctctattggaaaaaccggactcaggagcaatgtgtccataacgaaaccaaaaacgagctcgaaaaaatgcttaagtgtaatgaagagcaccccgcatacttagcctcagacgagattaccactgtccgtaaaaacctggagagcagaggtgttgaggtggacccatcgctgatcaaagacacatggcaccaggtgtaccgacggcactttctgaagacggctcttaaccactgtaacttgtgccgacggggcttttactactaccagagacacttcgtcgactcggaactggagtgcaatgacgtcgtgctgttctggcgtattcagcggatgctggctatcactgctaatacactcaggcagcaactcacaaacacagaagtccggcgcctcgagaagaacgtcaaagaagtcttggaggacttcgctgaggatggggaaaagaaaatcaaactgctcaccgggaaaagagtgcagctggccgaagacctcaagaaagtgagagagatccaggagaaactcgatgcgtttatagaggccctccatcaggaaaagtag

SEQ ID NO: 198160 - DNA, 2940 bp, synthetic construct
  misc_feature 1..2940: note = Description of Artificial Sequence: Synthetic coding sequence
  source 1..2940: mol_type = other DNA
atgtggcggctgcggcgggccgccgtggcctgcgaggtgtgccagtctctcgtcaagcattcctcaggtatcaagggctccctccctctccagaagctacatttggtcagccggtctatctaccatagtcaccatcctaccctgaagctacagcgtccacagttacgtacttcctttcaacaattcagctccctgaccaatctgcccctacggaagctgaagttcagtcccattaaatatgggtatcaaccccgccgcaatttctggcccgccagactggctacacgtctcctcaaactgaggtatcttatactgggtagcgccgttggggggggatatacagcaaagaaaaccttcgatcaatggaaagatatgatccccgacctgagtgagtacaaatggatcgtgcctgacatagtgtgggaaatcgatgagtatatagactttggacataagctggtatctgaagtgattggcgcatcagatcttctcttgctcctgggctctccagaggagaccgcctttcgggccacggaccgtggctctgaaagtgacaagcacttccggaagggtctgctgggggagctcatcctcttgcaacagcagatccaggaacatgaagaggaagccaggcgcgctgctggtcaatattctacgtcctatgcccagcaaaaacggaaggttagtgataaggagaagattgatcagcttcaggaggagctgcttcatacccagctaaagtaccagagaatcctcgagcgcttggagaaagaaaacaaggagctgagaaaacttgttctgcaaaaagatgacaaaggcatccaccaccggaaattgaagaagtctctgatcgacatgtactctgaggtccttgacgttctgtctgactacgacgcctcttacaatactcaggaccacttacctagagtggtggtggtgggagaccagagtgctgggaagaccagtgtccttgaaatgattgcccaggcgagaatttttcctaggggaagtggggagatgatgacgaggtccccggtcaaagtgactctgtccgaaggcccccatcacgtggcactctttaaagattcaagccgtgaatttgacctcacaaaggaggaagaccttgctgccctgcgccatgagattgaattgagaatgcggaaaaatgtgaaggagggatgtactgtaagccccgagacaatctcgctcaatgtgaaggggcctgggctgcagagaatggtcttagtggaccttcctggcgtaattaatacggtgacctccggaatggccccggatacaaaagagacgattttctccatcagtaaagcctacatgcagaaccccaacgcaatcattctttgtatccaggacggctctgttgacgcggaaagatctatcgtgacagacttggtatcccagatggatccacatggccggaggacgattttcgtcctcacgaaggtggaccttgctgaaaaaaatgtggcctcaccctcaagaatacaacagattattgaagggaaactctttcctatgaaggcgttgggttactttgccgttgtcactggaaaaggaaacagtagtgagtccatcgaggccattagagaatatgaggaggaattttttcagaattcaaaactgctcaaaacatcaatgttgaaagcccaccaggttacaacacgtaatttgagcttggcagttagtgattgtttctggaagatggtccgtgaatctgtggagcagcaagccgactccttcaaagctacccgattcaatctcgaaaccgagtggaaaaacaattatcctagactgagggagctggataggaatgaactctttgagaaagccaagaacgaaatcctggacgaggtcatctctctgtcacaggtcaccccaaaacattgggaagagattttacagcagtcactttgggagcgcgtgagcacccacgtaattgaaaacatctatctccctgctgcccagactatgaatagtggcacattcaatactacagtagatataaaactgaagcagtggaccgacaaacagctgcctaataaggccgttgaagtagcttgggagactcttcaggaggagttcagcagatttatgacggagcctaagggtaaggaacacgacgatatcttcgacaaactcaaggaggcagtaaaagaggagtccatcaagcgccacaagtggaacgatttcgccgaagactccctgcgagtcattcaacataatgcactggaggataggtcgatctcggataagcagcagtgggacgctgcgatttatttcatggaggaggctctgcaggccagacttaaggacacagagaatgccattgagaacatggtgggcccggattggaagaaacgctggctatactggaaaaacaggacccaggaacagtgcgtgcataacgagactaagaacgaactcgagaaaatgctgaaatgcaatgaagagcaccctgcttatctggcttctgacgagataaccacagtcaggaagaaccttgaatcacgtggggtcgaggttgatccttcactcatcaaggacacttggcatcaggtctatcggaggcattttctgaaaacagccttgaaccactgcaacttgtgccgtaggggcttctactactaccagcgccattttgtggacagcgaacttgaatgtaacgatgttgttctcttttggaggatccaacggatgctcgccatcaccgctaacacactgcggcaacaattgactaacacggaggtacggcgcctggagaagaacgtgaaagaggtgttggaagattttgctgaagatggggaaaagaaaatcaaactactcacagggaagagggtgcagctcgcagaagacctgaagaaggttagggagattcaggaaaaactggatgcattcattgaggcgctccaccaggagaagtag

SEQ ID NO: 198161 - DNA, 2937 bp, synthetic construct
  misc_feature 1..2937: note = Description of Artificial Sequence: Synthetic coding sequence
  source 1..2937: mol_type = other DNA
atgtggcggctgcggcgggccgccgtggcctgcgaggtgtgccagagtctggtgaaacactccagcgggattaaaggatcgctgcctctgcaaaagctacacctagtaagcaggtccatatatcattcccaccacccgaccctgaagttgcagcgacctcagctgagaacgagtttccagcagttttctagccttacaaacttgccactacgaaaactgaaattttcccctatcaagtatggttatcagccacgaaggaacttttggcctgccaggctggccactcgcctactgaagttgcgctatctgatactgggaagcgccgtgggcggcggctacaccgccaagaaaactttcgatcagtggaaagacatgatacccgacctgagtgaatacaagtggattgtgcccgacatcgtttgggaaattgatgagtatatcgattttgagaaaatccgcaaagccctccctagctcggaggatctagtgaaactggctccagacttcgacaagattgtagagtcgctcagcttgctgaaggacttttttacttccggccataagttggtgtcggaggtgatcggggcttccgatctcctgctgttactgggaagtcctgaagaaaccgcattccgagcaacagatcgcggctcagagtccgacaagcattttaggaaagtctccgacaaggagaagattgaccagctgcaggaggagctactccacactcagctaaaatatcaaaggatcctggaaagactagagaaagagaataaggaactcagaaagctggtcttgcaaaaggacgacaagggtattcaccatcggaagttgaagaaatccctgattgacatgtatagcgaggttctcgatgttctttccgactatgacgcatcatataacacccaggaccatctcccgcgtgtggtggtggtcggtgatcagtctgctggtaagacaagcgtactagaaatgattgcacaggcaaggatctttcctcggggctcaggagaaatgatgacgaggagtcccgtgaaggttacgctgtctgagggccctcaccatgtcgccctgttcaaggactctagcagagagttcgacttgacaaaggaagaagacctagcggccctgcgacatgaaatagagctccgtatgcgaaaaaatgttaaggaagggtgcaccgtctctcctgagactatatcattgaacgtgaagggacccggcctccagaggatggtcttggttgacctgccaggagtcattaacaccgtgacatcgggcatggctcccgacacaaaagagaccatattctcaatctcgaaggcctacatgcagaaccccaacgccatcatcctgtgcatacaggacggatcagtcgacgcggagcgatctattgtaactgatctggttagccaaatggacccccatggcagacgcactatatttgtgctgacaaaagtcgatctcgccgaaaagaatgtggcttctccaagcagaattcaacagataatcgaggggaaactgtttcccatgaaagccctggggtacttcgctgtcgtcacgggaaaagggaatagctcggagtcgattgaagccatcagagaatatgaggaggaattctttcagaatagtaagctccttaaaacatcgatgcttaaagctcatcaggtgacaacgagaaaccttagcctggcagtttcagattgcttctggaagatggtgagggagtcagtggaacagcaagcagatagttttaaggctactagattcaacttggaaaccgaatggaaaaataactacccccggctgcgcgagttggaccgcaatgagttgttcgaaaaagccaagaatgagattctggacgaagttataagcctttctcaagtgactccaaagcactgggaggagatactccagcagagtctttgggagcgggtcagcacccatgtgatcgaaaatatttatctgcctgctgcccagacaatgaactctggcacattcaatacaactgtggatatcaaactgaaacagtggacagacaagcagctgcccaacaaggctgttgaagtggcatgggagacattgcaagaggagttctcccggtttatgaccgagcccaaaggaaaagaacatgacgatattttcgacaagctaaaagaggcagtgaaggaggaatctatcaagcggcacaagtggaatgacttcgctgaggattcgcttcgagttatccagcataatgctctagaggatagaagtatctccgacaaacaacagtgggacgccgcaatatattttatggaagaagccctgcaagctcgccttaaagacaccgagaacgccatagaaaacatggtgggccccgattggaagaaacggtggctgtactggaagaatcggacacaagagcagtgcgtgcacaatgaaacaaagaacgaattggagaaaatgcttaagtgtaacgaagagcacccggcatacctggcctcagacgagatcaccacagttcgcaagaaccttgaaagcaggggagtagaggtcgaccccagtctgatcaaagatacctggcaccaggtgtacaggcgtcactttctcaaaactgctcttaaccactgcaacctgtgtcgccgaggcttttattattatcaacgccactttgtcgactctgagctcgagtgtaacgacgtggtcctattttggaggatacagagaatgctggcgataactgctaatacactgcgacaacagctgaccaatacggaagtgcgacgcctggaaaagaatgtaaaggaagtcctggaggattttgccgaagacggagagaagaagatcaagctcctgaccggcaagcgtgtgcaacttgccgaggacctgaagaaagttagggagatccaagaaaagctggacgctttcatcgaggccctgcatcaggaaaaatag

SEQ ID NO: 198162 - DNA, 2994 bp, synthetic construct
  misc_feature 1..2994: note = Description of Artificial Sequence: Synthetic coding sequence
  source 1..2994: mol_type = other DNA
atgtggcggctgcggcgggccgccgtggcctgcgaggtgtgccagtctctcgtcaaacactcctccggaatcaagggcagtctgcctctgcagaaattgcacctggtcagccggagcatctatcactcccatcatcctactctgaaacttcaacgaccacagctacgcacttcatttcagcagtttagcagtctcaccaaccttcccctccggaaactgaagttcagtcctattaaatacgggtaccaacctcgtcggaacttttggcccgcccgcctggcaacccggcttctgaaactgaggtatctgattcttggttcggcagtgggtgggggttacacagcaaaaaaaactttcgatcagtggaaggacatgattcccgacctgtcggaatataaatggatcgtacccgatatcgtctgggaaatcgacgagtatatcgattttgagaaaattcggaaggcacttccttcatccgaagacttagtcaaattggcccccgactttgataaaattgttgaaagtctgtcattgctgaaggatttctttacgtcaggcagtccagaagagacagcattccgcgctactgatagggggagtgaatcggacaagcattttagaaagggtttgctgggtgagctaattcttctgcagcaacaaatccaggaacacgaggaggaagccagaagagccgcaggccagtactccacaagttacgcccagcaaaagcgcaaagtcagcgataaggaaaagatcgatcagctgcaggaggagctgttacacacccagctgaagtaccagagaattctggagcggctggagaaggaaaacaaggagcttcgaaagctggtcctccaaaaggacgacaaaggaattcaccaccggaaactgaaaaagtctttgatcgacatgtactcagaagtcctggacgttctttctgattatgatgcatcctacaacacacaggaccacctgccacgggtggttgtagttggagaccagtcagccgggaagacctctgtactggagatgatcgctcaagcgcgcatctttcctaggggcagtggagagatgatgacgcggtccccagtgaaggtaacccttagcgagggaccacaccatgtggccctcttcaaagacagctccagggagttcgatctcactaaagaggaggacctggctgccttaaggcacgaaattgagctgcgaatgagaaagaacgtaaaggaaggttgtactgtcagccccgagaccatctcattgaacgtgaaaggacctggattacagagaatggtgctggtggatctccccggagtcattaatacggtaacctctggaatggccccagataccaaggaaaccattttcagcatctctaaggcctatatgcagaacccaaatgccattattctctgtattcaggacggtagcgtagatgcagagcgtagcatcgtgaccgacctcgtctctcagatggacccccacggaaggcggaccattttcgtgctgacgaaggtagatctggccgagaagaatgtagctagtccgagccggatacagcaaatcattgagggtaagttgttccccatgaaggctctggggtattttgcagtggttactggtaaagggaattccagcgagtccattgaggctatccgcgagtatgaagaagagtttttccagaacagtaagctgctcaagacgtccatgctaaaggcccaccaggtgactacacggaacttaagcctggctgtgtccgactgcttctggaaaatggtgcgggaatccgtagaacagcaggctgacagttttaaagcgacacggttcaacctggaaactgagtggaagaacaattatccccgactgcgtgagctcgatcggaacgagctgttcgaaaaggctaagaacgagatacttgatgaggtcattagtctgagccaggtcacccctaagcactgggaggagatcctacagcaatctctgtgggaaagagtatcaacacacgtgattgaaaacatttacctgcctgcggcacagaccatgaattctggaaccttcaacaccacagtggacatcaagttgaaacagtggacagataaacaacttcctaacaaggccgtggaggtagcttgggagacattacaagaagaatttagccggttcatgaccgagccaaagggcaaagaacacgacgacatttttgataagctgaaagaggccgtcaaagaggagagcatcaagagacacaagtggaacgactttgcggaagactcccttcgagtgatccagcacaacgctttagaagatagatccatcagcgataaacagcaatgggatgccgccatctactttatggaggaggccttgcaggcacgcctcaaagacaccgagaacgcaattgaaaatatggtgggcccagattggaaaaaacggtggctatattggaaaaatagaacccaagagcaatgtgtccataatgaaacaaagaacgagttagaaaaaatgttgaagtgcaatgaggaacaccccgcatatctggcctccgacgaaatcacgactgtccgcaagaatctcgagagtcggggcgtggaggttgacccctctctgattaaggacacctggcaccaggtgtatagacgtcatttcttgaaaacggctttaaaccactgcaatttatgtcgcaggggtttctactattatcaacgccactttgtggactctgaacttgagtgtaacgacgtcgttctgttttggcggatccagcgaatgttggcaatcactgccaacacgctgcggcagcagctgactaacactgaggtgagaaggctggagaagaacgttaaagaggttctggaggactttgccgaggacggagagaagaagatcaaactgctaacagggaaacgcgtccagctggctgaggacctgaagaaggtgcgcgaaatccaggaaaagctcgatgcctttattgaggcgcttcaccaggaaaaatag

SEQ ID NO: 198163 - DNA, 501 bp, synthetic construct
  misc_feature 1..501: note = Description of Artificial Sequence: Synthetic coding sequence
  source 1..501: mol_type = other DNA
atgtggcggctgcggcgggccgccgtggcctgcgaggtgtgccagagtttagtgaagcatagttcgggaatcaagggcagcctccccctgcaaaagctccatctcgtgagccgctccatctaccactcgcatcaccctactctcaaactccagaggccccagcttcgcacctcgttccagcagttcagttccctgactaacttgccgctgcgtaagcttaagtttagccctattaagtatgggtatcagcctagacgaaacttctggcctgctcggctggccacccgacttctcaaactgcgctatttgattcttggcagtgcagtgggtgggggctacactgctaagaagacctttgatcagtggaaagatatgatccccgatctctcagagtacaaatggattgtgcctgatatcgtatgggagatagacgagtacattgatttcggctccccggaagagactgccttcagagcaaccgatagggggagtgaaagctag

SEQ ID NO: 198164 - DNA, 2883 bp, synthetic construct
  misc_feature 1..2883: note = Description of Artificial Sequence: Synthetic coding sequence
  source 1..2883: mol_type = other DNA
atgtggcggctgcggcgggccgccgtggcctgcgaggtgtgccagagtctggtcaaacactcatcaggcattaaggggagtttgcctctgcaaaagttgcatttagtcagccgcagcatataccactctcaccacccaacactaaagttgcagagaccgcagctgcgcactagctttcagcagttcagtagcttgaccaatttaccactccgcaagctgaagttcagcccaatcaaatatggataccaaccccgaagaaacttctggccagccagactagccaccaggcttctcaaactgcgttatcttatcctgggatctgcggtggggggagggtatacagctaagaagaccttcgaccagtggaaggacatgattcctgatctctccgaatacaagtggattgtgccagatatagtttgggagattgatgagtatattgatttcgagaaaatccgcaaagccctcccaagttccgaagacctagtgaaactggcaccagactttgacaagatcgtggagagcctgtctttgctgaaagatttctttacctccgggtcgcctgaggaaaccgccttccgcgcaaccgaccgcggaagcgaatccgataaacacttccgtaaggtgtcagataaggagaagatcgaccaactgcaagaggaactgctgcatacgcagctcaaatatcagcgcatactagagcggctggagaaggagaacaaggaacttcgcaaactggtgctacagaaggatgacaagggcatccatcatcgcaaactgaagaaatcattgattgacatgtatagtgaagtcctggacgtgctgagcgactacgacgcatcctacaatacccaggatcacttgccaagggtggtggtggttggcgatcagagtgccggcaaaacgagtgtgctggagatgatcgcccaggctcgtatctttcctaggggatctggtgaaatgatgacaagaagtcctgtgaaggtcaccctctctgagggcccacaccacgtggccctgtttaaagacagttcaagggagtttgacctgacaaaagaagaagacctcgcggccctgcgccatgagatcgagctgcgcatgaggaagaacgtgaaggagggctgtaccgtgtcccctgaaacgatttccctcaatgtcaagggcccaggactgcaacggatggtgttagtggacctacctggagtgattaacacagttacatccgggatggcccccgacacgaaagagacaatcttttcgatatcaaaggcctacatgcagaacccaaacgccatcatcctgtgcattcaagatggatctgttgatgccgaacgtagtatcgttaccgacttagtgtcccagatggatccccacggacgccggactattttcgtcctaaccaaagtggacctagctgagaaaaatgtggcctcgccgagcagaatccagcagattatcgagggcaagctgttccctatgaaagcactcgggtacttcgccgtggtcacagggaaggggaactccagcgaaagcatagaggcgatccgagagtatgaggaagaatttttccagaattccaagcttttgaagacgtccatgctgaaagcccaccaggttaccacccgaaacctgagcctggcagtatccgattgcttttggaaaatggtgagagaatccgtggaacaacaggccgacagtttcaaggccactcgattcaatctagagaccgaatggaagaataactatcctcgcctgagggaactggatcggaatgaactctttgaaaaggctaagaacgaaatcctcgacgaagtcatcagtctctctcaggtgacgccaaaacactgggaggagattttgcagcaaagtctgtgggagcgggtgtccacccacgtgatcgagaacatctatctccctgcagcgcagactatgaattcaggaacatttaataccacagtggacattaaactgaagcaatggaccgataaacaactgccgaacaaggcggtagaagtggcctgggagactctgcaagaggaattctctcgattcatgaccgaaccaaaggggaaagagcacgacgatattttcgataaacttaaagaagcagtgaaggaagagagcattaagagacataagtggaacgatttcgctgaagatagtcttcgggtaattcagcataatgctctggaagaccggagcatttcagataaacagcagtgggacgccgccatctatttcatggaggaggctcttcaagccaggctgaaagatactgaaaacgctatcgagaatatggtcggacctgattggaagaaacgatggctgtattggaagaaccgtacacaggagcagtgtgtgcacaacgagactaaaaatgagctcgagaagatgttgaaatgcaacgaggaacatcccgcgtacctggcgagcgatgaaattaccacggttcgtaagaacctggaaagtcgtggcgtggaagttgacccttctttaattaaggacacatggcatcaggtgtatagaaggcacttcctgaaaaccgctttaaaccactgtaacctgtgtaggagaggcttttactattatcagaggcatttcgtggactccgagcttgagtgtaacgatgtggtgttgttctggaggatacagcgcatgctggctattacagcaaatacacttaggcaacaactgaccaacacggaagtcagacgtctggaaaagaacgttaaagaggtgctcgaggactttgcagaagatggagagaagaaaattaagctgttgactggtaagcgagtgcagctcgccgaggatctcaaaaaggttcgcgaaatccaagagaagctggacgcattcatcgaagctctgcaccaggaaaagtag

SEQ ID NO: 198165 - DNA, 558 bp, synthetic construct
  misc_feature 1..558: note = Description of Artificial Sequence: Synthetic coding sequence
  source 1..558: mol_type = other DNA
tgatacctgatcctgggcagcgccgtgggcggcggctacaccgccaaaaaaacattcgaccagtggaaggacatgatccctgacctgtcagagtataaatggatcgtcccggatatcgtctgggaaattgatgagtacattgacttcgaaaagataaggaaggctctgccgagttcagaggaccttgtgaagctcgcacccgatttcgataagattgtggaatccctatccctgctcaaggactttttcaccagcgggcataaactggtttccgaagtgattggtgcatcggatctactcttgctccttggcagccctgaggagaccgcgtttcgcgccacggatcgaggctctgaatccgacaaacacttccggaaggtatcagataaagaaaagattgaccaattacaggaggaactcctgcatacgcagctgaaataccaacgaatacttgagagactggaaaaggagaacaaggagctccggaagcttgtgttgcaaaaggatgacaagggtatacatcaccggaagcttaaaaaaagtcttattgatatgtag

SEQ ID NO: 198166 - DNA, 540 bp, synthetic construct
  misc_feature 1..540: note = Description of Artificial Sequence: Synthetic coding sequence
  source 1..540: mol_type = other DNA
atggtggtgggcgccttccccatggccaagctgctgtacctgggcatacgtcaggtgtccaaaccgctcgccaacagaataaaagaagccgcccgcaggtcggaattttttaaaacatatatttgtttaccaccggcacagctctaccactgggttgagatgcggaccaagatgcgcatcatgggttttcggggcacagtcataaaacccctaaacgaggaagccgctgccgaactcggagcagaattgctgggggaggccactatctttatcgtgggcggcgggtgtctagtcctagagtactggagacatcaagcacaacagcggcacaaagaggaagagcagagagcagcttggaacgccctgcgggacgaggtgggccacctagctctggcactggaagcccttcaggctcaggtgcaagcggctccaccacagggagccctggaggaactgagaacagaacttcaagaagtgcgcgctcagctgtgtaaccctggcagaagcgcctctcatgccgtccccgcatccaaaaaatag

SEQ ID NO: 198167 - DNA, 543 bp, synthetic construct
  misc_feature 1..543: note = Description of Artificial Sequence: Synthetic coding sequence
  source 1..543: mol_type = other DNA
atggtggtgggcgccttccccatggccaagctgctgtacctgggcatcaggcaagtctcaaagcccctggcaaatagaattaaagaagctgctcgtcggtcagaattctttaagacgtacatttgcctcccccctgctcagctataccattggcttgagatgcggaccaaaatgcggatcatgggttttaatgccgctgccattaagccacttaatgagggtgcagccgccgaactgggcgcagaactccttggcgaaggtataattttcatcactgcttgctcctgcctaatgctcgaatactggcggcaccagctgcagcagcggaggaaagagaaagagaggcgagtcgcgcgtgaggctctaagaggcgaggtggggcacctgggtttggcattagaggaactgcaggcacaggtccaggccaccagcacacaactcgctctggaggagctccgggcacagctgcaggaagtgcgagctcatctctgcctgcgagatcctccgccagcacctcccgtggcaccggcgtctgagaagtag

SEQ ID NO: 198168 - DNA, 381 bp, synthetic construct
  misc_feature 1..381: note = Description of Artificial Sequence: Synthetic coding sequence
  source 1..381: mol_type = other DNA
atgcggaccaagatgcggatcatgggcttccggggcaccgtgatcaagccgctcaacgaagaagctgccgcagaactgggagccgaactactgggagaggccacgatttttatagtgggcggcgggtgcctggtgctggaatattggcgccatcaggcccaacaaagacacaaggaggaagaacagagggcggcttggaatgccctacgcgatgaggttggccacttagcactggccctcgaggccttgcaggctcaagtccaggctgctcccccccagggcgcactggaggagctgagaacagaactgcaggaagtccgtgcgcagctatgtaatcctggacgatcagctagccatgctgtcccagcaagcaaaaagtag

SEQ ID NO: 198169 - DNA, 1734 bp, synthetic construct
  misc_feature 1..1734: note = Description of Artificial Sequence: Synthetic coding sequence
  source 1..1734: mol_type = other DNA
atgagccaccagcccctgagctgcctgaccgagaaggaggacagcccatctgaatcgaccggtaatgggcctccgcacttagcccatccaaatctggacacgttcacccctgaggaacttctgcagcaaatgaaggagttacttaccgagaatcaccagctgaaggaggcgatgaaactgaataaccaggctatgaagggcagatttgaagagttgtctgcttggactgaaaagcaaaaggaagagcgacagttctttgaaatacaatctaaggaggccaaggagcggttgatggcattgtcccatgagaatgaaaagctcaaggaagaacttgggaaactgaaaggcaaatccgagcggagctctgaggacccgactgatgatagtcggctgccccgcgcagaagctgaacaagagaaggaccagttacgcacccaggttgtcagactacaggctgagaaggccgacttgctcggaattgtgtctgagcttcagttgaaacttaattcttctggctcttcagaggatagctttgtggaaattagaatggctgagggagaagccgaaggtagtgtgaaagagataaagcactcaccaggacccacccgcaccgtgtctaccggtactgctctgtcgaagtatcgttcaagatcagcagatggggccaagaactacttcgagcacgaagagttgactgtgagccagttactcctctgccttcgcgaaggcaaccagaaggttgagagactcgaggtggccttgaaagaagccaaggaaagggtcagcgactttgagaagaagacttcaaacaggagcgaaattgagactcagactgagggctcgaccgaaaaagagaatgatgaggaaaaagggcccgaaacagtggggtcagaggttgaggcactgaacctgcaggtcaccagcctgttcaaggaactgcaggaagcacatactaaactgagcaaggccgagctaatgaagaagagattgcaggagaaatgtcaggccctggagcggaagaactcagctatcccaagtgaactgaatgagaagcaagaactggtgtacacgaacaagaaactagagctgcaagtcgaatcaatgttgagtgagattaagatggagcaagccaagaccgaggacgagaagtctaagctcaccgttctccagatgacacataataagttgctacaggagcataataacgcattgaaaactattgaggaactgacccgaaaggagagtgaaaaggtggaccgagctgtactgaaggagttatctgagaagctggaactggccgagaaggctctcgcatccaagcagctgcaaatggatgagatgaagcagacaatcgcgaagcaggaagaggatctggaaacaatgactatcctccgagcccagatggaggtctattgcagtgatttccacgccgaacgcgcggcccgcgaaaaaattcacgaggagaaagaacaattggcattgcagttggctgtcctgctcaaagagaacgatgccttcgaggatggtgggcggcaatctctcatggaaatgcagagccgacacggggcaagaacttcagacagcgaccaacaggcctatctcgtgcaaaggggcgcagaggatcgcgactggaggcagcaaagaaatatccctattcattcatgccctaagtgcggagaagtcttgcccgatattgatactttgcagatccacgtcatggactgcatcatttag

SEQ ID NO: 198170 - DNA, 1734 bp, synthetic construct
  misc_feature 1..1734: note = Description of Artificial Sequence: Synthetic coding sequence
  source 1..1734: mol_type = other DNA
atgagccaccagcccctgagctgcctgaccgagaaggaggacagcccatcagaatccaccggaaacgggcccccacatcttgcccatccaaatctggacactttcactccagaagagcttctgcagcagatgaaggaacttctcactgagaatcaccagttaaaggaggctatgaagctgaacaaccaggccatgaaggggaggttcgaagaactcagtgcatggaccgagaaacagaaggaagaaagacagttttttgaaatacagtctaaagaggccaaagaaaggcttatggcgctttcacacgaaaatgagaaattaaaagaagagttaggaaagctaaaagggaagagtgaacggtccagtgaggatccaaccgacgactcccgcttaccccgcgctgaagccgaacaggaaaaagatcagctaaggacccaagtggttaggttgcaagccgagaaggccgatctactggggatcgtcagtgagctccaattaaagctgaactcttcaggttcatcagaagattcttttgtcgagatccgcatggcagaaggcgaagctgagggaagcgtaaaagaaatcaaacactcccccggccccactagaacagtttccaccggtaccgcactttccaagtatagaagccgaagcgcagatggcgctaagaattactttgagcatgaggagcttaccgtttcacagcttctgctgtgccttagagaaggtaaccagaaggtggagcggttggaggtggccttgaaggaggccaaagaaagggtgtccgacttcgaaaaaaaaacttccaataggtctgagattgaaactcagacggagggttcaaccgagaaagagaatgacgaggagaagggccctgagactgtggggtcagaggttgaagcgctcaaccttcaggtgactagcttattcaaggagttgcaggaggcccacacaaaactgtccaaagctgaactcatgaaaaagcgactgcaggagaagtgtcaagctttggaacgcaagaacagcgctattccatcggagctcaatgagaaacaggaactagtgtataccaataagaagctggagcttcaggtggaatccatgctgtcagagatcaaaatggaacaggccaagaccgaggacgagaaaagtaagctcaccgtattgcagatgacccacaataagctgctgcaggaacacaacaatgcccttaaaacaattgaggagctcacaaggaaggagagcgaaaaggttgaccgtgccgtgctgaaagaactcagtgaaaaactggagctggccgaaaaggcactggcaagcaagcagctgcagatggacgagatgaagcagaccatagctaaacaggaagaagacctggagactatgactattctccgggctcaaatggaagtctactgtagcgatttccatgccgagagagccgcaagggaaaagatacatgaggagaaagaacagctggccctacaacttgccgttcttttgaaagaaaatgatgcattcgaggatgggggtcgccaatcactgatggagatgcagtctaggcatggcgctcgcactagtgactcggatcagcaagcgtatctggtccagcggggcgcagaggacagggactggcgccagcagagaaatattcccattcatagctgcccaaagtgtggagaagtcctgcctgacatcgacaccctgcagattcatgtcatggactgtatcatttag

SEQ ID NO: 198171 - DNA, 1734 bp, synthetic construct
  misc_feature 1..1734: note = Description of Artificial Sequence: Synthetic coding sequence
  source 1..1734: mol_type = other DNA
atgagccaccagcccctgagctgcctgaccgagaaggaggacagcccatccgaatccactggcaacggccctccccatcttgcccacccaaacttggataccttcacgccagaggagctgctgcagcaaatgaaagagctactgactgaaaatcatcagctgaaagaggcaatgaaattgaacaatcaggctatgaaaggaagattcgaggagctgagtgcctggacagagaaacagaaagaagagaggcagtttttcgagatccagtctaaggaagccaaggagcggctgatggccttatcccacgagaatgagaagcttaaggaagagctgggcaaactgaagggtaagtctgaacgttcttctgaggatccaactgacgactcacgacttcctcgcgcagaggccgaacaagagaaggatcaactgcgtacccaggtggtccgtttacaggccgaaaaagcggatttactagggatcgtgagcgagctccagctgaagctgaatagtagcggcagcagcgaggatagtttcgttgaaattcgaatggcggaaggcgaggcagagggaagcgtcaaggagattaagcattctcccgggccaacccgtacagtgtcaaccggcaccgctttaagcaagtatcggtcccggtctgctgatggggctaagaattacttcgaacacgaagagctaaccgtgagtcaactgttactgtgcctgagagaagggaaccagaaggttgagaggttagaagttgctctgaaggaagctaaagagcgggtttctgatttcgagaaaaagacctccaatagaagcgaaatcgaaacccagaccgaggggtccactgaaaaagaaaacgacgaggaaaaaggacccgagaccgttggttctgaggtggaggccctcaatttacaagtcacctccctattcaaggagctgcaggaggcccacaccaagttgtccaaggctgagctgatgaagaaacggctccaggagaaatgccaggcactcgagcgcaaaaacagtgctatcccaagcgagctgaacgagaagcaagagctggtttacacaaataagaaactggagctccaagtggaatctatgttatccgagatcaaaatggaacaggccaaaactgaagacgaaaagtccaagcttactgtcctgcaaatgacccataataaactgctccaggagcataataacgccctgaagacaatcgaagaactgacacgcaaggagagtgaaaaggtagaccgggcagttttgaaggagctgagtgaaaagctggagttagctgagaaagcattagctagtaaacagttgcagatggatgaaatgaagcagaccattgccaagcaggaggaggacttagaaactatgaccattctgagagcacaaatggaggtgtattgctccgatttccacgcagagcgagccgccagagaaaaaatccacgaggaaaaagaacagttggctttgcaattggctgtattattgaaggagaacgacgcattcgaggacggaggaaggcagtctcttatggagatgcaaagcaggcacggcgctaggaccagcgacagtgatcaacaagcctatctcgtccagcggggtgctgaggacagggattggaggcagcagaggaatattcccattcactcctgccccaaatgcggtgaggtcctccctgacatcgacactctgcagattcatgtgatggattgtataatctag

SEQ ID NO: 198172 - DNA, 1716 bp, synthetic construct
  misc_feature 1..1716: note = Description of Artificial Sequence: Synthetic coding sequence
  source 1..1716: mol_type = other DNA
atgagccaccagcccctgagctgcctgaccgagaaggaggacagcccatcagaatctaccggcaacggcccaccacatttggcgcatccgaatctggataccttcactcctgaggagctcttgcagcagatgaaagagcttcttaccgaaaatcaccagctgaaagaagcaatgaagcttaataaccaggccatgaagggtcggtttgaggagctgtcggcctggactgagaagcagaaggaagagcgacagttctttgagatccagagtaaggaggcaaaggagcgcctaatggcgcttagccacgagaatgagaagttaaaggaggagctgggcaagctcaaagggaaatccgaacgctctagcgaggatcccactgatgactcacgcctgccccgcgccgaagcagagcaggaaaaagaccagctgcgtacacaggtagtcagactccaggccgaaaaggccgacctgctgggaattgtgtccgagctgcaactgaaactcaatagcagcgggtcctccgaggactctttcgtggagatccgcatggccgagggagaagccgaaggcagtgtcaaggagatcaagcactcccctggacccacacggacagtctctaccggaacctctcgttctgcagacggagcgaagaactattttgagcatgaggaattgacagtttcccagctcctattatgcctgagggaaggaaatcagaaggtcgagcggctggaagtggccctgaaggaagctaaggagcgggttagtgacttcgagaaaaagaccagcaaccgctcagagatcgaaacccaaaccgagggaagcacagagaaagagaatgatgaagagaagggacctgaaactgtgggctctgaggttgaagctctcaaccttcaggtgactagcttgttcaaagaactgcaggaggcacataccaaactgagcaaggccgaactgatgaagaagagactgcaggaaaaatgccaggcgctggaaaggaagaattcagccataccatccgaactgaacgagaaacaggagctggtgtatactaacaagaagctcgagcttcaagtagaaagcatgctgtccgaaataaaaatggagcaggctaagactgaagatgagaagtcgaagctcaccgtgctacagatgacacataacaagctgctacaggagcacaataacgccttgaagaccatagaggagcttacgagaaaggagtccgagaaagtggaccgcgctgtgttgaaggagttatcagaaaagctggagttggcggaaaaggcattagccagcaagcagcttcagatggacgagatgaagcagaccatcgccaaacaggaggaagacctggagactatgaccatcctgagagcacaaatggaggtctactgctctgatttccatgccgagagagcagcacgagagaaaatacacgaggaaaaggagcaacttgccctacaacttgccgttctgctaaaagagaatgacgctttcgaagacggcgggcgacagagcctgatggaaatgcagagtcgccatggtgcgagaacttctgatagtgaccagcaggcgtatttggttcagcggggtgctgaggatagggactggcgccaacaacgcaacatccccattcactcatgccccaagtgtggtgaggtgctgcccgatatcgacacattgcagattcacgtcatggactgtattatctag

SEQ ID NO: 198173 - DNA, 1734 bp, synthetic construct
  misc_feature 1..1734: note = Description of Artificial Sequence: Synthetic coding sequence
  source 1..1734: mol_type = other DNA
atgagccaccagcccctgagctgcctgaccgagaaggaggacagcccgagcgaatctaccggaaatggaccaccacacctggcacaccccaacctggacactttcacccccgaggagcttctgcagcagatgaaggagcttctgaccgaaaaccatcaactcaaggaggccatgaagctcaacaatcaggcgatgaagggcagatttgaggaattgagcgcttggactgagaagcaaaaggaggaacgtcagtttttcgagatccagtccaaggaagctaaggagcggttgatggctctgtctcatgaaaacgagaaattgaaggaggaattggggaaactcaagggcaagtctgaacgcagcagcgaggatccaaccgacgacagccgcctccctagagcagaggctgagcaagagaaagaccagctgcgaacccaggtggtgcgactgcaagcagagaaggcggacttgctgggaatagtatccgaactgcaacttaagttgaattcctccggttccagtgaagacagctttgtggagatacgaatggcggaaggcgaggcagagggcagcgtgaaagaaataaaacatagccccggtccgacacgcaccgtgagtacaggcacagccctgagtaagtaccgcagcagaagtgcggatggcgcaaaaaactatttcgaacatgaagaactcacagtgtctcagttattgctgtgtctgcgagaaggtaaccagaaggtagagcggctggaggtcgcactgaaagaggccaaggaaagagtgtccgatttcgagaagaaaacttccaacaggagcgagatagagactcaaaccgagggcagtaccgaaaaggagaacgatgaagaaaaggggccggagacggtgggttccgaggtggaggcactgaatctccaggtgactagcctgtttaaggaacttcaagaagcgcacaccaagctgtccaaagcagagctcatgaagaaacggctgcaggaaaagtgccaggccctcgagcgcaagaactcagctatcccttcggagctgaacgagaaacaagaacttgtatacaccaataaaaagctggagttgcaggtcgagagcatgctgagcgagatcaagatggagcaggctaagactgaggacgagaagtcaaaactcaccgtcctgcagatgacccacaataagctacttcaggagcataataacgcgttgaagacgatcgaagagctgacacgaaaggaatcggaaaaggtagaccgggccgttctgaaggagttatcagagaagttggaattagccgagaaggctctcgcatccaaacagctgcagatggatgagatgaaacagacgatcgcaaagcaggaggaggacctggaaaccatgaccattctccgcgctcaaatggaagtctactgtagcgactttcatgccgaacgcgcggccagagagaagatccatgaggagaaggagcaactcgctctccagctggcggttctgctgaaggaaaatgacgccttcgaagacggcggcagacaatcactgatggaaatgcaatcccgccacggcgcacggaccagcgattctgaccaacaggcctatctggtgcagaggggtgccgaagatagagattggcggcagcagaggaatatccctatccatagctgcccaaagtgtggggaggtactgccggatattgacacactgcagatacatgtcatggattgtattatatag

SEQ ID NO: 198174 - DNA, 1716 bp, synthetic construct
  misc_feature 1..1716: note = Description of Artificial Sequence: Synthetic coding sequence
  source 1..1716: mol_type = other DNA
atgagccaccagcccctgagctgcctgaccgagaaggaggacagcccaagtgagtctaccgggaatggccccccccacctagcacatccaaacctcgacacctttacaccagaggagcttctgcagcagatgaaggaacttctcactgagaaccaccaactaaaagaggcgatgaagctgaacaaccaggcaatgaaagggcggtttgaggaactgtcggcttggacagagaaacagaaggaggaaaggcagttctttgagatccagtctaaagaagctaaggagagattgatggccctttctcatgagaacgagaagctgaaggaggagctgggcaagttgaagggcaaatccgaaaggtcaagtgaagatcctacagatgactcaaggctcccgagagctgaggccgaacaagagaaggatcagttgaggacccaagttgtgcggctgcaggcagagaaggctgacctgcttggcatcgtctctgagctccagttgaagctaaactcaagcggtagcagtgaagattcttttgtcgagatccggatggctgagggcgaggctgaaggcagcgtaaaggaaatcaagcactctccaggtcccacccggactgtgagtactggtactagccgaagtgctgatggcgccaagaattacttcgagcatgaggagctgactgtgtcccaacttttgctgtgcttaagggagggtaatcagaaggtggagcgattagaagtagcccttaaagaggccaaggagcgtgtttccgattttgagaagaagacctcaaacagaagcgaaatagaaacccagaccgagggctctaccgagaaagagaatgatgaggaaaaggggccagagacggtcggtagcgaagtcgaggcactcaacctgcaggtaacatcactatttaaagaactgcaggaagctcacaccaagctctccaaggcagaactcatgaaaaaaaggctgcaggaaaagtgtcaggcccttgaacggaaaaattcagccatccccagcgaactgaacgagaaacaggaattagtctacactaataaaaaactcgaactccaggttgaaagcatgttgtcagagattaaaatggagcaggcaaaaacagaggatgaaaagtccaaattaaccgtactccagatgacacataataaactgctgcaggaacacaacaatgccctcaagactatagaagaactgacgcgtaaggaaagcgaaaaagtcgaccgagccgtattaaaggaattgagcgagaagctggaactggccgaaaaagcattagcctccaagcaactccagatggacgaaatgaaacagacgatcgccaaacaggaggaggatcttgagacgatgacaatcttacgggcccagatggaggtgtattgcagtgattttcacgctgagcgtgcagcaagagaaaagatccacgaagaaaaggaacagttggcactgcagttagcagtactcctgaaggaaaatgacgcattcgaagatgggggaaggcaatcattgatggagatgcagagcagacatggcgctcgcaccagcgactctgatcaacaagcttacttggtgcagcggggtgcggaggatagggattggcggcagcagaggaacattcccattcacagctgccctaagtgcggggaagtcctgcctgatatagataccctgcaaatccacgtcatggactgcataatatag

SEQ ID NO: 198175 - DNA, 381 bp, synthetic construct
  misc_feature 1..381: note = Description of Artificial Sequence: Synthetic coding sequence
  source 1..381: mol_type = other DNA
tgaggcgaggccgagggcagcgtgaaggagatcaagcacagccccggtcccactcgcaccgtgtctacaggtaccgcgctgagcaagtacagaagcaggtcggcggacggtgctaagaactactttgaacacgaagagttgacggtttcacaactcctcttatgcctccgcgagggtaaccagaaggtcgagcgcctagaggttgctctgaaggaggccaaggaacgagtgtcagactttgaaaagaagactagcaacagaagtgaaattgagacccagactgaaggtagcacagagaaggaaaacgacgaggaaaaaggccccgagaccaccggcttccatcacgttggtcaggatggcttggacctcttaacttcctag

SEQ ID NO: 198176 - DNA, 444 bp, synthetic construct
  misc_feature 1..444: note = Description of Artificial Sequence: Synthetic coding sequence
  source 1..444: mol_type = other DNA
atgaagctgaacaaccaggccatgaagggccggttcgaggagctgtccgcttggacggaaaagcagaaggaggagaggcagttctttgaaatacagagcaaggaagcgaaagaacgtttaatggctctcagccatgaaaatgagaaactcaaggaggaattggggaaactaaagggaaagagtgagcggagcagcgaggaccccacagatgactctcggctgcccagagctgaggccgagcaggaaaaggaccaattacggactcaggtggtaaggctccaggcagaaaaggcggatctgctgggtattgtgagcgagttgcagctgaaactcaactcctccggcagctctgaggattctttcgtcgagatccggatggctgagggtgaagctgaaggatcagtcaaggagatcaaacattcccctggacctacccggacatag

SEQ ID NO: 198177 - DNA, 912 bp, synthetic construct
  misc_feature 1..912: note = Description of Artificial Sequence: Synthetic coding sequence
  source 1..912: mol_type = other DNA
atgcaccccgagcccgcccccccccccagccggagcagccccgagctccccccatctggcggctctacaacttcggggagtcgacggtctcggcggagatcaggtgacggcgagcctcccggggctcctccccccccaccgccaccaagcgcggtgacttaccctgactggattggccagtcatactccgaggtgatgagcctcaacgaacactccatgcaagcgcttagttggcgcaagctctacctgtccagggccaagctgaaggcctcttcccggaccagtgctctgctgtctggttttgccatggtggcgatggtggaagtgcagctcgacgcagaccatgattatcctccaggccttttgatcgcgtttagcgcatgcacaactgtcctggtggccgtgcacctttttgccctgatgatctctacgtgtatactgcctaatatcgaggcagtgtccaacgtacataacttgaatagcgtgaaggagtcccctcatgagaggatgcatagacacatcgagctggcttgggccttctcaactgtgataggtaccctgctcttcctagccgaggtggttctcctctgttgggtcaaatttctgcctctgaagaagcagcctggacagccaagacccacatctaagcctcccgctagtggcgctgcagcgaatgtttccacctcagggatcacaccaggccaagccgctgcaatagcctccactaccattatggtgccattcggtcttatcttcatagtgttcgctgtccacttctaccggtccctggtttcacacaaaacggaccgacagttccaggagttgaatgagctggccgaatttgccagattgcaggaccagctggatcataggggggaccacccactgacgccaggaagccattacgcttag

SEQ ID NO: 198178 - DNA, 765 bp, synthetic construct
  misc_feature 1..765: note = Description of Artificial Sequence: Synthetic coding sequence
  source 1..765: mol_type = other DNA
atgagcgccgagctgaacgtgcccatcgaccccagcgcccccgcctgcccggaaccaggtcataaaggcatggattatcgtgattgggtgagacgaagctacctggaactggtgacctctaatcaccactccgttcaagccctgagttggcgcaagctttacctatcaagggcaaagctgaaggcttcgtctcgaacgtcagccttgctatctgggttcgccatggtggctatggttgaagtacagttggaaacacagtaccagtatcctcgcccattgctgattgccttcagtgcatgcaccacggtgctggtggccgtgcacttgtttgccttgttaatttcaacctgcattctgccaaatgtggaggccgtttctaatatacacaacctcaatagcatatctgaaagcccccacgaaagaatgcacccttatatcgaactcgcgtgggggttttcaacagtcctgggcattctgctgtttctcgccgaggtagtgttgctctgttggatcaagttcctgccagtcgacgcgagaagacagccaggtcctccacccggacccggctctcacacgggttggcaggctgctctggtgagcaccatcattatggtgcccgtagggctgatcttcgtggtgttcaccattcacttctatcgtagcttggtgcgccataagaccgaaagacataatagagaaatcgaagagctgcacaaactaaaggtgcagcttgacgggcacgaaaggagcctgcaggtcttgtag

SEQ ID NO: 198179 - DNA, 765 bp, synthetic construct
  misc_feature 1..765: note = Description of Artificial Sequence: Synthetic coding sequence
  source 1..765: mol_type = other DNA
atgagcgccgagctgaacgtgcccatcgaccccagcgcccccgcctgtcctgaaccggggcataaaggcatggactatagagattgggtgcgtcgctcgtacctggaactagtgacttctaaccaccactccgtgcaggcactgagctggaggaagctgtacttaagccgggctaaattgaaggccagtagccgaacttctgccttgctcagcgggttcgccatggtcgccatggtggaggtgcaattagagacgcagtaccagtatccgcgtcctctgcttatcgcattcagtgcatgcactaccgtactcgttgctgtgcacttgtttgctctgttgatcagcacttgtatcctgccgaatgtggaggctgtgtctaatatccataatctgaattccatcagcgagtccccccatgaaagaatgcatccctacatcgagctcgcatggggcttttctacggtattggggatcctgctctttttggcagaagtagttctgctttgctggatcaaattcttgcccgtggatgccaggcgccagcccggacctcccccaggacccgggagccacaccggatggcaggcagcgttagtctccacgattattatggttcccgtagggctgatcttcgttgtttttactatacacttttatagatctctggttcgacacaaaacagagcgacacaaccgcgaaattgaggaattgcataaactgaaagtccagctggacggacacgagaggtccctgcaggtactttag

SEQ ID NO: 198180 - DNA, 639 bp, synthetic construct
  misc_feature 1..639: note = Description of Artificial Sequence: Synthetic coding sequence
  source 1..639: mol_type = other DNA
atgagcgccgagctgaacgtgcccatcgaccccagcgcccccgcctgtccagagcccggccacaaaggaatggactacagagattgggtccgaagaagctatctcgagctggttacgtctaatcaccactccgttcaggccctgagctggcggaagctgtacttgtctcgagcaaagcttaaggcgagcagcaggacaagcgccctactctccggatttgccatggtggccatggtggaagtacagcttgagacccagtaccagtatccaagaccgctcctgatcgctttctctgcctgtacaacggtgctggtagcagtccacctttttgccctcctgatcagtacctgcatcttaccgaacgtcgaggcagtctccaacatacacaacctgaattccatcagtgaatcaccccatgaaagaatgcatccatacatcgagctggcatgggggttcagcactgtcctgggaatcctgctgttcctggccgaggtcgtgctgctgtgttggatcaagtttctgccagtggacgcccggcggcaaccgggtccaccgccaggaccaggcagccacaccggatggcaagccgctctggtgtcaaccattataatggttcccgtaggactgatctttgtctag

SEQ ID NO: 198181 - DNA, 765 bp, synthetic construct
  misc_feature 1..765: note = Description of Artificial Sequence: Synthetic coding sequence
  source 1..765: mol_type = other DNA
atgagcgccgagctgaacgtgcccatcgaccccagcgcccccgcctgtccagagccaggccataaaggtatggactaccgggattgggtgagacggtcttacctggagctcgtgacgtctaaccaccacagcgtgcaggctttgtcatggcggaagctctatcttagtcgcgccaagctgaaagcttcttcgcggacgtctgcgctgctgagtggcttcgcaatggttgctatggttgaggtgcagttagagacccagtaccagtatcccagaccgcttctcattgccttttcggcctgtacgaccgtactcgtggctgtgcaccttttcgctctcctcatctcaacctgtatactacccaatgtggaagccgtgtcaaatatccacaacctgaactctatctcagaatcgccccatgagcggatgcatccatatatagagctcgcgtgggggttctcaaccgttctcggaatattgctatttctcgcagaagtggtgctcctttgttggattaagttcctgccggtcgatgcccgccgacagcctggaccacccccaggccccggctcacataccggatggcaggcagcgttggtttccacgataattatggtgcctgtcggcctgattttcgttgtctttaccattcatttctatcggtctctggtcaggcacaaaacagagcggcacaacagagagatcgaggaattacacaaactcaaagtccagcttgacgggcatgagagatcactgcaggtgctgtag

SEQ ID NO: 198182 - DNA, 765 bp, synthetic construct
  misc_feature 1..765: note = Description of Artificial Sequence: Synthetic coding sequence
  source 1..765: mol_type = other DNA
atgagcgccgagctgaacgtgcccatcgaccccagcgcccccgcctgcccagagcccggacacaaaggtatggactacagggattgggttcgcagaagttaccttgagctggtaaccagtaaccaccactccgtgcaggcactttcttggcgcaaactctacctgtccagagctaaactcaaggcctcatctcgtacttctgccctgctgagtggttttgcgatggtggcaatggtggaggtgcagctagagactcagtatcagtatccgcgccctctgctcatcgccttcagcgcctgcactacagtacttgtggctgtgcacctgtttgctttactaatctccacatgtatcctgcccaacgtggaggccgtgtcaaatattcacaaccttaattctatttcagaatctccgcacgaacgcatgcatccatacatagagctggcatggggtttcagtacagtgcttggcatcctgttgttcctggccgaggtcgtgttattatgctggatcaagtttcttccagttgatgcccggcgtcaaccaggacccccccctgggccaggcagtcacacaggttggcaggctgccctggtttctaccatcatcatggtgccagttggtctgattttcgtggttttcaccatccatttttatcgatcactagtgaggcacaagactgaaagacataatagggaaatagaggagctgcacaaattgaaagtccaattggacggtcatgaacgatcactgcaggttctctag

SEQ ID NO: 198183 - DNA, 93 bp, synthetic construct
  misc_feature 1..93: note = Description of Artificial Sequence: Synthetic coding sequence
  source 1..93: mol_type = other DNA
atgagcgccgagctgaacgtgcccatcgaccccagcgcccccgcctgccctgaaccaggtcacaagggtatggattacagggactgggtgtag

SEQ ID NO: 198184 - DNA, 690 bp, synthetic construct
  misc_feature 1..690: note = Description of Artificial Sequence: Synthetic coding sequence
  source 1..690: mol_type = other DNA
atgagcgccgagctgaacgtgcccatcgaccccagcgcccccgcctgtcctgaacccggacataagggcatggactatagagattgggttaggcgttcatatctggagttggttacaagtaaccatcacagcgttcaggctctgtcttggcgtaagttgtatctgtccagggcaaagctgaaggcctccagccgcacttccgcactgttatcggggttcgcaatggtagccatggtggaagtgcagttggaaacgcagtatcaatatcctagaccgctcttgattgccttctctgcctgcaccacagttttagtagctgtccatctgttcgctctactaatttctacttgtatccttcccaacgttgaagccgtttcaaatattcataacctcaatagtatctctgagtcacctcatgaacgtatgcatccatacatagagctggcatggggttttagcacagtgcttggaattctgctgttcctggccgaggttgtcttgctctgttggattaaatttctgcccgtggatgccagacgtcagcctggaccgcccccaggtccaggcagccatacaggctggcaggcagcattggtttccacaatcatcatggtgccagtgggcttaattttcgtggtcttcacaattcacttttatcgaagtctcgtgcggcacaaaaccgagcgatag

SEQ ID NO: 198185 - DNA, 294 bp, synthetic construct
  misc_feature 1..294: note = Description of Artificial Sequence: Synthetic coding sequence
  source 1..294: mol_type = other DNA
atgagcgccgagctgaacgtgcccatcgaccccagcgcccccgcctgtcccgagccaggccacaagggcatggattaccgggattgggtccgacggtcttacctggagctagtcactagcaaccaccactcggttcaggcgttaagctggagaaagttgtatctcagtagggccaaactgaaagccagttctagaacatccgctttactgagtgggtttgccatggtggccatggtggaggtgcagctggagacgcagtaccagtacccccgcccactgttgatagcgttctag

SEQ ID NO: 198186 - DNA, 888 bp, synthetic construct
  misc_feature 1..888: note = Description of Artificial Sequence: Synthetic coding sequence
  source 1..888: mol_type = other DNA
atgaagggcggcgagggcgacgccggcgagcaggcccccctgaaccctgagggcgaatcccctgccggcagtgccacatatagagagtttgtgcatcgggggtacctggatctcatgggagccagccagcacagcttaagagcactgtcatggaggcgtctctacctgtctcgggctaagctgaaagcgtcttcacggacctccgctttattgagcggctttgcaatggttgctatggtggaggttcaacttgagtcggatcatgaataccctccaggcctactggttgctttcagcgcctgcaccaccgtgctggtggctgtccatctctttgccttgatggtctccacctgcctgctgccgcacatcgaggccgtgagcaacattcataatctcaactcagtccaccagtctccgcaccaaagactgcaccgttacgtggagctggcatggggtttcagcaccgcattgggcaccttccttttcctggctgaggtggtgctggttggttgggtgaaatttgtgccaatcggggccccgctggatacccctacaccaatggtgcctacttcccgtgttcccggcaccctggcccctgtggcgactagcttgagtccagctagcaacctgccacgcagctcggcctccgccgcgccctcgcaggccgagcccgcatgccccccaagacaggcctgtgggggaggaggggctcacggtcccggatggcaggcagcaatggccagcaccgctattatggtccccgtgggattggtattcgtcgcctttgctcttcatttctatagatctctggtcgcccataagactgatcgctacaaacaggagctagaagagctgaaccgcctgcagggcgagttgcaagcagtttag

SEQ ID NO: 198187 - DNA, 822 bp, synthetic construct
  misc_feature 1..822: note = Description of Artificial Sequence: Synthetic coding sequence
  source 1..822: mol_type = other DNA
atgaagggcggcgagggcgacgccggcgagcaggcccccctgaaccccgaaggggagagtcccgccggcagcgccacttatcgagagtttgtgcacaggggttacctggacctgatgggcgccagccagcactccctcagggcactcagttggcggagactatacctctctagagccaaactcaaggccagtagccgcacttctgccctcttatcagggtttgccatggtcgccatggtggaggtgcagcttgaatctgaccatgagtaccctcctggattactggtggccttttccgcatgcaccacagtgttggtcgcagtccacctgttcgctctgatggtgagcacatgtctacttccacacatcgaagctgtatccaatattcataacctgaattcagtgcaccagtcgccacaccagcgcctgcatcggtacgtggaactggcctggggatttagcaccgcactggggaccttcttgttcctcgccgaggtagtgcttgtcggatgggtgaagtttgtacctataggcgctccactggacactcccacaccgatggtcccgacctctagagttcccggcactctggcacccgtggcaaccagcctgtccccagcttctaacttgcctaggtcgtccgccagcgctgctcccagccaggcggagccggcttgcccacctcgtcaagcctgtggcgggggtggcgcccatgggcctggctggcaggctgctatggcctcaacattcccaggtatttttccaatctccctcagcctaggcttctgtaagctgctctgcacgtgggccgggctgtcctag

SEQ ID NO: 198188 - DNA, 414 bp, synthetic construct
  misc_feature 1..414: note = Description of Artificial Sequence: Synthetic coding sequence
  source 1..414: mol_type = other DNA
atggccggcagccaggacatcttcgacgccatcgtgatggccgacgagagattccacggcgaaggctaccgcgaagggtacgaagaaggaagttccctgggtgttatggagggtcgacaacacggtaccctgcacggggctaaaatcggaagcgagatcggctgttaccagggatttgcttttgcttggaagtgcctcctccacagctgcacaaccgagaaagattcaagaaagatgaaggtgttggagagcctgattggaatgatccaaaagtttccttacgatgatcccacatatgacaagctgcacgaagacctagacaagatccgtggcaaatttaagcagttctgtagcctgctgaatgtacagcctgactttaagatctccgctgagggttcagggctgtctttctag

SEQ ID NO: 198189 - DNA, 666 bp, synthetic construct
  misc_feature 1..666: note = Description of Artificial Sequence: Synthetic coding sequence
  source 1..666: mol_type = other DNA
atggccggcagccaggacatcttcgacgccatcgtgatggccgacgagcggtttcacggtgaggggtaccgggaagggtacgaggaagggagcagcttgggggttatggagggcagacagcatggtactctccacggagcgaagatcggatctgaaataggttgctaccagggatttgcattcgcctggaaatgcctgttacactcctgtactacagagaaagattcgagaaaaatgaaggtgctcgagagcctgatcggtatgatccagaagttcccctacgatgatccgacgtacgacaaactgcacgaagacctggacaaaattcgtggaaagtttaagcagacaggcctgtcaccctccgctgtaatggtgcgccctcccagctatgttgagctgccagttacttgctggtgttgggaggcaccacgatgtaatcagaagtgtacagaccctgcagcccggagacctgatccccagacctgcgcttctcaggaccgcctgcgatgcgcaccttgtacctgtcatcaaccactagcgtccaggtatacccagcatcccggcctggttcctctccctcatcatgaccggcagtccgtaccacaggggcccagagtagtgcagacagatgctgcagcccggatggtggagcaacagacaatgtag

SEQ ID NO: 198190 - DNA, 414 bp, synthetic construct
  misc_feature 1..414: note = Description of Artificial Sequence: Synthetic coding sequence
  source 1..414: mol_type = other DNA
atggccggcagccaggacatcttcgacgccatcgtgatggccgacgagcgcttccacggcgagggctaccgagaagggtacgaggaaggctcgtctctcggggtcatggagggccgccagcatggaacgttacatggggccaaaataggttccgaaatcggctgttatcagggttttgcctttgcctggaaatgtctcctgcactcatgtacgacagagaaggacagtcggaaaatgaaagttcttgaatctcttatcggcatgattcagaagtttccatatgacgatcccacttacgataaactccacgaggatctcgataagattagaggaaagtttaaacagttctgctccttgctaaatgtgcagccagattttaaaataagtgccgaaggaagcggactgtccttttag

SEQ ID NO: 198191 - DNA, 237 bp, synthetic construct
  misc_feature 1..237: note = Description of Artificial Sequence: Synthetic coding sequence
  source 1..237: mol_type = other DNA
atggccggcagccaggacatcttcgacgccatcgtgatggccgacgaaagcagaaagatgaaggtcctagagtccctaattgggatgattcagaagtttccctacgacgaccctacatacgataagctccacgaggacctcgacaagattagaggaaaattcaaacagttctgcagcctgctcaacgttcaaccggactttaaaatcagtgccgaagggtctggattatcattttag

SEQ ID NO: 198192 - DNA, 3039 bp, synthetic construct
  misc_feature 1..3039: note = Description of Artificial Sequence: Synthetic coding sequence
  source 1..3039: mol_type = other DNA
atgatggcccagagcaacatgttcaccgtggccgacgtgctgagccaggatgagcttaggaagaagttataccagacattcaaagataggggcatcctcgatactttgaaaacacaactgcggaatcaactgatccatgagcttatgcaccccgtgctcagcggcgaactgcaaccgaggagtatttcggttgagggctccagccttctaattggtgcctccaacagtctagtggctgatcacctgcagcgatgtgggtacgaatattccctgtctgtgttttttcccgaaagcggactggcgaaggagaaagttttcactatgcaagacctcctccaactgattaaaatcaatcctacatcctccctctacaaaagcctggtgtctggatctgacaaagagaatcagaaaggcttcctgatgcattttttgaaagaactggctgagtaccatcaagcgaaggagagctgtaacatggagacccagacctcaagcacgtttaatcgggatagtctcgctgagaaacttcagctgatcgacgaccagtttgcggatgcatatcctcagcggatcaaattcgagagcttagagatcaagctcaacgagtacaagcgggagatcgaagagcagttacgggccgagatgtgccagaagctcaagttctttaaggacacggaaatcgctaaaatcaaaatggaggccaagaagaagtacgagaaagagctgaccatgttccaaaatgacttcgagaaggcctgtcaggcaaagtccgaagctcttgttctgagagagaaatctaccttagagaggattcataaacaccaagagatagagactaaagagatctacgctcagaggcaactcttgcttaaggacatggatctgcttaggggccgtgaggccgaactcaaacaaagggttgaagccttcgagcttaatcagaagctgcaagaagaaaagcacaaaagcatcactgaagccctgcgccgccaggagcagaatatcaagtcctttgaagaaacatatgatagaaagctgaagaatgagctgctgaagtaccagttggagctcaaggacgactacatcatacgaacaaatcgccttatcgaggacgaacggaaaaacaaggaaaaagcggtgcacttacaagaagagctcatagcaatcaacagcaagaaagaagaactgaaccagagcgtcaaccgggttaaggaactggaactcgaactcgagtccgtgaaggcccagtctctggccatcaccaaacagaaccatatgttgaacgagaaagtgaaggagatgtccgactattctctgttaaaggaggagaagctggaattgctggctcaaaataagctgcttaagcaacagctggaagagagccggaacgagaacctgcggctactgaataggctcgcccaacccgcacccgagctcgcagtattccagaaggaactacgcaaggctgagaaggcaattgttgtggagcatgaggagtttgagagttgtcggcaagctctgcataaacaactgcaagatgagattgaacactcggcacaactcaaagcccaaatactgggctataaagcctccgtgaaaagcctgaccacccaggtggctgatctgaaattgcagctcaaacagacacagacggcactggagaacgaggtttattgcaatcccaagcagagcgtgattgaccggagtgttaacggactcatcaacgggaacgtcgtaccatgtaatggtgaaatcagcggcgacttcctcaacaatcccttcaaacaggagaacgttctcgcacggatggtggcctcccgtatcactaactaccctactgcctgggttgaaggttcatcccccgatagtgacctcgaatttgttgctaacaccaaagccagagtcaaagaattacaacaagaagccgagcgactggagaaggccttcagatcctatcatagacgcgtgattaagaattctgccaagtcaccactcgcggctaagagccctccttctctgcatctgctagaagctttcaagaatattacatcctcttcacccgaaagacacatcttcggggaggaccgagtggtgagcgaacagccacaagtgggcactctggaggagcgaaatgatgttgtcgaggcgctaacgggttctgccgctagtaggttacgcgggggtacaagctcacggagattatcaagcacgcccctacccaaagcaaagcgcagtctggagtccgaaatgtatctggaggggcttgggaggtcacacatcgcatcaccctcaccatgcccagaccgcatgccactgccaagcccaacagagagtaggcacagcttgagtatacccccggtctcctcgccccccgaacagaaggtaggactctacaggaggcagaccgagctccaggataaatcagaattttccgatgtggacaagctcgcgtttaaagataacgaagagttcgaatcatcatttgagagtgccgggaatatgcctaggcagttggagatggggggcctctctcctgcgggcgacatgtcacacgtggatgccgcagcagcagctgtccctctgtcctaccagcacccctctgtagatcaaaagcagatagaggagcagaaggaggaagaaaaaataagggaacagcaggtgaaggagcggcgacagcgggaggagcgccggcaatcaaatcttcaggaggtgctggagcgagaaagaagagagctcgaaaagctctatcaagaacgcaagatgatcgaagagtcactcaagatcaagattaaaaaggaactcgagatggagaacgagcttgagatgagcaaccaggaaatcaaggacaagtccgcccattccgagaatcccttggaaaaatacatgaagattatccagcaggaacaggaccaagagtccgcggacaaatcaagcaaaaagatggtgcaggagggatcgttggtggacaccttacagagctcagacaaagtggagtccctcactggcttttcacatgaggaacttgacgactcttggtag

SEQ ID NO: 198193 - DNA, 2919 bp, synthetic construct
  misc_feature 1..2919: note = Description of Artificial Sequence: Synthetic coding sequence
  source 1..2919: mol_type = other DNA
atgatggcccagagcaacatgttcaccgtggccgacgtgctgagccaggatgagctgaggaagaaactgtatcagacttttaaagatcggggcatcctggacacattgaaaactcagttgcgcaatcaactgatccatgagctgatgcatcccgtgctgagcggcgaactccaaccccgaagcatcagtgtggaggggtcttccctgttaattggggcctcaaattctctggtggccgaccaccttcagaggtgcggctacgagtacagcctgtcagtcttttttccagagagtggattggccaaggaaaaggtcttcacaatgcaggatctccttcaattgatcaaaatcaatcccacctcctcactttataaaagtctggtcagtgggtctgacaaagagaaccagaagggattcctgatgcatttcctcaaagagttggcagagtatcaccaggccaaggaatcatgtaatatggagacgcagacctcatcaactttcaatcgggattcgctggctgagaagctgcagcttatcgacgatcaattcgccgacgcctaccctcaacgaatcaagtttgagtccttagaaatcaagctcaatgaatataaaagagagatagaagaacagttgcgcgcagaaatgtgtcagaaactgaaatttttcaaggacacagaaatcgccaaaataaaaatggaagcaaaaaaaaaatatgaaaaggagttgacaatgtttcaaaatgacttcgaaaaagcatgccaagcgaagtccgaggccttagtgttgagggagaaatcaacactggaaagaatccacaaacatcaagagattgagaccaaggaaatttatgcccagaggcagctactactgaaggatatggacctgctgcgaggaagagaggccgaactcaagcagcgggtggaggcttttgaactttaccaactcgagcttaaagatgattacattattcggaccaatcgcctgatagaggatgaacgcaagaataaggaaaaagccgtccatctccaggaggagttgatcgcaataaatagcaagaaggaggagctgaaccaatccgtgaatagagtaaaagaactggaactggagctcgaaagtgtgaaggctcagtcgctcgccatcactaagcaaaaccatatgctaaatgagaaggtgaaggaaatgtccgactatagtctgctcaaagaagaaaaacttgaattactggcgcaaaataaactcctaaagcagcaattggaggagagcagaaatgagaatctgaggttgctaaataggctggcccagccggcacccgaacttgccgtcttccagaaggagctaagaaaggcagagaaagccatcgtggtggagcacgaggaattcgaaagttgccggcaggcactgcacaagcagctacaggatgagatcgagcacagcgcccagttaaaagctcaaattcttggatataaagcatccgtcaaaagtctcaccacacaagttgcggacctaaagctacagctgaagcagacacagacagctctggagaatgaggtgtactgcaacccaaagcagagcgtgatcgatcggagtgtgaacggccttattaatggaaacgtagtgccatgtaatggtgagatctccggtgatttcctgaataatccctttaagcaggagaacgtgctggctcgaatggttgcgagcaggattactaattatcctacagcctgggttgagggatcctccccagactcagatctggaatttgttgcaaataccaaagcccgtgtgaaagagctgcagcaggaagcagaaagactcgaaaaagcgtttagatcctaccaccgcagggtgataaaaaattctgccaagtccccccttgctgcgaaatctcctccctccctgcacctcctagaggcatttaaaaacatcactagctcgtcacccgaacgacacattttcggagaggatcgggtggtgtccgagcaaccgcaggtgggcaccctggaggagagaaacgacgtagtcgaggcactgactggctcggctgcctcaaggctcaggggtgggacttcatcaagacggttaagctccacaccgctaccaaaggctaagagatcattagaatccgagatgtatctggaggggctcggacgttcgcatatagctagcccaagcccctgcccagatcgtatgcctctgccatctcccactgagagccgccactcactctcgatcccaccagtcagcagccccccagaacagaaggtcggtctctaccgaaggcagacggaactgcaggataaatcggagttcagtgatgtcgataaattagcttttaaagacaatgaagaatttgaatcctctttcgagtccgccggcaatatgcccagacaacttgagatgggcggtctgtctcctgcaggtgatatgagccacgtcgatgccgccgctgccgctgtgcccctctcttatcagcacccttctgtcgatcaaaagcaaatcgaggagcagaaggaggaagaaaaaatccgagaacagcaggtcaaggagagacgacagcgagaagaacggcgccagagcaatctgcaggaggtgttggagcgggagcgccgagaactcgaaaaactgtaccaggagcgaaagatgatagaagaatcattaaaaattaagattaagaaggagctcgagatggagaacgagctcgagatgtccaaccaggaaataaaagataaaagcgcccacagcgagaatccacttgaaaagtatatgaaaattattcaacaggaacaggatcaggagtctgctgataagagcagcaaaaaaatggtccaagaaggaagcctggtggacacactgcagtctagtgacaaagtggagtcacttactgggttctcacacgaggagctcgatgatagctggtag

SEQ ID NO: 198194 - DNA, 2619 bp, synthetic construct
  misc_feature 1..2619: note = Description of Artificial Sequence: Synthetic coding sequence
  source 1..2619: mol_type = other DNA
atgcacttcctgaaggagctggccgagtaccaccaggccaaggagagttgtaatatggaaactcagactagcagtactttcaacagggatagcttggcagagaaactacagctaatagacgatcaatttgcagatgcctacccccaacgcattaaattcgagtccctagagattaaattaaatgaatataaacgtgagatcgaggagcaactgcgcgccgagatgtgtcagaaactgaagttctttaaagatacggaaatagcaaagatcaagatggaggctaaaaagaaatatgagaaagaactgaccatgtttcagaatgattttgagaaggcctgccaggctaaatccgaagcccttgtgttgagagagaagtctactttggagcgtatccataagcatcaggagatcgagaccaaagaaatatatgcacaacgtcaattactgcttaaagatatggatttactgagggggagagaagctgagctcaaacaacgggtggaggcattcgagctcaatcagaagttgcaggaagagaagcataagagtattaccgaagctctgcgtcggcaagaacagaatatcaaatcattcgaagagacatacgatcggaagctcaagaatgaactgctgaaataccagttggaactcaaagacgactacatcattcgcactaacagacttatcgaggatgagaggaaaaataaagaaaaggccgtgcatctccaggaagagcttatcgcgattaattccaagaaggaggaactcaatcagtccgtgaaccgcgtcaaagagcttgagcttgagctcgagagcgtgaaggcgcagtcgctggctatcaccaaacagaatcatatgctcaatgagaaagtcaaggagatgtctgattattccctgctcaaggaggaaaaattggagctgctggcccaaaacaagttgctgaagcaacaactggaggaaagcagaaacgaaaacctacgcctgctgaataggctggcacagcctgctcccgaactggcggtgtttcagaaggagctgagaaaggccgagaaagcaatagtagtagagcacgaggagttcgaatcatgtaggcaagcgttgcacaaacaacttcaagacgagattgagcattctgcacaattaaaggcccagatactgggatacaaggcgagtgtgaagtcacttaccacacaagtggccgacctaaagctccagctgaagcaaacccaaaccgccctggaaaatgaggtctactgtaacccaaagcaatcagtgatcgaccggtcagtgaacggcctgatcaacggcaatgtggtcccttgcaatggggaaatctctggcgatttcctcaataacccctttaaacaggagaacgtgctggctaggatggttgccagccggatcaccaattatccaactgcctgggtagaggggagcagccccgactcagacttggaatttgttgcgaatactaaggcccgtgtaaaagagttgcaacaggaggcggaacggctcgagaaggcgttcagaagttaccacaggcgtgtgattaagaattctgcaaagtccccccttgctgcgaagtcacctccgtctctccatctcctggaggcttttaagaacatcacaagttccagcccagaacggcacattttcggtgaggacagagtggtgagcgagcagcctcaggtagggactctggaggaacgaaatgatgtggtggaggccttgaccggctcggccgccagcaggttgcgcggggggacctcttctcgacgcctgagctccactccactgcctaaagccaagcggtctctggagagcgagatgtacttagaagggctcggccgatctcacatcgcctccccttctccatgcccggataggatgccccttccttctccgactgaatcccggcatagtctatctataccccctgtttcttccccgcctgagcaaaaggtcggtctgtatagacgacaaactgagttgcaggacaagtccgaattcagcgacgtcgacaaactggccttcaaagacaacgaggaattcgaaagttccttcgagtccgcaggcaatatgcctcgacagctagagatgggcgggctgagcccggctggtgatatgagtcacgtcgacgctgcggcagctgcagttcccctgagctatcaacatccctctgtcgatcagaagcagattgaggagcagaaggaagaagaaaagattagggaacagcaagtgaaagaacgcaggcagagagaggaacggaggcagtcaaacctccaggaagttctcgagagagaacgccgcgaactcgagaaactctatcaagaaaggaaaatgattgaagagtccttaaaaattaagatcaagaaggagctggaaatggaaaacgagctggagatgagtaaccaagaaatcaaagacaaatcagcacattccgaaaatcctcttgaaaagtatatgaagataatccagcaggagcaagaccaggagagtgccgacaagagtagtaaaaagatggtgcaggaagggtcactcgtggataccctgcaatcttccgataaggtagaatccttaactgggttttcacacgaggagctggacgactcatggtag

SEQ ID NO: 198195 - DNA, 1104 bp, synthetic construct
  misc_feature 1..1104: note = Description of Artificial Sequence: Synthetic coding sequence
  source 1..1104: mol_type = other DNA
atgatggcccagagcaacatgttcaccgtggccgacgtgctgagccaggatgagctgcgcaagaaattgtatcagaccttcaaggacaggggaatcctagacaccctgaagacgcagctccgtaatcagctcatccacgaactgatgcacccagtcttgagcggcgaactgcaacctcgaagtatttccgtcgaaggtagctctctgttgattggcgcctccaatagtctcgtggcagatcacttgcagcggtgtggatacgagtattcactgtcggtcttcttccccgagtctggcctggctaaagagaaagtctttacaatgcaagacctcctccaattgattaaaatcaatcccacctcctcactatacaagtcccttgtctcaggctccgacaaagaaaatcagaagggatttcttatgcactttctcaaggagctagctgaatatcaccaggccaaagagagctgtaatatggaaacccagacaagttccacattcaacagagattccctggccgagaagctgcagctgattgacgaccaattcgcagacgcctacccgcagcgcatcaaatttgagagtttagagattaagttgaatgaatataaaagggaaatcgaggagcagcttcgcgcagaaatgtgtcaaaagttgaagttcttcaaggatactgagattgccaagattaagatggaagccaagaaaaaatacgaaaaggagctcactatgtttcagaacgattttgagaaagcctgccaagccaaaagtgaagccctggtgctgcgcgagaagagcacgctggagcggatccataaacatcaggaaatcgaaacaaaagagatttatgcacagcgccagttgttgctcaaggacatggatctgctccgcggccgcgaagcggagcttaagcagcgagtggaggctttcgagctgaaccagaaactgcaggaggagaagcataagagcatcaccgaagctctgcgtcggcaggagcagaatatcaaatcctttgaggaaacgtacgaccggaagttgaagaacgaattgctgaatttccatagattgcacggggtctgcttagctctgggtattcttatatag

SEQ ID NO: 198196 - DNA, 1017 bp, synthetic construct
  misc_feature 1..1017: note = Description of Artificial Sequence: Synthetic coding sequence
  source 1..1017: mol_type = other DNA
atggtgttcctgtgcatcttcaaggagctggccgagtaccaccaggccaaagaaagttgtaatatggagacgcagacctcttctacatttaaccgggacagcctggctgagaagttgcagctcattgatgaccagttcgcggatgcctatccccagcggattaagttcgagagcttagagatcaaactgaacgagtataagcgcgagatcgaggaacagctgagggcagagatgtgtcagaaactcaaattcttcaaggatacagagatcgctaagattaaaatggaagccaaaaagaagtatgagaaggaactgacaatgttccagaacgacttcgaaaaagcttgccaggctaagtccgaggctctggtgctccgggaaaagtctaccttagagagaattcacaagcaccaagaaatcgaaaccaaagagatctatgcacagaggcagctgctactgaaagatatggatctgttaagagggagggaggccgagctcaagcagcgcgtggaagcgtttgaactctatcaactagaactgaaagacgattacattatcaggactaatagactgattgaagacgagcggaagaataaagagaaagcggtgcacttacaagaagagctcatagccattaattccaagaaagaagaacttaaccaatctgtgaatagagtcaaggagctggagctggagctggagagtgttaaagctcagagtttggccattacgaagcagaatcacatgcttaacgaaaaggtcaaagagatgagtgattattcccttcttaaggaagaaaaactggagctcctggctcagaataagcttcttaaacagcaactggaagaaagccggaacgaaaaccttcgcttgctgaatcgacttgcccaaccagcacctgaattggcagtgtttcaaaaggaactccgaaaagctgagaaagccattgtggtagagcatgaggagttcgaaagctgtagacaggccctgcataaacagttacaagacgagccctag

SEQ ID NO: 198197 - DNA, 2586 bp, synthetic construct
  misc_feature 1..2586: note = Description of Artificial Sequence: Synthetic coding sequence
  source 1..2586: mol_type = other DNA
atggcccactaccccacccggctgaagacccggaagacctacagctgggtcggtcggcccctgctggacaggaagctgcactaccagacttaccgtgagatgtgtgtcaagacagagggctgctctaccgaaatacatatacaaattggacagttcgttttgatcgaaggagacgacgatgaaaatccatatgtggcaaagctgctagagctcttcgaagacgactctgatcctccgcccaagaaacgcgctcgcgtccaatggttcgtgagattctgcgaagtcccagcctgtaaaagacatctgttgggaaggaaacccggcgcacaggagattttttggtacgactaccccgcgtgtgatagtaacatcaatgcggagacaatcataggcctcgttcgggtcatcccactcgctcccaaggatgtggtgccgacaaacctgaagaatgagaagacacttttcgtgaaactctcgtggaacgagaagaagttccgaccattgtcatcagaattatttgccgagttgaacaagccccaggagtcggccgccaaatgtcagaagccagtgagagctaaaagcaagagcgccgagtcaccttcctggaccccggccgaacatgtagccaaaaggattgagtctcgtcacagtgcgagcaagtccagacaaacccctactcacccacttacccccagagcccggaaacgactcgaattggggaatctaggcaacccccaaatgtcccagcagacatcttgcgcctctctggactcccccgggaggattaaaaggaaagtggctttcagcgagatcacctcaccctccaagagaagccaacctgataagcttcagacgctttcaccagcgcttaaagctccagagaaaacacgggaaaccgggttatcttacacagaggacgacaaaaaggcctcacccgagcaccgcatcattctccggacacggatagcggcatcaaaaaccattgatatcagagaggagcgcaccctcaccccaatatccggggggcagcggtcctccgtggtccccagcgtgatcctgaaaccggagaatataaagaagagagatgccaaagaggcaaaagcccagaacgaggccacaagcactccccaccgtatcaggcgcaaaagcagcgttttaaccatgaaccgtatcaggcagcagcttaggtttctgggaaacagcaagagtgatcaggaggaaaaagagatcctgccagccgctgaaatctccgattcatcatccgatgaggaagaagctagtactccccccttacccaggcgtgctccccgcaccgttagtagaaatctgcggtcctccctaaagagctctttgcataccctgaccaaggttcccaagaagagcctgaagccgagaacaccaagatgtgccgcgccacagatccgttcacggtccctggccgcgcaggagccggcgagcgtgctcgaggaggcgcgactgcggctgcacgttagcgccgtcccagagagccttccctgcagggagcaggagtttcaggatatttacaacttcgtggagtcaaagctgttggatcacacaggcgggtgtatgtacatctctggagtcccgggaacaggaaaaacagctacagttcatgaggtgattagatgcctgcagcaggctgcccaagccaacgacgtccctcctttccagtacattgaggtaaacggaatgaagctcactgaaccccatcaggtttacgtccagatcctccagaaacttactgggcagaaagctacagcaaatcacgccgccgagctgctcgctaagcagttctgcactcgcggaagtccccaggaaacaaccgtcctgctcgtggacgagttggatttgctgtggacccacaagcaggatatcatgtataacttgtttgactggccaactcacaaagaagctcgtcttgtagtcctagctattgcaaacacaatggatctccctgagcgcattatgatgaacagggtttcgtctagactgggtttaacccggatgtgttttcagccctacacttacagtcagttgcagcaaattctccggtccagactgaagcatctcaaggcgtttgaggacgatgccatccagctggtggcgagaaaggtggctgcactcagtggtgacgcgcggcgatgtctggacatctgtcgccgagctacagagatttgtgagttcagccagcagaaacccgattcaccaggcctggtgaccatcgcccactccatggaagccgttgacgagatgttctcaagttcatatatcactgcaatcaagaactcttccgtactagagcagagcttcctgcgggctattctggccgagttcaggcgatctggcctggaagaggcaacctttcagcagatctattcccagcacgtcgctttatgccgaatggagggcctgccgtacccaaccatgtccgagaccatggcagtttgctcccatctgggtagctgccgcctcctgttggtcgagccgtcccgaaacgaccttctacttcgggtgcggctgaatgtctcccaggacgatgtcctatacgctctcaaggatgagtag

SEQ ID NO: 198198 - DNA, 2586 bp, synthetic construct
  misc_feature 1..2586: note = Description of Artificial Sequence: Synthetic coding sequence
  source 1..2586: mol_type = other DNA
atggcccactaccccacccggctgaagacccggaagacctacagctgggtcgggaggcctctcctagatcgcaaattacattatcaaacttacagagagatgtgcgtaaaaaccgaaggctgctctacggaaattcacattcagataggccagttcgttcttatcgagggcgacgatgatgaaaatccgtacgtcgccaaactgctcgaattattcgaagacgattctgaccctcctccgaaaaagcgggcaagggttcagtggtttgtgcggttctgtgaggtgcctgcatgcaagcgacacctgctggggcgcaaacctggagcccaggagatcttttggtacgactatccagcctgcgactcaaacatcaatgccgagactatcattggtctggtgcgggtgattccactggcacctaaagacgttgtccctaccaatcttaagaacgagaaaacattatttgtgaaattgtcatggaatgaaaagaaatttcggcctctctcgtccgagctcttcgccgagcttaacaagccgcaggaaagcgccgccaaatgccagaagccagtacgcgctaaatctaagtccgctgagtcgccaagctggactccagcggaacatgtggcaaagcggatcgaaagtagacattccgcctccaaatcccggcaaactcctacccacccgcttaccccccgggcacgcaaaaggctggaactcgggaacctgggtaacccccaaatgtctcagcagacgtcctgcgcctctctcgacagtcccggtcgcatcaagagaaaagtggccttctctgaaatcactagtccatctaaaaggagtcaacccgataagctgcagactttaagtccagctctcaaagcgcccgaaaaaacccgcgaaacggggctatcctatacggaggacgacaagaaagcctccccagagcaccggattatcctgcgcacccgaatagcagcttcgaaaactatagacatccgggaagaaaggacactcactcctatttctggaggccagcgcagttccgtggtcccctcagttatcttaaagccagagaacattaaaaaacgcgatgccaaggaggcaaaagcccagaacgaagcaacctccacaccccatcgcattcgccggaaatcatctgtgctgactatgaaccgcattaggcaacagctcaggtttcttggcaattcaaagagcgatcaagaagaaaaagaaatcctccctgcagccgagattagcgattcctcttccgacgaggaggaagcctcaacgccgcctctgccacgacgagccccgcggaccgtgtctcgcaatctgcgcagctctctgaagagctctctgcacacactgactaaggtaccgaaaaagagtctgaagcctcggacgccacgatgcgctgcccctcaaattaggtcacgttcattggccgctcaggaacctgcttctgtgttggaggaggccaggctcaggctgcacgtgtcagccgtcccagagtcgctgccctgcagggaacaggaattccaggacatatataatttcgttgaatctaaactactggatcacacaggcgggtgtatgtacattagtggggttcctggcacggggaagactgctacagtgcacgaagtaattcggtgcctgcagcaagccgctcaggccaacgacgtaccccccttccagtacatagaggtgaacggcatgaaactgaccgaaccccatcaggtttacgtgcagattctgcagaaactcactggacaaaaggctactgccaatcatgctgcagaactcctggctaagcagttctgcacaagggggtctccgcaggagaccactgtgttgctcgtggatgagttagatttactgtggacccacaaacaggatatcatgtacaacctgttcgattggcccacacataaagaagctcgcttggtcgttctggcaattgccaatacaatggaccttcccgagaggatcatgatgaatcgggttagcagtcgactgggcttgaccaggatgtgtttccagccatatacttatagccaactccagcagatcctccgctcacgccttaagcacctaaaggccttcgaggatgatgctattcagctggttgcccgcaaggttgccgccctttcgggcgatgctcggaggtgccttgacatctgtagacgcgcgactgaaatctgtgagttctcccagcagaaacctgatagcccaggactggtcaccatcgcacacagcatggaagctgtggatgagatgttcagttcatcttatattactgctatcaaaaatagtagtgtgctggagcagagcttcttgcgcgccattctcgccgagtttcgccgaagcggattggaagaggccacttttcagcagatctatagtcagcatgttgccctctgccggatggagggcctgccttacccaacaatgagcgagacaatggcagtgtgcagtcacctcggttcctgtcggttgcttctggtggagccaagccgcaacgatctgctgctacgcgtcaggctgaatgtttctcaggacgatgttctctatgccctgaaggatgagtag

SEQ ID NO: 198199 - DNA, 1599 bp, synthetic construct
  misc_feature 1..1599: note = Description of Artificial Sequence: Synthetic coding sequence
  source 1..1599: mol_type = other DNA
atggagaagagcaacgagaccaacggctacctggacagcgcccaggcgggccccgccgccggccctggcgcccctgggaccgccgcaggacgggcaagaaggtgcgcaggcttcctacgtcgtcaggcgctcgtgctactgaccgtgtctggtgttttggctggcgccgggctgggcgcggccttgcgcgggctgtccctgtctaggacacaggtgacttatctggcgttccctggagagatgctgcttcgtatgctcaggatgatcatcctcccattggtggtatgctccctggttagtggtgccgccagcttggacgcctcctgcctcgggcgtctggggggaattgccgtggcgtattttggactaacaacgttatcagcttctgccctcgccgtggctctggccttcatcatcaagcctggtagcggcgcgcaaacgcttcagagctccgatctggggcttgaggacagcggtcctcccccagtcccgaaggagaccgtggatagctttctggacctggcacgcaacctgttcccctcaaatctagtcgtcgcagccttcagaacatacgccactgattacaaggttgtcacacagaattcatccagtggaaacgtgacacacgagaagatccccatcggaactgaaatcgagggaatgaatatactgggtttagttctgtttgcccttgtgctcggtgtcgctctaaaaaagctgggcagcgagggagaagatctgattaggttcttcaactctttgaacgaggctactatggtcctggtaagctggattatgtggtacgtccccgtaggtattatgtttctggtggggtcgaagattgtagaaatgaaagacataatcgtgctggtcacctctcttggaaaatacatcttcgcaagcattctgggccacgtaatccacggaggcatcgtactgccgcttatctacttcgtgttcaccaggaaaaatccctttcgatttttactgggtctactcgcaccattcgcgacggcttttgcgacatgtagcagcagtgccaccctacctagtatgatgaaatgcatcgaagagaataacggagtcgacaaaaggatcagccgttttatcctgcctatcggcgcaaccgtgaacatggatggtgctgccatcttccagtgcgtggccgccgtgtttattgctcagctgaataacgtcgaacttaacgccggccagatcttcactattttggttaccgcaacagcgtcttccgtcggagcagcaggcgtgcccgccggaggagtgctgaccatagccattattctggaagccatagggctccccacccacgatctcccccttatcctggccgtcgactggatagtggaccgtacaactacagtcgtgaatgtggaaggggatgccctgggagctggaattctgcaccacctgaatcagaaagctaccaagaagggggagcaggagttagctgaagttaaagtggaggcaataccgaactgtaagtccgaagaggagaccagccccctggtgacccaccagaatcccgcaggccctgtggcaagcgcacccgagttagaaagcaaggagtctgtgctctag

SEQ ID NO: 198200 - DNA, 330 bp, synthetic construct
  misc_feature 1..330: note = Description of Artificial Sequence: Synthetic coding sequence
  source 1..330: mol_type = other DNA
atgagcaagcccgagctgaaggaggacaagatgctggaggtgcacttcgttggagacgacgatgtcctgaatcacattctcgacagggagggcggcgccaagttgaagaaggaaagagctcagttactcgttaatcctaagaaaatcattaagaaaccagagtacgatcttgaggaagacgaccaggaagtcctgaaggaccaaaattacgtggaaatcatgggtcgagacgtccaggaatcactcaaaaatggctcagcaacgggtggtggcaacaaagtatactcttttcagaacaggaaacatagtgaaaagatggctaaactctag

SEQ ID NO: 198201 - DNA, 219 bp, synthetic construct
  misc_feature 1..219: note = Description of Artificial Sequence: Synthetic coding sequence
  source 1..219: mol_type = other DNA
atgagcaagcccgagctgaaggaggacaagatgctggaggtgcacttcgtgggtgacgacgatgtactgaatcatattctggacagagagggcggcgcaaaactaaagaaggagcgtgctcaactgctggtgaatccaaagaaaatcatcaaaaaacctgaatacgatctggaggaggacgaccaggaagtgttgaaagatcagaattatgtcgagtag

SEQ ID NO: 198202 - DNA, 2139 bp, synthetic construct
  misc_feature 1..2139: note = Description of Artificial Sequence: Synthetic coding sequence
  source 1..2139: mol_type = other DNA
atggccaccagcagcatgagcaagggctgcttcgtgttcaagcccaacagtaagaaaaggaagataagcttacctattgaagattatttcaataaggggaagaatgagcctgaagactcaaaactccgtttcgagacttaccagttgatctggcaacagatgaaatcagagaacgagagactgcaggaagaactcaacaagaatctgttcgataacctcatagagttcttacagaagagccactcgggattccagaaaaacagcagggatttgggagggcagatcaagctgcgagagattcccacagccgccctggtcctgggggttaatgtgacagaccacgatttgacgtttgggtccctcaccgaggctctccagaacaacgtcacgccttacgtggtgtccctccaggctaaagactgcccagacatgaaacatttcctgcagaaactgattagtcaattgatggactgttgtgtggatatcaagagtaaagaggaagagagtgttcacgtcacccagaggaagactcactatagcatggactccctcagctcttggtatatgactgtaacccagaagaccgaccccaaaatgctgtcaaagaaacgaaccacatcctcccagtggcagtcccccccagtcgtggtcatcctgaaggatatggaaagcttcgcaacaaaggtactccaggacttcatcatcatatcctcgcagcacctgcatgaatttccattgatcctcatattcgggattgccacctcccccatcatcatccaccggctgctgccccatgccgtaagcagcctcctttgcatcgaactgtttcaatcgcttagctgtaaagagcatctcaccactgtattagacaaactacttctgactacgcaatttccattcaagattaatgagaaagtgctgcaggtcctgaccaacatctttttgtaccatgatttcagcgtccaaaatttcatcaaggggctccagctttcactactagagcatttttattcacagccgctgagcgtgctctgttgtaatctcccagaagccaagcggaggattaatttcctcagtaataaccagtgcgagaatatccggaggctcccttcgtttcgcagatacgtggaaaagcaggcttctgaaaaacaggtggccctgttaacgaatgaaagataccttaaagaagaaactcagctgctattggaaaatcttcacgtataccacatgaactattttctagtgctgcgctgccttcataaattcacctctagccttccgaagtatccactgggacgacaaatcagggagttgtactgcacctgtttggaaaagaatatctgggactctgaagaatacgcctccgttctgcagttgttgagaatgctcgcaaaggacgaacttatgaccatactggagaaatgttttaaagtctttaaatcctactgtgaaaaccatttagggagcaccgccaagcgcatagaggagtttttagctcagtttcagagtcttgacgctgaaacgaaggaggaagaggatgcctccggttcacagcccaagggcctccagaaaactgacctctatcacctgcagaaatccctgttggaaatgaaagagctaagacggagcaagaagcagactaagtttgaagttttgagggaaaacgtcgtcaacttcatagactgcttagtgcgggaatacctactcccccccgagacacagcccttgcatgaggtggtgtacttctcggccgcccacgccctccgggagcacctgaatgcagcgcctagaatcgcactgcacacggcgctgaacaacccgtactactatcttaagaacgaggccctgaaatccgaagagggatgcattcccaacatcgctccagacatctgcattgcatataagttacatttagaatgtagccgcctcataaatctggtggactggtcagaggccttcgcgacggtagtaaccgcagccgagaagatggacgccaactccgcaactagtgaagaaatgaatgagattatacacgctagatttatcagggccgtgtcggagctcgagctactcggcttcatcaaacccacaaaacagaaaactgaccatgtggcccgactgacctggggaggttgttag

SEQ ID NO: 198203 - DNA, 2136 bp, synthetic construct
  misc_feature 1..2136: note = Description of Artificial Sequence: Synthetic coding sequence
  source 1..2136: mol_type = other DNA
atggccaccagcagcatgagcaagggctgcttcgtgttcaagcccaacagcaaaaagcgaaaaattagtctacccatcgaggattatttcaacaaagggaaaaacgagcctgaggacagcaagctccgttttgaaacttaccagctcatttggcagcagatgaaaagcgaaaacgagagacttcaggaagaactgaataaaaatttgttcgacaatctgattgagtttcttcaaaaatctcacagcggattccagaaaaacagtcgggatttgggaggccagattaaactgagggagattccaactgcagccttagtgttaggcgtcaacgtgaccgaccacgatctgacatttggctccctcaccgaggctctacagaacaacgtgaccccgtacgtagtgtcactgcaggcaaaggattgcccagacatgaaacacttcttgcagaaactgatttctcagctaatggattgctgtgtcgatataaagagcaaggaggaggaatccgtacatgtcacgcaaaggaagactcactacagtatggattccttgagctcctggtacatgacagtaacgcagaagactgacccgaaaatgctctcgaaaaaaagaacgaccagctcccagtggcaaagccctcctgtcgtcgtcatcctgaaagatatggagagcttcgccaccaaggtcttacaggattttatcattatctcctcccagcacttacatgagtttcctttgatcctgatattcggaatcgcaacgtctccaataattatccataggctccttccgcatgctgtcagcagcctcctttgcatcgaactgttccagtctctcagctgcaaggaacatctcactactgtacttgacaaactgctccttacaacacagttcccctttaaaatcaacgaaaaggttctgcaagtactgaccaacatcttcttatatcatgacttcagcgtgcagaactttatcaaggggttgcagttgtctctgctggaacacttctatagtcagcccctgagcgttttgtgctgtaaccttccagaagcaaagcggcgaatcaacttcctcagcaataaccagtgcgagaacataaggcgactcccttccttcaggagatatgtcgagaaacaagccagtgagaagcaagtcgctttgttaactaatgaacgctatctcaaggaggaaacgcagctgctcctggagaatttgcatgtgtaccatatgaattattttttggttctgagatgtcttcacaagtttacttcttccctccccaaatatcccctggggcggcagatacgggagctctattgcacctgtctcgaaaagaatatatgggattccgaagagtatgccagcgtcctgcagctgcttcgtatgctggccaaagacgaactcatgactatcctggaaaagtgcttcaaggtctttaagtcctactgtgaaaatcacctggggtccacagcaaagcgaattgaagagtttttggctcagtttcaatctctagatgagacgaaggaagaggaagacgcttccggtagccaacccaagggcctgcaaaagaccgatttgtatcatctgcagaagtccttactagagatgaaggagctcagacgctccaagaaacagacaaagtttgaagtccttagggaaaacgtcgttaattttattgactgtctggtgcgtgagtatttgctgccacccgaaacacagcccctgcatgaagtggtctacttcagcgccgcacatgccctgagagaacacctcaatgcagcgccaaggattgcgctgcataccgcacttaataatccctattactacctgaagaatgaagccctgaagagcgaggaggggtgtattccgaacatcgcacctgatatttgtatcgcatataagctccatctggagtgttctcgtctgatcaatctggtagactggtcagaagcgttcgctacagtggtaacagccgccgaaaagatggatgctaatagcgcaacctcagaagaaatgaacgagattattcacgcccggtttatcagggcagtgtccgagctagagctcctcggatttatcaaacctaccaaacagaagaccgaccacgtagctcgcttgacctggggggggtgctag

SEQ ID NO: 198204 - DNA, 1335 bp, synthetic construct
  misc_feature 1..1335: note = Description of Artificial Sequence: Synthetic coding sequence
  source 1..1335: mol_type = other DNA
atgaagagcgagaacgagcggctgcaggaggagctgaacaagaacctgttcgataatctgattgagttcctgcagaaatcccattccggttttcagaagaactcacgagatcttggcggccagatcaagctgcgggaaattccaacagccgccctggtactgggcgtgaacgtgactgatcatgacctgaccttcggcagtctcaccgaagccttgcagaacaatgttaccccttacgtggtctcactccaagccaaggattgtccagacatgaaacacttcctccaaaaactgatttcccagttgatggattgttgtgtggatatcaaaagcaaggaggaagaatcggtgcatgtaacacaacgcaaaactcactattccatggattcactgtctagctggtacatgacagtgacacagaaaacagaccccaagatgctttcaaaaaagcgaacaacaagttcccagtggcagagccctcctgttgtggttatccttaaagatatggagtcgtttgcaaccaaagtgctgcaggacttcataatcatatcctcgcaacacttacatgagttcccactcattcttatctttggcatcgctacgagcccaattattatccatcggctcctgccacatgcagtgtcatcactcttgtgtatcgagctcttccaatcactgtcgtgcaaggagcacctgaccactgtcctcgataagctcctactgaccacccaatttccatttaagattaacgagaaggtgctacaagtactgacaaatattttcctctaccatgacttttctgttcaaaacttcatcaaggggctgcagcttagccttctggagcatttttactcccagccactgtcggtcttgtgctgcaacttgcccgaggccaagcggagaatcaacttcttgagtaataaccaatgcgaaaacataagaagattgccgtccttccgccgttatgtcgaaaagcaggcaagcgaaaaacaggtggccttacttacgaacgagcgctacctcaaggaggagacccagcttttacttgaaaatctccatgtgtaccatatgaactacttcctggtccttcggtgcctgcacaaattcacctccagtttgccgaagtacccgctaggtaggcagattcgagagttgtattgcacctgcctagaaaagaatatctgggattccgaggaatacgcatccgtgcttcagttattgagacttggattagcctttttggacattcaactcttcggagcccaatctgggcaggagctcctccttcctctgtcctgggaagccaacccctctcacgccgccaatctgggatag

SEQ ID NO: 198205 - DNA, 1707 bp, synthetic construct
  misc_feature 1..1707: note = Description of Artificial Sequence: Synthetic coding sequence
  source 1..1707: mol_type = other DNA
atgaagcacttcctgcagaagctgatcagccagctgatggactgctgcgtcgatatcaaaagtaaggaagaagagtcagtgcacgtgacacagcgaaaaactcattacagtatggactcactttcgtcctggtacatgactgtgacccagaaaacggatccaaaaatgttgagcaagaagaggacaaccagctcacaatggcaatcaccgcctgtcgtggtgatactgaaggacatggagtcattcgccacgaaagtactccaagatttcattatcatatcgtctcagcatctccatgaatttcccctaattctgatattcgggattgccacgtctccaattataatccatagattgctgccccatgctgtgagcagtctcctttgcatcgagctgttccaatcactctcctgcaaagagcatctgacaacggtacttgataaattactgttgaccactcagtttccttttaagatcaatgagaaagtactccaggtcctcacaaatatcttcctctaccatgacttctcagtccagaattttatcaaaggccttcagctgtcactgctggagcatttttactcacagccgcttagtgtcctgtgttgtaatctgcccgaggcaaagcgccgcattaattttttgagtaataaccagtgtgagaacatccgacggctcccctctttccgtcgctatgttgagaagcaggccagtgagaaacaggtggccctattaaccaacgaacggtacctcaaggaggaaacacagctgcttctggagaatctacacgtgtaccacatgaactattttctggttctcagatgcctccacaaatttacttcaagtctccctaagtaccctttaggccggcaaattagggagctgtactgtacatgcctggaaaaaaatatctgggacagtgaggagtatgccagcgtgctgcaacttctgaggatgctggctaaagacgaactgatgactattcttgaaaagtgttttaaagtattcaagagttattgtgagaatcacctcggctccacggctaaaagaatcgaagaattccttgcgcagttccagtcactcgatgaaactaaggaggaggaggacgcatccgggagccaaccaaagggcttacagaagactgacctataccatttgcagaagtctctgcttgagatgaaagaactccgcaggtcgaagaagcagactaaattcgaggttctaagggagaatgtggtcaattttatcgactgtcttgttcgggagtacctgttgccccccgagactcagcccctgcatgaagtcgtgtacttcagcgcagctcatgccttgcgggaacatttaaatgccgcacccaggatcgctcttcatactgccctaaataatccatattactacctcaagaacgaagccctcaaaagcgaagagggatgcataccaaatatcgccccagatatttgtattgcttacaaattgcatttggagtgtagccgcctgattaatctggtagattggagcgaggcatttgccacagtggtcactgccgctgaaaaaatggatgccaattccgctacatctgaggaaatgaatgagatcatacatgccaggttcatccgtgccgtcagtgagctggaactgctgggattcattaagcctaccaaacagaaaaccgaccacgtggctcgcctgacgtggggcggatgttag

SEQ ID NO: 198206 - DNA, 1311 bp, synthetic construct
  misc_feature 1..1311: note = Description of Artificial Sequence: Synthetic coding sequence
  source 1..1311: mol_type = other DNA
atgagcagccggaagagcaagagcaacagcctgatccacaccgagtgtctttctcaggtgcagagaatcctcagagagcgtttctgccggcagtctccacattccaatctgtttggagtacaagtccaatataagcacctatccgagcttctgaaaaggaccgcgctgcatggagaatccaattctgtgctgatcatcggacccaggggctccggcaagaccatgttaatcaaccacgcgttgaaagaactcatggaaatcgaagaagtttccgaaaatgttctgcaagttcaccttaacggcttgctgcagattaatgataagattgcgcttaaggagatcactaggcagctgaacttagaaaacgtggtgggcgacaaagtgttcgggtcgtttgccgaaaacctgagctttctgctggaggctctgaaaaaaggcgaccggacatcttcctgtccggtgatctttatactggacgagtttgacctctttgcacatcacaaaaaccaaacactcctgtacaatttgtttgatatctcccaatcagcccaaactcccatagcggtaatcggacttacctgtcggttagatatccttgagttactcgagaagagagtcaagtccagattctcacatcggcagatacaccttatgaactctttcggcttccctcaatatgtcaagatcttcaaagagcagttatctctgccagcagaatttcccgataaagtgtttgccgagaagtggaatgaaaatgtgcaatatctgtcagaggaccgttccgttcaggaagtcttgcagaaacacttcaacatttctaagaaccttaggagtcttcatatgctgttaatgctggctttaaatagagtcaccgcctcccaccccttcatgacagcggtggatctgatggaagcatcacagctctgcagcatggactccaaagcaaacatcgtccatggcctaagcgtgttggaaatttgcctgataatcgcaatgaagcacttgaacgacatctacgaggaggagcctttcaatttccagatggtctacaatgagttccagaaatttgtgcagagaaaggcccacagtgtgtataattttgagaagcccgtggtgatgaaggccttcgagcaccttcaacagctcgaattaattaagcccatggagaggaccagcgggaattcgcagcgcgagtatcagctgatgaaacttctgctggacaatacccagatcatgaatgcgctccagaagtatcctaactgccctacagacgtgaggcaatgggctacctcttccctgagctggctgtag

SEQ ID NO: 198207 - DNA, 1311 bp, synthetic construct
  misc_feature 1..1311: note = Description of Artificial Sequence: Synthetic coding sequence
  source 1..1311: mol_type = other DNA
atgagcagccggaagagcaagagcaacagcctgatccacaccgagtgtctgtcacaagtgcaaagaattctgcgtgagaggttttgccgccagtctccgcattccaatctgtttggtgtgcaggttcagtacaagcatttgtccgaactgttgaagagaactgctctgcacggtgagtcaaattcggtactgataatcggaccacgcggctcaggaaagactatgctcataaaccatgcattgaaggaactcatggagatcgaggaggtttccgagaatgtcctacaggtgcacttgaatggactgttgcagattaacgacaagatcgcactcaaggagatcaccaggcaactgaatctggaaaatgtggtgggagataaagtgtttgggtcattcgcggagaacctcagtttcttgttggaggcactgaaaaagggagatagaacatccagctgccctgtaatattcattctcgacgagttcgacctcttcgcccaccacaaaaaccaaaccctgctgtataatctgtttgacatctcacagtctgcccaaacccctatcgccgtgataggccttacgtgcaggcttgatatacttgagctgctggaaaagcgggtgaagtccaggttctcccacagacaaattcatctgatgaattccttcggtttccctcagtacgtgaaaattttcaaagagcaactgtccttaccagcagagttccctgataaggtattcgctgagaagtggaatgagaatgtacagtacttgagcgaggatcgtagcgtgcaagaggtcctgcagaagcacttcaatatctccaagaacctacgcagtttgcatatgctgctgatgctagcgcttaaccgggtgacagccagtcatcccttcatgactgcggtcgatctaatggaagcctcgcagttatgctccatggacagcaaagcgaacatcgtgcacgggctgtccgtcctggaaatctgtctgatcattgctatgaagcatctgaacgatatatatgaggaggaaccattcaacttccagatggtatataatgaattccagaaattcgtgcaaaggaaggctcatagcgtgtacaattttgaaaaaccggtggtaatgaaagctttcgagcacctacagcagctggagctcatcaagccaatggagagaacaagcgggaatagtcagagggagtatcagctgatgaagctgttattggacaacacccagattatgaacgctctgcaaaaatacccgaactgtccaaccgacgtccgacagtgggccacaagtagcctcagctggctatag

SEQ ID NO: 198208 - DNA, 1311 bp, synthetic construct
  misc_feature 1..1311: note = Description of Artificial Sequence: Synthetic coding sequence
  source 1..1311: mol_type = other DNA
atgagcagccggaagagcaagagcaacagcctgatccacaccgagtgcctgtcccaggtgcagcggatcctacgggagaggttttgtcgacagtctccccacagcaatctctttggagtgcaggttcagtataaacatctatccgagctgctcaagagaacagccctgcacggagaatccaatagcgtactcattatcggcccaaggggaagtggcaaaaccatgctaatcaaccatgccctgaaagagctgatggaaattgaagaggtctccgaaaacgtgctacaagtgcatctgaacgggctgctccagataaacgacaagattgcccttaaggagatcacacgtcaactcaacctggaaaacgttgtcggagataaggtgtttgggagtttcgccgagaatctctcgttcctattagaggcactgaaaaagggagatcgcactagctcttgcccagtcatttttatccttgatgaattcgatctgttcgcacaccacaagaatcagaccctactatacaacttatttgatattagccagagcgcgcaaacccctattgcggtgattgggttgacctgtagactggatattctagaactgcttgaaaaaagagtaaaatccaggttttcacacagacaaattcacctgatgaactcgttcggattccctcagtacgtgaagatattcaaggaacaactctccctccccgccgagttccctgataaggtgtttgccgaaaaatggaacgagaacgtccagtaccttagtgaagatcgctcagtgcaggaggtcttacagaaacatttcaatatcagtaagaatttacgtagcctgcacatgctcctcatgcttgccttgaaccgtgtcaccgcctcacatcctttcatgaccgccgtcgatctaatggaagcctcacagttatgcagtatggactcaaaggccaatatagtgcatggactgtcagtgctcgagatatgcctgatcatcgctatgaagcatctgaatgatatttatgaggaggagccatttaacttccagatggtctataatgaatttcagaagtttgtgcagaggaaagcccacagtgtatacaattttgaaaagcctgtggttatgaaggcatttgagcatctgcagcagctcgaactgatcaagccaatggagagaactagcgggaactctcaaagggagtaccagctgatgaaactgctgctggataacacacaaattatgaatgcactacagaagtacccaaactgccctaccgatgtaagacaatgggcaacaagctccctgtcatggctctag

SEQ ID NO: 198209 - DNA, 438 bp, synthetic construct
  misc_feature 1..438: note = Description of Artificial Sequence: Synthetic coding sequence
  source 1..438: mol_type = other DNA
atgagcagccggaagagcaagagcaacagcctgatccacaccgagtgtctctcgcaggtacagcgtatccttagggagagattttgccgacaatcccctcattccaatctgttcggggttcaagtgcaatacaagcacctctccgagctgctcaagcgaacagcactccacggcgaaagcaacagtgtgcttattattggaccccgaggtagtgggaagactatgcttatcaatcatgccctcaaagaactcatggagatagaagaggtcagcgagaatgtgctgcaggtgcatctgaacggactgttgcaaatcaacgacaagatcgcactaaaggagattactcgccagttgaatttagagaacgtggtgggcgacaaagttttcggctcgtttgcggagaatctctcttttttgctggaggcactaaaaaagtag

SEQ ID NO: 198210 - DNA, 384 bp, synthetic construct
  misc_feature 1..384: note = Description of Artificial Sequence: Synthetic coding sequence
  source 1..384: mol_type = other DNA
atgagcagccggaagagcaagagcaacagcctgatccacaccgagtgcctctctcaggttcaacgaatcctgcgcgagagattctgtcgtcagtctccccacagtaatctgtttggtgtgcaggtgcagtacaaacacctaagcgagttgctcaaaagaaccgccctccatggtgaaagcaacagcgtgttgatcattggccctcgaggaagcggaaagactatgcttataaaccacgccctgaaggaattgatggaaattgaggaggtgtcagagaacgtgctgcaggtgcaccttaacgggttgcttcaaattaacgataagatcgctctcaaggaaataactcgccagctgaatctggaaaacgtagttggcgataagtag

SEQ ID NO: 198211 - DNA, 387 bp, synthetic construct
  misc_feature 1..387: note = Description of Artificial Sequence: Synthetic coding sequence
  source 1..387: mol_type = other DNA
atgagcagccggaagagcaagagcaacagcctgatccacaccgagtgcctgagtcaggtgcagcgaatcttgagagagaggttttgcaggcagtcccctcatagtaacctgtttggagtgcaggtacagtacaagcacctctctgagctgctgaagcgcactgctttacacggggagagcaattcagtgcttattatcggtccacgcggttccgggaagaccatgctcattaatcatgctctgaaggagctaatggagattgaggaagtgagcgagaacgtgctgcaggtccatttgaacggactgctgcagattaacgataagatcgctctcaaggagatcaccagacagctgaacctcgaaaatgtcgtaggggacaaagtttag

SEQ ID NO: 198212 - DNA, 1311 bp, synthetic construct
  misc_feature 1..1311: note = Description of Artificial Sequence: Synthetic coding sequence
  source 1..1311: mol_type = other DNA
atgagcagccggaagagcaagagcaacagcctgatccacaccgagtgcctcagccaggttcagagaattctgagggagcgtttttgtagacagagtccacacagcaatctattcggggtccaggtgcagtacaagcatctgagtgaactgctgaaaagaaccgcattgcatggcgagtcgaatagtgtcctcattatagggcctcgggggtcaggcaagacaatgctgatcaaccacgccttgaaggagctcatggagatagaagaagtctccgagaacgttttacaggtgcatctaaatgggttgctgcagattaacgacaagatcgcgctgaaggagatcacccgtcagctgaatcttgagaatgtggtgggggataaggttttcggatcattcgccgagaatttatctttcttattggaagccttgaagaagggagaccgcactagcagctgtcctgttattttcatcctcgatgaatttgacctctttgcacaccataaaaatcagacattactctataacttgttcgacatttctcagtcagctcaaaccccaatcgcagtgataggcttgacttgccgcttagatattctggagctgctagagaaacgggttaaatctaggttttcccatagacaaatacaccttatgaactcctttggcttcccccagtacgtcaagatattcaaagagcagctgagtctgcctgctgagttcccggacaaagttttcgctgaaaaatggaatgagaacgtacagtacctttcagaagatcggagcgtccaggaggtgttacagaaacacttcaatatctcaaaaaacctgagatccctgcatatgctcctcatgctggctcttaacagagtgaccgcttcacatcccttcatgaccgccgttgacttgatggaggcgtcacagttgtgctctatggatagcaaggctaatattgtccatggcttatctgtcctagaaatctgtctcattattgctatgaagcacctcaacgacatctacgaggaggaaccctttaacttccagatggtctataacgagtttcagaagttcgtgcaacggaaggcacactcagtgtataatttcgaaaagcccgtagtgatgaaggcttttgagcatctgcagcaactggagctgataaagcccatggagaggacttccggaaatagccagcgagagtaccagttgatgaagctattgttagacaatacccagattatgaatgctctccagaaatatcctaactgtcccacagatgtgaggcagtgggctacgtccagtctgtcgtggctgtag

SEQ ID NO: 198213 - DNA, 1059 bp, synthetic construct
  misc_feature 1..1059: note = Description of Artificial Sequence: Synthetic coding sequence
  source 1..1059: mol_type = other DNA
atggagatcgaggaggtgagcgagaacgtgctgcaggtgcacctgaacggcctgctgcagatcaacgataagatcgcactgaaagagatcacccgacagctgaacctcgagaatgttgtcggggataaagtatttggctcctttgccgagaacctgtcctttctgctggaggccttgaaaaaaggggatcggacctcctcatgtcccgtcatttttatcctggacgaattcgacctgtttgcccaccacaagaatcagaccctgctgtataacctatttgatatttctcagagtgcacagaccccaattgctgtaataggcctgacctgtcgcctggatatcctggaattgctggagaagagggtcaagtctaggtttagccatcgtcagatccacctgatgaattcatttgggttcccccaatacgtgaagatatttaaggagcagctgtcccttccagctgagttccccgataaggtatttgcggaaaaatggaacgaaaatgtccagtacctctcagaggaccggagcgtccaagaagtgctacagaagcatttcaacatcagtaagaatctccggagtttgcacatgctgctgatgttggccttgaaccgggtaaccgcctcccacccttttatgactgcagtcgatctgatggaggctagccagctgtgctccatggactccaaggcaaacatagtccatggtctgagtgttctcgagatctgtctgattatcgccatgaaacatttgaatgacatctacgaagaagagccatttaacttccagatggtttacaacgagttccagaaattcgtccagcggaaagcccatagcgtttacaactttgagaagcctgtggtcatgaaggccttcgagcacctccagcagctggaacttatcaagcccatggagaggacgtcagggaattcacagcgtgaataccaattaatgaaattactgctggacaatacccagatcatgaacgcacttcaaaagtacccaaattgccccaccgatgtccgccagtgggcgacgagttcactttcctggctctag

SEQ ID NO: 198214 - DNA, 1089 bp, synthetic construct
  misc_feature 1..1089: note = Description of Artificial Sequence: Synthetic coding sequence
  source 1..1089: mol_type = other DNA
atgctgatcaaccacgccctgaaggagctgatggagatcgaggaggtctccgagaatgtccttcaggtgcacctcaatggcctcctccaaatcaacgacaaaatcgcccttaaagagatcacacggcaactgaacttagagaacgtggtgggtgataaggtattcggttcctttgctgagaacctgagcttcctcctcgaagctctgaagaagggagacagaactagtagctgtccagttatctttatcttagatgaatttgacctatttgcccatcataagaatcagactctgctttataacctttttgacatctcccaaagtgcacaaacgcctatcgcagttatcggcctgacatgccggctggacattctcgaactgctggagaagagggtgaaaagcagattttcccatcgccagatccatctgatgaactcttttggattcccacagtacgtaaaaatctttaaggagcagttgtctttgccagccgagtttcctgacaaagttttcgccgaaaaatggaatgagaacgtgcaatacctgtccgaggatcggagcgttcaggaagtcttgcagaagcactttaacattagtaagaatttgcgctccttgcacatgctgctcatgctggctctgaatagggtcacagcatctcacccctttatgacggcagtcgacctaatggaagcgagccagttgtgctccatggactcgaaagccaacatcgtacacggactgtctgttctggagatctgcctgattatcgcgatgaaacacttgaacgacatctatgaagaggagcccttcaatttccaaatggtatataacgaatttcaaaagtttgtgcagagaaaggcacactccgtgtataacttcgaaaagccggtagttatgaaagcttttgaacacttacagcaactcgagctcatcaagcctatggaacgaacgtctggcaattcacagagggaatatcagctgatgaaactactgctagataatactcagatcatgaacgcgttgcagaaataccctaattgtcctactgacgtacgacagtgggcaacctcaagcttgagctggctgtag

SEQ ID NO: 198215 - DNA, 660 bp, synthetic construct
  misc_feature 1..660: note = Description of Artificial Sequence: Synthetic coding sequence
  source 1..660: mol_type = other DNA
atgaacagcttcggcttcccccagtacgtgaagatcttcaaggagcaactctccctgccagctgagtttccagataaggtctttgccgaaaaatggaacgaaaacgtgcagtatctgagtgaggacaggtccgtgcaggaagtattacagaagcacttcaacatcagtaagaacttacggagtctgcacatgctcttgatgctggccctgaacagggtcaccgcctcccacccattcatgacagccgtggacctcatggaggcatcccagctgtgtagtatggatagtaaggccaatatcgtgcacggcctcagcgtcctagaaatatgcttgataattgctatgaagcatctaaatgacatttacgaggaggaaccatttaattttcaaatggtgtacaatgagtttcagaaatttgtgcaacggaaggctcactccgtgtacaactttgagaaacctgtggtgatgaaagcgttcgagcacctccagcagctggagctgatcaaacccatggagcgaacttctgggaactctcagagggaataccagttaatgaagcttctgttggataatacccagattatgaatgccctgcagaagtatccgaattgtcccactgacgtgcgacagtgggcaaccagctctcttagctggctctag

SEQ ID NO: 198216 - DNA, 1308 bp, synthetic construct
  misc_feature 1..1308: note = Description of Artificial Sequence: Synthetic coding sequence
  source 1..1308: mol_type = other DNA
atgccccacctggagaacgtggtgctgtgccgggagagccaggtgtctatcctgcaatcactgttcggggagcggcatcatttttctttcccctccatttttatttacggccatacagcgagtggtaagacgtacgttacccagactcttctgaagacattagagctgccccacgtctttgtgaactgcgtggaatgcttcacgcttcgcctcctacttgaacagattttaaacaaactgaatcacctgagcagctccgaggacggctgcagtacagagatcacctgcgagactttcaacgacttcgtacggctatttaagcaggtaacaaccgcagaaaatctaaaagaccaaactgtgtacattgttttagacaaagcagaatacctgcgggacatggaggccaatctcttgcctggctttctgcgcctgcaggagctcgcagatagaaacgtaacagtgctgtttctgagtgagatcgtctgggagaaatttcggcctaacacaggatgcttcgaacccttcgtgttgtattttcccgactatagcattggcaatctgcaaaaaattctcagccacgaccacccccccgagtacagcgcagacttttatgcagcatatattaatattttgctcggggtgttttatacagtatgcagggatttgaaggagctccgacatctcgccgtcctgaatttcccaaagtactgtgagcccgtggttaaaggcgaggcctccgaaagagatacccgcaagctgtggaggaacatcgagcctcacctgaagaaggccatgcaaaccgtgtacttgagagaaatctcgagttcccagtgggagaaactccaaaaggacgatacagatccaggtcaactgaagggactctcagcccacacccacgttgagctgccctattactctaaatttatcctgatcgcagcttatctggcatcgtacaacccagccaggaccgataaacggttcttcctcaagcaccacggcaagatcaaaaaaactaactttctgaagaaacatgagaaaactagcaaccatctgctcggccccaagcctttcccgttggatagattgctcgcaatcctatacagtatagtggatagccgtgtagctcctactgctaacatttttagtcagataacttccttggtaaccctgcagctcctgacactggtgggccacgatgatcagctcgatggacccaaatacaaatgtacagtgtcgctggattttattcgagctattgctcgtactgtgaatttcgacataatcaagtatctgtatgactttctgtag

SEQ ID NO: 198217 - DNA, 975 bp, synthetic construct
  misc_feature 1..975: note = Description of Artificial Sequence: Synthetic coding sequence
  source 1..975: mol_type = other DNA
atgccccacctggagaacgtggtgctgtgccgggagagccaggtgtccatactacagagtctgtttggagagaggcatcacttctcgttcccaagtattttcatatacggccatacagcgtctggaaagacctacgtgacgcaaaccctgctgaaaaccctcgagctcccacacgtgtttgtgaactgtgtggaatgttttaccctgcgcttactcttagagcagatcctgaacaagttgaatcatctgtccagttccgaggacggttgcagtactgagatcacttgtgagacctttaatgacttcgttaggctatttaagcaggtgacaactgctgaaaacttgaaggaccagaccgtatacatagtcctggacaaagccgagtatttacgcgacatggaggccaacctgttacccggatttcttcggctgcaagaactcgctgacagaaacgttacggtgctctttttgtcagagattgtgtgggaaaagttccggcctaatactggctgtttcgagcctttcgtgctgtacttccctgactattctattggcaatctgcaaaaaattcttagccacgatcatcctccagaatacagcgcggacttctacgctgcttatatcaatatcctgctaggggtgttttacactgtctgccgcgacctaaaagaactgagacacctggccgtcttaaacttcccaaaatattgcgagccggttgttaaaggcgaagccagtgaacgcgacacacggaaactgtggaggaatattgaaccacatcttaagaaggctatgcaaaccgtctacttacgggagatatcttcctcgcagtgggagaaattgcagaaggatgacacagaccctggccaacttaaaggcattcgcgggtctatagagaccgtgactggagacacctctagcgcaaactaccaggatacaaaggtgaacacaaaggagcattccgtgcgtaagtag

SEQ ID NO: 198218 - DNA, 912 bp, synthetic construct
  misc_feature 1..912: note = Description of Artificial Sequence: Synthetic coding sequence
  source 1..912: mol_type = other DNA
atggaggccaacctgctgcccggcttcctgcggctgcaggagctggcagaccgcaacgtgacagttctgttcctgagtgaaatcgtgtgggagaagttccggcctaataccggttgtttcgagcccttcgttttgtattttcctgactactccatcggcaacctgcagaaaatactgagccatgatcatccgcctgaatactcagcagatttctacgccgcctacattaacatcctactgggcgtgttctacacggtgtgccgggacctgaaggagctgaggcatctcgccgttttgaatttccccaagtactgcgagcccgtagtgaagggtgaagcatcggaacgagacacacgcaagctttggagaaatatagagccccatctgaagaaagccatgcaaactgtgtacttaagagaaatttctagctcacagtgggagaagctgcagaaagacgacacagaccccggacaactgaagggcctgtccgcccacacccatgtcgaactaccatattattctaaatttatacttattgccgcctatttggcctcatacaaccccgcccggacggataagcggtttttcctaaagcaccacggaaagattaagaagaccaattttttaaaaaagcatgaaaaaacctccaaccaccttctaggccccaaacctttccccttagatagactcctggctattctttattctatagtggattctcgggtcgctcccacagcaaacatattctcccagatcacttcattggtcaccctgcagttattgactctggttggacacgatgatcagttggacggaccaaagtataagtgcacggtgtccttagactttatcagggccatcgcccgaacggtgaacttcgatattatcaagtacctgtacgactttttgtag

SEQ ID NO: 198219 - DNA, 1665 bp, synthetic construct
  misc_feature 1..1665: note = Description of Artificial Sequence: Synthetic coding sequence
  source 1..1665: mol_type = other DNA
atgagcgccgacggcggcggcatccaggacacccaggacaaggagacccctcccgaggttccagacagggggcacccccaccaggagatgcccagcaaactcggggaggctgttccctctggcgatacacaagagtcactccatatcaagatggagcctgaggaacctcattcagaaggagcttcacaggaagatggggcgcagggagcatggggctgggctccactgagtcatggaagtaaggagaaggctctctttctcccaggtggcgcactgccatcccccaggattccagttctgtctcgcgagggaaggactcgcgaccgccagatggcggccgccctcctgacggcttggtcccagatgcccgttacattcgaggacgttgcactgtatctctctagggaggaatggggcagactggaccatacgcaacagaatttctatagggatgtccttcagaaaaaaaacggcctgtctcttggctttcctttcagcagacctttttgggcacctcaggcacacggcaagggggaggcctctggatcctctaggcaagccggtgatgagaaggagtggcggggtgcatgtaccggcgctgtagaagtcgggcagcgagtgcagaccagctccgttgccgccctcggcaatgttaaaccatttaggacgcgggccggccgagtacagtggggggtgccccaatgcgcccaggaggccgcttgcggccgcagctcagggccagccaaggatagcggacagcccgccgaacctgaccgcaccccagacgcagctcccccagacccctcccctactgagccccaggaatacagagtgccagagaagcccaatgaagaggagaaaggggctcccgagtccggcgaagagggcctggctccagatagcgaggtcgggagaaaaagctatcgctgcgagcagtgtggaaagggcttcagctggcactctcacctcgtgacccaccgtaggacccatacaggtgaaaaaccctatgcctgcactgattgcgggaaacggttcgggcggagttcccaccttattcagcatcagatcatccatacaggggagaaaccctatacttgtcctgcatgcaggaagtcattcagccatcactctaccctcatacagcaccaaagaatccacacaggggagaagccatacgtgtgcgaccggtgtgctaagcgctttactcgacgttccgatctggttacccaccaggggacccataccggcgccaaaccacataaatgccctatctgtgcaaaatgctttactcaaagttccgctcttgtgactcaccagagaacacacactggggtgaagccttacccgtgccctgagtgtggcaaatgcttctctcagcggtccaatctgattgcacacaatagaacccacacaggagagaaaccctaccactgcctcgactgcggcaaatcattctcccatagctcacacttgactgcccaccagcgcacgcacaggggcgtgcggccctatgcctgccctctttgtgggaaaagcttttcacggcggtccaatctgcaccgccacgagaagattcacaccaccgggcccaaagcgctcgccatgctgatgcttggagctgccgcagcaggtgctctcgctactcctcccccagcgccgacatag

SEQ ID NO: 198220 - DNA, 462 bp, synthetic construct
  misc_feature 1..462: note = Description of Artificial Sequence: Synthetic coding sequence
  source 1..462: mol_type = other DNA
atgaacgtgggcgtggcccacagcgaggtgaaccccaacacccgggtgatgaattcacgcggcatgtggctaacatatgcccttggcgtcgggctcctccacatcgtgttattaagcattccgttttttagcgttccggtggcttggaccttaacgaatatcatccacaaccttgggatgtacgtgttcctgcatgccgtgaagggaactcccttcgagacgccggaccaggggaaggcgcgactcctgacccattgggaacaactcgactatggcgtgcagtttacttcttcccgtaagttctttaccatcagccctatcatattgtatttcctggctagtttctacactaaatatgaccctacacactttatactgaatacagcaagtctactgtctgtgcttatcccgaaaatgcctcagttgcacggagtcaggatctttggaattaacaaatattag

SEQ ID NO: 198221 - DNA, 462 bp, synthetic construct
  misc_feature 1..462: note = Description of Artificial Sequence: Synthetic coding sequence
  source 1..462: mol_type = other DNA
atgaacgtgggcgtggcccacagcgaggtgaaccccaacacccgggtgatgaacagtcgcgggatgtggctgacctacgctctgggtgttggcctcctgcacatcgtgcttctatccatcccattcttcagcgtgcctgtcgcgtggactctgaccaatattatccataacttgggaatgtacgttttcctacacgccgtgaaaggcacacctttcgaaacacccgatcaggggaaggctcgtcttctgacacactgggaacagctagactatggtgttcagtttacatccagtaggaaattcttcactattagccctatcatcctgtatttcctggccagcttttacacaaaatacgaccccacgcatttcatacttaacaccgccagtctgctgagcgttctgattcccaaaatgcctcagctgcacggggtccgcatatttggcatcaataaatactag

SEQ ID NO: 198222 - DNA, 462 bp, synthetic construct
  misc_feature 1..462: note = Description of Artificial Sequence: Synthetic coding sequence
  source 1..462: mol_type = other DNA
atgaacgtgggcgtggcccacagcgaggtgaaccccaacacccgggtgatgaatagccggggcatgtggcttacctacgccctgggggtaggactccttcacattgttctactttcgattccattcttttcggtgcctgtggcttggaccctcaccaatatcattcacaatcttggcatgtacgtttttctccacgcagttaaaggcaccccctttgaaacaccagaccagggcaaggctagacttctcacacactgggagcagctggactatggtgtgcagtttacttcaagtcgcaaattttttactatcagcccgataatactgtacttcctggcgtccttctacacaaaatatgacccaacgcacttcatcctcaacaccgcctctctcctgtctgttctgatcccaaaaatgccgcagcttcacggcgttaggatctttggcatcaacaagtactag

SEQ ID NO: 198223 - DNA, 330 bp, synthetic construct
  misc_feature 1..330: note = Description of Artificial Sequence: Synthetic coding sequence
  source 1..330: mol_type = other DNA
atgaacgtgggcgtggcccacagcgaggtgaaccccaacacccgggtcatgaattcacggggcatgtggctgacatacgcattgggggtcgggctgttgcacattgttctcctgagtataccctttttctccgtgcccgtggcatggaccctgacaaatattatacacaatcttggcatgtacgtctttctgcatgcggtgaaggggacgcccttcgagacccctgatcagggtaaagcgcgcctgctgacacattgggaacagctggactacggagtgcaattcacttctagtcggaagttcttcaccatttctcccatcattctgtag

SEQ ID NO: 198224 - DNA, 330 bp, synthetic construct
  misc_feature 1..330: note = Description of Artificial Sequence: Synthetic coding sequence
  source 1..330: mol_type = other DNA
atgaacgtgggcgtggcccacagcgaggtgaaccccaacacccgggtgatgaatagtcgaggaatgtggctcacttacgctctgggagtgggccttctgcatattgtgctgctaagcatacccttctttagcgtacctgtagcctggaccctgacaaacataatccacaacctgggtatgtacgtgttcctgcacgcagtgaaagggactccctttgagacgccagaccagggaaaggcaaggcttttgactcactgggagcagcttgactatggtgttcagtttacatcttctcgtaaattcttcactatttctcccattatcctgtag

SEQ ID NO: 198225 - DNA, 462 bp, synthetic construct
  misc_feature 1..462: note = Description of Artificial Sequence: Synthetic coding sequence
  source 1..462: mol_type = other DNA
atgaacgtgggcgtggcccacagcgaggtgaaccccaacacccgggtgatgaattcccggggcatttggctcgcatatataattctcgtgggcttactacatatggtcttgctgagtattccattcttttccattcctgttgtttggaccctcactaatgtgatccacaatttagcaacttacgtcttcctgcacacggttaagggcacgccattcgagaccccggatcaggggaaggcacgactgctgacccactgggagcagatggactacggactgcagtttacaagttcccggaaattcctgtctataagtcccatcgtgctgtatctgctggctagcttttacacaaaatatgacgctgcgcatttcctgattaataccgcttccctgctctctgtgctgctgcccaagttgccccagttccacggcgtccgcgtctttgggatcaataaatattag

SEQ ID NO: 198226 - DNA, 462 bp, synthetic construct
  misc_feature 1..462: note = Description of Artificial Sequence: Synthetic coding sequence
  source 1..462: mol_type = other DNA
atgaacgtgggcgtggcccacagcgaggtgaaccccaacacccgggttatgaactctcgcggaatctggctggcctatattattctcgtgggactgcttcacatggttttgcttagtattccgttcttctctattcccgtagtgtggacccttaccaatgtgatccataacttggcaacgtatgtgttcctgcacaccgtgaaggggacgccgtttgagacccctgatcagggaaaagcccgactattgacacattgggaacagatggactacggattgcagttcacttctagccgcaagtttctgtcaataagccctattgttctgtatttgctagcctcgttttatacaaagtacgatgccgcccattttctgattaacaccgcaagcctgctgtctgtcctgttgccgaagcttccccaatttcacggggttagggtctttgggataaacaagtattag

SEQ ID NO: 198227 - DNA, 462 bp, synthetic construct
  misc_feature 1..462: note = Description of Artificial Sequence: Synthetic coding sequence
  source 1..462: mol_type = other DNA
atgaacgtgggcaccgcccacagcgaggtgaaccccaacacccgggttatgaactcaagggggatctggctgagttatgtactggctattggcctattgcatatcgtgctgttatccatacccttcgtgtctgtgccggttgtgtggacattaacgaatctgattcataatatgggcatgtacatatttttgcacaccgtgaaaggtacgcctttcgagacacctgatcagggtaaggccagactcctaactcattgggagcagatggactacggagtgcagtttactgcctctaggaagttcctgacaatcacacccatcgtcttgtattttctgacaagcttctacactaaatatgatcaaatccacttcgtgttgaataccgtctccctgatgtcagttttgatcccgaagcttcctcagctgcatggcgtccgcatctttgggatcaacaagtactag

SEQ ID NO: 198228 - DNA, 462 bp, synthetic construct
  misc_feature 1..462: note = Description of Artificial Sequence: Synthetic coding sequence
  source 1..462: mol_type = other DNA
atgaacgtgggcaccgcccacagcgaggtgaaccccaacacccgggtgatgaatagtagaggaatctggctctcctacgttctggctataggcctgctgcacattgtgctcctgtcaatccccttcgtgtcagtgcctgtggtctggacactgacgaaccttattcataacatgggtatgtatatttttctgcacacagtcaaaggtacccctttcgaaacccccgaccaggggaaggccaggctactgacccactgggagcagatggattatggggtccagtttaccgcctcacgcaaatttctgacgataacacctattgtgttatactttttgacgagtttttacacaaaatacgaccagattcattttgtgctaaataccgtgtctctgatgagcgttcttatccctaagttacctcagctgcatggcgtgcgtatcttcggtatcaataagtactag

SEQ ID NO: 198229 - DNA, 1320 bp, synthetic construct
  misc_feature 1..1320: note = Description of Artificial Sequence: Synthetic coding sequence
  source 1..1320: mol_type = other DNA
atgttcagcaagctggcccacctgcagcggttcgccgtgctgagccgcggggtgcattcttccgtggcttcagcgacgagcgttgccaccaagaaaacagtgcaaggaccaccgacatctgacgatatttttgagagagaatataaatacggcgcccacaattatcaccccctacccgtcgcactagagcgcggcaaaggcatctatctatgggacgtcgagggacggaagtacttcgactttctgtccagttactcagccgtcaaccagggacattgtcaccccaaaatcgtaaatgcgctgaaaagtcaggtggacaagctcacactgactagccgtgctttctacaacaatgtgcttggcgagtatgaagaatatattacaaaattgtttaactaccacaaggtcctgcccatgaacaccggtgtggaagccggggagacagcctgtaagctggcgaggaagtggggatacacagtcaaggggattcagaagtacaaagcaaagatcgtatttgcagctggtaacttctggggacgaacactgagcgccatcagcagctctaccgatcccacctcttatgacggatttggtcccttcatgccgggcttcgacattattccatataacgacttaccagctctggaacgcgcactgcaggacccaaacgtggcagcgtttatggtggagccgatacaaggcgaagccggtgtggtagtccccgatcccggataccttatgggcgtaagagagctatgtacgaggcaccaagtgttgttcatcgcagacgaaattcagaccgggctggcccgtaccggccgctggttggccgtcgattatgaaaacgttcggcccgacattgtccttctgggaaaagccttaagcggcgggttatatcccgtctctgcagtactgtgcgacgacgatattatgcttacaatcaagcctggggagcacggctctacatacggcggcaacccactgggatgtcgggtcgctattgcagctctggaagttctggaagaggagaacctggccgaaaatgccgataaattgggtattatccttcgcaatgaattgatgaagctacccagcgatgttgtgactgcagtgcgcgggaaaggtcttttgaacgcgatagtgataaaggaaacaaaggattgggacgcctggaaagtgtgccttaggctaagggacaatggcctgctggccaaacccacccatggcgatatcatacgcttcgcaccacccctggtcattaaggaggacgaactccgggagtccatcgagatcatcaacaaaacaattctctcattctag

SEQ ID NO: 198230 - DNA, 906 bp, synthetic construct
  misc_feature 1..906: note = Description of Artificial Sequence: Synthetic coding sequence
  source 1..906: mol_type = other DNA
atgaacaccggcgtggaggccggcgagaccgcctgcaagctggcccgtaagtggggttacaccgtgaaaggaattcaaaagtacaaagctaagattgtatttgcagctgggaatttctggggcaggacgctatctgctatttccagcagtacagaccctactagttatgatgggttcggcccgtttatgcctggattcgacatcataccttataacgacctgccagctctcgaacgcgctctgcaggatcctaatgtggctgccttcatggtggagccgatacagggcgaggctggagtggttgttcccgaccctggttacctcatgggagtccgcgagctgtgcaccagacaccaggtgctgttcatcgcagacgaaatccagacaggactcgcccgcacaggccgatggctggccgtggactatgagaatgttaggcccgatattgtcttactgggtaaagcactgtccggtgggctgtatccagtctctgccgttctgtgcgatgacgatatcatgctcacaatcaaacccggcgagcatgggtcaacatacggcgggaacccactggggtgcagggtcgcaatcgcagctcttgaagttttagaggaggaaaatctggccgagaatgctgataaactagggatcattctccgcaacgagctaatgaagctgccaagtgatgtggtaactgccgtgcgtggaaagggattactcaacgccatcgtcattaaagaaacaaaggactgggacgcttggaaagtttgcttgagactgagagacaacgggttacttgccaagcctacacatggggatataatccgattcgccccacccctggttatcaaagaagatgaactccgagaatctattgagatcattaataagactatcctgtctttctag

SEQ ID NO: 198231 - DNA, 405 bp, synthetic construct
  misc_feature 1..405: note = Description of Artificial Sequence: Synthetic coding sequence
  source 1..405: mol_type = other DNA
atgaaggccttcagccccgtgcggagcgtgcggaagaacagcctgtcagatcattcattagggataagccgctctaaaactcctgttgatgacccaatgagcctcctttacaacatgaatgattgctattcaaagctgaaagaattagtgcctagtattccacagaataaaaaggttagtaaaatggagatcctgcaacatgtcattgattacatactggaccttcagattgctttagactcacatccaacgatagtatccttgcaccatcagcgtccaggccagaatcaggcatccagaaccccattaacaaccttaaacactgatattagcatccttagtctacaggcctccgaatttccaagcgaacttatgagcaatgactccaaagcattgtgtggttag

SEQ ID NO: 198232 - DNA, 1386 bp, synthetic construct
  misc_feature 1..1386: note = Description of Artificial Sequence: Synthetic coding sequence
  source 1..1386: mol_type = other DNA
atgaacaacttcggcaacgaggagttcgactgccacttcctggacgaggggttcacggctaaggacatcctggaccagaaaatcaacgaagtgagttccagcgatgataaggacgctttttacgtggctgaccttggcgacattttaaaaaaacacttacgatggctgaaagcgctcccacgggtgaccccgttctatgccgtgaaatgtaatgacagtaaggctatcgtaaagacgcttgcagcaaccggcaccgggtttgactgcgctagcaagactgaaatccagcttgttcagagcctgggagtccctcctgagagaatcatttacgccaacccatgcaaacaggtgagtcagatcaaatatgcagcgaacaacggggtacagatgatgacttttgactccgaagtggagctgatgaaggtggcaagggcccacccaaaagccaaactggtcctcagaatagcgactgacgatagcaaggcagtgtgcagattgagtgtcaagtttggagccaccctgagaacaagtcgtttgctactcgagagggctaaagagcttaatatcgatgtggtgggggttagttttcacgtgggaagcggatgcacagaccccgagacattcgtacaggccatttccgatgcaaggtgtgtgttcgacatgggggcagaagtgggcttcagtatgtatctgcttgacatcggcggaggatttcccggctccgaagatgttaaattgaagttcgaagaaatcactggggtaatcaatcctgcgctcgacaagtacttcccgtctgatagtggcgtccggatcatcgcagagcccggcagatattatgtagcgtcggcctttacccttgcggtgaatatcatcgcaaaaaaaatcgttcttaaagaacagacaggatcggacgacgaggacgagtccagcgagcagacctttatgtactacgtgaacgacggcgtgtatggctctttcaattgtatcctgtacgatcacgcccacgtcaaacccctgctgcaaaaaagacctaagccggacgagaaatactattcaagctctatttgggggcccacctgcgacgggctcgacaggatagtggaaagatgcgacctaccagagatgcacgtaggggactggatgctgttcgagaacatgggagcttacacagtcgcggccgcgagcactttcaacggctttcaacgcccaacaatctattatgtgatgtccgggcccgcctggcagctgatgcagcagtttcagaatcccgactttccaccggaggtagaggaacaggacgcttcaaccttgccagtatcctgtgcctgggaaagcggcatgaagagacatcgcgctgcgtgtgcatctgccagcattaacgtatag

SEQ ID NO: 198233 - DNA, 207 bp, synthetic construct
  misc_feature 1..207: note = Description of Artificial Sequence: Synthetic coding sequence
  source 1..207: mol_type = other DNA
atgaacaacttcggcaacgaggagttcgactgccacttcctggacgaaggatttacagccaaggatatcctggatcagaaaatcaatgaggtatcgtcctccgatgataaagatgcattctacgtcgctgacctaggggacatcctgaagaagcatctgaggtggctgaaggccctccctagggttacgcccttctatgctgtttag

SEQ ID NO: 198234 - DNA, 927 bp, synthetic construct
  misc_feature 1..927: note = Description of Artificial Sequence: Synthetic coding sequence
  source 1..927: mol_type = other DNA
atgatgaccttcgacagcgaggtggagctgatgaaggtggcccgggcgcaccctaaagccaagttagtgctgagaattgcaacagacgattccaaggccgtttgcagactgtcggtgaaatttggagctactcttcggacttccaggctccttcttgagagagctaaggaattgaacattgacgttgtgggagtgagtttccacgtgggctctggttgcacagatcctgagacttttgtacaggctatttcagatgccaggtgcgtttttgatatgggagccgaggttggcttctctatgtacctgttggatattgggggcggatttcccgggtccgaggatgtgaagctgaagtttgaggaaatcacgggagtaattaatcctgcccttgacaagtacttcccttccgactcaggcgttcggattatcgccgagccgggacgctactacgtggcttccgcattcacacttgctgtaaacatcattgctaaaaaaattgtcctaaaagagcagaccggtagtgacgatgaggatgagtccagcgagcagacattcatgtactatgttaacgacggagtatacggatccttcaattgcatcctttacgaccacgctcatgtcaaaccgcttttgcagaaaagacctaagcccgatgagaagtattattcttcaagcatttggggccccacctgtgacgggttagacaggatcgtggagcgatgcgatctgcccgagatgcatgttggcgactggatgttattcgagaatatgggcgcttatacagtggcggcagcaagtacatttaacggatttcagaggcccactatatattatgtgatgtctggccctgcctggcagctgatgcagcagttccaaaaccccgactttcctccctgtttgtgccttgtgccgggtcgcgtggggtag

SEQ ID NO: 198235 - DNA, 684 bp, synthetic construct
  misc_feature 1..684: note = Description of Artificial Sequence: Synthetic coding sequence
  source 1..684: mol_type = other DNA
atggtgaagagcagcctgcagcggatcctgaacagccactgcttcgctcgggagaaggaaggggataaacctagcgccacaattcacgcctcccgcaccatgcccttgttatcccttcacagccggggtgggtccagcagtgagtcgtctagagtgagtcttcactgttgtagtaaccccggaccagggccgaggtggtgtgatgctcctcacccccccctgaagatccccggaggcagggggaattctcagagagatcataacttgtctgcaaacctcttttactctgacgatcgtctgaatgtcacagaggaattgaccagtaatgacaagacgcggatcttaaacgtgcagagccggttgaccgatgctaagcgtattaactggaggacagtgctcagcggcggcagcctctatattgagatccctggcggtgcactccccgaagggagcaaagactcttttgcagttctgcttgagtttgccgaagaacagctgcgcgctgaccacgtctttatctgcttccacaaaaatcgcgaggatcgcgccgcgctcctcaggacattttctttccttggatttgagatagtccggcccggccaccctttagtgccgaaaagacccgatgcttgtttcatggcctacaccttcgaaagggaaagctccggagaggaggaggagtag

SEQ ID NO: 198236 - DNA, 831 bp, synthetic construct
  misc_feature 1..831: note = Description of Artificial Sequence: Synthetic coding sequence
  source 1..831: mol_type = other DNA
atgtggatcaccagcctgatcaccatgaaggacgaggacatcttcgacttagctggcgaccctcaggatagcctgatccccgggccaagtcccacgccaaagcagaatcccgtgtgcaatgaagcctttttcggccatcaaactttctccctgcgggaaactggcctgaagtcggttcactgccagggccaggaggccgagaatatggagcgtgagaagttccagcagaaggccctcaagcagacgaagcagaagaagtccaagtcagctgaatttctcatggtgaaagaggacagagaggcaactgagggcaccggcaaccctgccttcaatatgtcttcccccgacctgtccgcatgtcagacagccgagaaaaaagtgataagacacgacatgcctgatcgtacgcttgccgcccatcagcagaagtttagactcccagccagcgctgagccgaaggggaatgagtacggcaggaactacttcgacccactaatggacgaagaaataaatccacgtcagtgcgcaactgaggtgtcacgggaagacgagtcagggagagaggaaacgttaaatagcgaggcacccggctctagcaacaagagccatgaaattcacaaggaagcgtcagaagccacaaccgctcatttggaagagtttcagagaagccagaaaacgataatcctgttaggttcgagccccctggagcaggagattcgtagtacatccctgcactgcatggaggacgaaatgtcacatccctggatcctgctcttgaaagttaccgccgttatacgcagtaggcgctattacagggaacagagattttag

SEQ ID NO: 198237 - DNA, 1443 bp, synthetic construct
  misc_feature 1..1443: note = Description of Artificial Sequence: Synthetic coding sequence
  source 1..1443: mol_type = other DNA
atggagcgggagaagttccagcagaaggccctgaagcagaccaagcagaaaaaaagcaagtccgctgaattccttatggttaaggaggatcgtgaggcgaccgagggaacaggtaaccccgccttcaatatgagtagcccagacctttccgcctgtcagaccgccgaaaagaaagtgatccgacacgatatgcctgaccgtactcttgccgcacaccaacaaaaatttcggcttccagcctccgcagagccaaaggggaatgagtacggtcgcaattacttcgatcctctgatggacgaagaaatcaaccctcgccaatgcgcaacagaggtctcgagggaggtctgcttgatggccaagggggaaaaggctgaatcgggggtcgataacaccgcagggctgagtgagaaggagactcagaagaaccctcgcgcacctatggatgaagcagacgtaaagagcgcggcccacagctcacaaggatccattccgaaaaagattggcccctgtagcatggactacgatccaaatctactggaagaagacgacgaactgcactcgcagggggactctttaacagaccattcagtgaagggcaagtctaccgtatggcggataggagaagctgaggattacagtcaggatattagttaccttgaggagctggaagagcaccgcttttctgtgtgctgctcctccgtggcggacagccggtacggcgattttttcaagcacctgcactttgtgctggtatcagccagcagtgaactccagctgtcccagtggcagtcccagggcttctggtatatcatcctgctgatgttcttcctgtggtttcttaggctctacctgcactatctgggccaatggttgtttctgcaagctatcagcacccccgtcaccaagttccatttctcgctgcacatagtggagctgtgttacccaaccagtagcctgcacattggcgaggaactgccagtggtagtgatgggccccctaatgctcaatgctattctactgctgctggtcctgattagatgggggtgccagctcctgtttgcaagctgtcccgatgtgttgtcaaagctgatcatcacaatggggctgtggaccatcctggatcctctggccgtcttcattctagacacgcttttgggacggcttacagacaacgaggaaacaccagtggcagacgcagctaaactgtattggatgttcgttcgcactgtgcagcctgggatccttggcgtcgtcatcactgtgctgctatacattctccttttcgtcatctcaagcctgattctctacctgtattgccttaggctgcacaacgatagttggatcctggacgcgttccaacgtatacactctgaggagacaaaattcttcatcccatacgacctggagatcagcaaccaagagctctcgtatatcgtgaagtag

SEQ ID NO: 198238 - DNA, 606 bp, synthetic construct
  misc_feature 1..606: note = Description of Artificial Sequence: Synthetic coding sequence
  source 1..606: mol_type = other DNA
atggccctgagctgggtgctgaccgtgctgagcctgctgcccctgttggaagcacagattcccttgtgcgctaacttggtgccagtccccattactaatgctaccctggacagaatcacaggaaagtggttctacattgcctctgctttcagaaatgaggagtacaacaaaagcgttcaggaaatccaggcgacctttttctactttacaccgaataagacagaggacacaatttttctccgcgaataccaaacaagacaggaccaatgcatctataataccacttacctgaacgtgcagagagagaacggcaccatctccaggtatgtgggtggccaggaacacttcgcgcacctgctgatccttagggacactaagacctacatgctggcctttgacgtgaatgacgagaaaaattggggactcagcgtctacgcagacaagcccgaaaccacaaaggaacaattgggtgagttttacgaagccctcgattgtctgagaattcctaagagtgatgtggtctatacagactggaagaaagacaagtgcgaacctttagagaaacagcacgagaaagaaagaaagcaggaggaaggcgaatcctag

SEQ ID NO: 198239 - DNA, 585 bp, synthetic construct
  misc_feature 1..585: note = Description of Artificial Sequence: Synthetic coding sequence
  source 1..585: mol_type = other DNA
atggccctgagctgggtgctgaccgtgctgagcctgctgcccctgcttgaggcacagattccactgtgcgccaatcttgtccctgtgcctatcacaaacgccacactggaccgggttagtgcatgggcatctcctgtgctcagtacttgggctgctgccagcctactctgggcctcgctcagcctcctcgctgtggtgggtcccccactgcctgctctaccgttctctctactgggaccccagggtgaaatcctgaccagcccaggtgatagcggcggcaccccatgcctgcagacccagaagccccattgcagggtgctgcatggcggtcgcttttgtgctggccctgggggcgccgcctggggcgccatgacggatccacagggtgaactgttgcatgctcattgtcccccgggagcatcctcacctcacctgcaaaatcagggagagatttgcctcagtctgttgccagccgatagtcagagattcagcattaagccgccttcccccgcaccaaccttcagtcccgaccattggcaggtggtgctgtatcggatcgggctgtcgaagcgaggagtccagtag

SEQ ID NO: 198240 - DNA, 585 bp, synthetic construct
  misc_feature 1..585: note = Description of Artificial Sequence: Synthetic coding sequence
  source 1..585: mol_type = other DNA
atggccctgagctgggtgctgaccgtgctgagcctgctgcccctgctggaggcgcaaatccctctctgtgccaacctcgtcccggtcccaattacaaacgcaactcttgatagggtgtccgcctgggcctccccagttctgtccacctgggcagccgcctccctactgtgggcttccttatacctgctggccgtggtagcgcctcctctccccgccctgccatttagcctcttgggcccgcagggcgagatcctgacaagtcccggggacagcgggggaactccctgtctgcagacacaaaagccacactgccgagtcctgcacggaggacggttttgtgctggacctggaggtgcggcctggggggccatgaccgacccacaaggagaactgttgcatgctcactgtccaccaggagccagcagtcctcacttacagaaccagggtgaaatatgtctgagccttctgccagctgactctcaacgattcagcatcaagcccccttctccagccccccccttttcccccgatcattggcaggtagttctctaccgcatcggcttaagtaagagaggagtgcaatag

SEQ ID NO: 198241 - DNA, 606 bp, synthetic construct
  misc_feature 1..606: note = Description of Artificial Sequence: Synthetic coding sequence
  source 1..606: mol_type = other DNA
atggccctgagctgggtgctgaccgtgctgagcctgctgcccctgttggaggcacagatccctttatgcgctaatctggtaccagtaccgattacgaatgccaccctagatcggatcaccggcaagtggttctatatcgccagcgcttttcgcaacgaggagtacaataagtctgtccaagagatacaggccacttttttttattttacccccaataagactgaggacacaatattcctgcgtgagtatcagacccgccaaaaccaatgcttttacaactccagctacttgaacgttcagcgcgagaatggcactgttagccggtacgaaggcggcagagagcacgttgcgcacctgctcttcctgagagatactaaaacccttatgttcggatcctatctggacgatgagaaaaactgggggttgtccttttacgccgacaagcctgagacaaccaaggagcaactgggcgagttctacgaggccctggactgcttgtgtatcccacgcagtgacgtgatgtacactgattggaaaaaggataagtgcgaaccactggagaagcagcacgaaaaggagcggaaacaagaggaaggcgaatcgtag

SEQ ID NO: 198242 - DNA, 1065 bp, synthetic construct
  misc_feature 1..1065: note = Description of Artificial Sequence: Synthetic coding sequence
  source 1..1065: mol_type = other DNA
atgatgagctacctgaagcagcccccctacggcatgaacggcctgggattggctggtcctgccatggatctgctgcatcctagtgtgggttaccctgccaccccaagaaagcagcgacgggagagaaccacgtttacccggagccagttggatgttttagaggcactgttcgccaaaacccggtaccccgacatcttcatgcgggaagaagtagcactaaaaatcaatctgcccgaatctcgcgtgcaagtctggtttaaaaataggcgggctaagtgtaggcaacagcaacagagcggttcgggaactaaatccagaccggccaagaagaagagtagccccgtgcgtgaatcaagtggatcagaatcttcaggacagtttacgccgccggcggtcagtagcagcgcctcgtcctcttcctctgcctcctcatcttccgcaaatccagccgccgctgccgcagccggactgggcgggaatcccgtggcggccgcttcttccctcagcacgccagctgccagttctatatggagcccagccagcatttcaccaggctccgcacctgcttccgtgtcagtccctgagcctctcgcagccccatccaatacgagttgcatgcaaaggtctgtggctgctggtgctgccacggccgcggcatcatacccaatgagctatgggcaggggggaagttacggccagggttaccctaccccctcctcgagctattttggcggcgtggactgttccagttatctggctcccatgcacagccaccaccatcctcaccagctgtcacccatggctccgtcttctatggcaggtcaccaccaccaccacccacacgcccaccacccccttagccagtccagcggccatcatcaccatcaccaccatcatcatcatcaaggctacggtggctcaggcttggcttttaactccgccgattgcctggactataaggagcctggagcagcagcagctagctccgcttggaagctgaactttaactccccagattgcttggattacaaggaccaagcatcatggcggttccaggtgctgtag

SEQ ID NO: 198243 - DNA, 1065 bp, synthetic construct
  misc_feature 1..1065: note = Description of Artificial Sequence: Synthetic coding sequence
  source 1..1065: mol_type = other DNA
atgatgagctacctgaagcagcccccctacggcatgaacggcctgggcttggcaggcccagcgatggacctgctccaccccagcgttgggtatcccgccacgcccagaaagcagcgtagagagcgaaccaccttcacaagatcacagctggatgtgctggaagccctgttcgcaaaaaccagataccccgatatctttatgcgtgaggaagtcgccctcaaaattaatttgccggagtcccgcgtgcaagtctggtttaagaataggcgggccaaatgcagacagcagcaacagtccggttccggtaccaaaagcagaccagccaaaaaaaaaagcagccctgtgagggagagcagcggatctgagagctccggccaatttacacctcctgcagtttcttcatctgcatctagttcctcatccgcaagtagctcatcagcaaatcctgctgccgcagccgctgcgggcctcggcggaaaccccgtcgcggccgcgagttcattgagtacacccgctgcgtcaagcatttggagtcctgccagtatctcaccaggctctgcgccagctagtgtgtcagtccccgagcccctggcggccccatcaaatactagctgcatgcagaggagcgttgccgccggagctgccactgctgctgccagctacccaatgtcctacggacaaggaggatcctatggccaaggctatccgacgcctagttctagttatttcggaggtgtggattgctcctcatatctcgcaccaatgcattctcatcaccacccccaccagctttcgccaatggcgccaagcagtatggccgggcaccaccatcatcaccctcatgcgcaccatcctctcagccagtcctccgggcatcatcaccaccaccaccatcaccatcaccaaggttatggcggatctgggctggctttcaactctgcagattgtctggactacaaggaacccggggcagctgcagcaagcagtgcctggaagctcaacttcaatagtcctgattgtctggattacaaagatcaagcatcttggaggttccaggtgctatag

SEQ ID NO: 198244 - DNA, 894 bp, synthetic construct
  misc_feature 1..894: note = Description of Artificial Sequence: Synthetic coding sequence
  source 1..894: mol_type = other DNA
atgatgagctacctgaagcagcccccctacgccgtgaacggcctgagcctcacaacgtcaggcatggatctgctgcacccaagcgttggctacccaggaccgtgggcttcctgtcctgccgctaccccaaggaagcaacggcgagaacgaacaacattcacaagggcgcaactggacgttctggaagctttattcgccaagaccagatatcccgacatctttatgagagaggaggtagctctgaagatcaatctgcccgaaagtcgggtccaggtctggttcaagaacagacgggctaaatgtagacagcagcagcagcaacagcagaatggcgggcagaacaaagtccgcccagcaaagaaaaaaacctcccctgctagggaggtgtccagcgagagcggcacaagcgggcagttcacccccccttcatctacgtctgttcctaccattgctagctcttcagctcctgttagcatctggtcccccgccagtatttccccactgtcagacccattgagcactagcagcagctgtatgcagcggtcctacccaatgacttacactcaggcatcaggctacagtcaggggtatgcgggcagtactagctatttcggtggcatggattgcgggtcttacctaacgcctatgcatcaccagttacccggacccggggctacgctgtcgcccatgggcactaatgcagttacaagtcacctgaatcagagccctgcttccttgtctacgcaggggtatggtgcatcctctcttggattcaattccaccacggactgtctcgattacaaggaccagaccgcctcctggaaactgaattttaacgcagactgcctggactacaaagaccagacgtcctcgtggaaattccaggtgctctag

SEQ ID NO: 198245 - DNA, 870 bp, synthetic construct
  misc_feature 1..870: note = Description of Artificial Sequence: Synthetic coding sequence
  source 1..870: mol_type = other DNA
atgatgagctacctgaagcagcccccctacgccgtgaacggcctgagtctgacaacatctggaatggacttgctgcatcctagcgtcgggtacccagcaactccacgcaagcagcgtcgggagcgcactaccttcactagagcccagttggatgtgctggaagcacttttcgccaaaacccgttatcctgacatttttatgagggaggaggttgctctgaaaatcaatctcccagaatcacgcgttcaagtctggtttaagaatcgtagagcaaagtgtcgccagcagcaacaacaacagcagaacggcggacagaataaagtgcggcccgctaagaaaaagacaagccctgccagggaggtatcaagtgagtccgggacaagcggacagttcacgccccccagctctacctctgtgcctaccatcgcaagttcctccgccccagtcagtatctggtctcccgctagcatcagccctctctccgaccctctgtccacctcttcatcctgtatgcaaagaagttacccgatgacgtacacacaggcttccggttactcccagggctatgccggttccacttcttacttcggcggcatggactgtggctcctatctgactccgatgcatcatcagctcccaggccccggggctacactgtctccaatgggaacgaatgctgtcacgtcccatctgaaccagtcgccggcctcgctgtctacccagggatacggcgcaagcagcctggggttcaattcaaccacagactgtctggattataaagatcagacagcatcctggaagttgaattttaacgccgattgtctggattacaaagatcagacctcctcttggaagtttcaagtactttag

SEQ ID NO: 198246 - DNA, 720 bp, synthetic construct
  misc_feature 1..720: note = Description of Artificial Sequence: Synthetic coding sequence
  source 1..720: mol_type = other DNA
atgatgagctacctgaagcagcccccctacgccgtgaacggcctgagtttaaccacatccggcatggaccttctccatccctcagttgggtaccccggcccgtgggccagctgcccagctgcaactccgcgcaagcaacggcgggagcgaacaaccttcaccagagcccagttagatgtgctggaggcgctgttcgctaaaaccaggtaccctgatatatttatgcgtgaggaagttgccttgaaaataaatcttcctgagtcccgggttcaggtgtggtttaaaaatcgtcgggcgaagtgcagacagcaacaacagcagcagcagaacggcgggcagaacaaagtgcgtccggctaaaaaaaaaacgagcccagctcgggaagtttcttcagagtccggtacaagtggccagttcacccccccttcgtccacctcagtgccgactatcgctagcagttccgcgccagtttccatctggagcccagctagtatttcaccattgagcgaccccctctctacttcgagtagctgcatgcaacggtcatatcccatgacgtatacccaggcatccggatacagccagggctatgccggtagcaccagctacttcggaggtatggattgcggcagctatttaactccaatgcatcatcaacttcctggtccgggtgcaaccctctcacccatgggcacaaatgctgtgacctcacatctgtag

SEQ ID NO: 198247 - DNA, 870 bp, synthetic construct
  misc_feature 1..870: note = Description of Artificial Sequence: Synthetic coding sequence
  source 1..870: mol_type = other DNA
atgatgagctacctgaagcagcccccctacgccgtgaacggcctgtcactgaccacctccggcatggacctgcttcacccgtctgtcggctacccagctaccccacgcaaacagcggcgagagaggaccaccttcacaagggctcagctggacgtgctcgaagccctgttcgcaaagacacgctacccagacatcttcatgcgcgaggaagtcgccctgaagattaacttgcccgaatcccgtgtgcaggtctggttcaaaaacaggcgcgccaagtgccggcagcaacagcagcaacagcagaatgggggccaaaataaagtcaggccagctaaaaagaaaacttccccagcaagggaagtcagctcggaatcaggaacaagtgggcagttcacacccccatccagcacctcagttcctacaatagctagttccagcgccccagtgtcaatatggtccccagcctcaatctcgcccttgagcgatccactctccacgtcatcatcctgcatgcagcgatcctaccctatgacctacactcaggccagcggatatagccaaggatatgcagggtccacgagctacttcggcggcatggactgtgggtcttatctgacgcccatgcaccaccagctgccaggacccggcgccaccctctcacccatgggcacgaatgctgttacatctcacctgaaccaatcccctgcatctttaagcactcagggttatggagcttcaagcctgggatttaattctacaactgattgtcttgattacaaagaccagactgcgtcatggaagctgaatttcaacgctgactgtcttgattacaaggaccagacaagcagttggaagttccaggtcctgtag

SEQ ID NO: 198248 - DNA, 492 bp, synthetic construct
  misc_feature 1..492: note = Description of Artificial Sequence: Synthetic coding sequence
  source 1..492: mol_type = other DNA
atgatgagctacctgaagcagcccccctacgccgtgaacggcctgtcgttaacgacctctggcatggacctgttgcacccgtccgtcggctatccggctacaccgcgcaaacagagacgggagcgcaccacgttcacccgcgcacaactggatgtgctggaagccctgttcgctaagactagataccctgatattttcatgcgcgaggaagttgcactgaaaatcaatctgccagaatctcgggtgcaggtctggttcaaaaatcggagggccaaatgtaggcaacagcaacagcagcagcagaacggcggccaaaataaggtgcggcctgctaagaaaaaaaccagcccagcaagagaagtcagctcggaatcagggacctcgggacagtttactccacctagcagtaccagtgtccctaccatagcttcttcctcggcccccgtctccatttggtcacctgccagcattagccctctgagcgatccctag

SEQ ID NO: 198249 - DNA, 978 bp, synthetic construct
  misc_feature 1..978: note = Description of Artificial Sequence: Synthetic coding sequence
  source 1..978: mol_type = other DNA
atgctgagccacgccgacctgctggacgcccggctgggcatgaaggacgcggctgagctcctgggtcatagggaggctgtcaaatgtcgcctgggagtgggaggttctgacccgggcggacaccctggcgatttggcacctaacagcgaccccgtggaaggggctacgctgttaccgggcgaggatataaccactgtggggtccaccccagcatcactagccgtgagtgcaaaagaccccgacaagcagccaggccctcaaggtggaccaaacccctcgcaggctggtcaacagcagggccagcaaaaacagaaaagacaccgaacacgctttactcccgcccagctcaatgagctagagagatcattcgctaagacccactatcctgatattttcatgcgagaggagttggccctccgtatcggtctgacggagagccgcgtgcaggtgtggttccagaataggagggctaagtggaaaaagaggaaaaagaccactaacgtgttccgggcaccaggcacactgctgcctaccccaggactcccccaatttccaagtgccgctgcagcagcagcggccgcgatgggtgatagtctgtgctctttccacgcgaacgacaccaggtgggctgctgccgccatgccaggggtaagtcagctccctttgcctccagcgctggggagacaacaggcgatggcacagtcccttagccagtgttcactggctgccggaccaccacctaacagcatgggtctgtcaaattccctggctggaagtaatggggcaggactccagtcacacctctatcaacccgcattcccaggtatggttccagcctccctcccaggtcctagcaacgtaagcggaagtccacaactctgcagttctccagattcgtccgatgtttggcggggaacatcaatcgcctccctccgaaggaaagccctggagcacactgtcagtatgagtttcacttag

SEQ ID NO: 198250 - DNA, 912 bp, synthetic construct
  misc_feature 1..912: note = Description of Artificial Sequence: Synthetic coding sequence
  source 1..912: mol_type = other DNA
atgggcatcgtgcagatctgcaagggcgagtacttctggctggagcccaaaaatgcgttcgaaaactttcaggagcctgacattggattggtggcactggccttccttcaggggtccttcgcatacggagggtggaactttctcaattacgtcactgaggagctggtagacccttacaagaacctgccacgggctattttcatttcaattccgctggtgacttttgtatacgtgtttgccaatgtggcctatgtcactgctatgtcacctcaggagttgctcgcaagcaatgccgttgcagttacctttggagagaagctgctgggcgtgatggcatggattatgcccatttcagttgcacttagtacctttggaggcgtgaatggctcactgtttacaagctcacgcttgttcttcgctggcgcaagagagggccatttaccctcagtcctggccatgatccacgtcaagaggtgcacacctatacctgccctgttgttcacctgcatatcgactctgcttatgttggtgacatctgacatgtacacactgatcaactatgtgggcttcatcaactatctgttctacggcgtcacggtggccggccagattgtgctgcgttggaagaaaccggatataccccggcctattaaaatcaacctcttgttccctattatttatctcctcttctgggcttttttgctcgtgttcagcctatggtcggagcccgtcgtgtgcggcatcgggttggcgatcatgttgaccggtgtgcccgtttacttcttgggagtgtattggcaacacaaacccaaatgtttttcagattttatagaactattgaccctggtgagtcagaagatgtgcgtggttgtgtatccagaggtggagggtcttcgagacagagggggatag

SEQ ID NO: 198251 - DNA, 861 bp, synthetic construct
  misc_feature 1..861: note = Description of Artificial Sequence: Synthetic coding sequence
  source 1..861: mol_type = other DNA
atggccctggtgctgatcctgcagctgctgaccctgtggcccctgtgccacacagacataacgccatccgttgctatcatcgtgccgccggctagctaccatcccaagccatggttaggcgcccagccagccacggtcgtgactccaggcgtgaacgtcacactgcgatgccgggctccccaacctgcctggcgttttggactgtttaagcccggagagatcgcgccgctccttttcagggatgtgagtagcgaacttgccgagttctttctggaggaagtgaccccagctcaaggcggaatttacaggtgctgctatagacggcccgactggggtccaggagtttggagccaaccatctgacgtcctggagctcttagtgaccgaggagttaccgcgccccagccttgtggcgcttcccgggccagtggtgggccccggggcaaatgtgtcgttaaggtgtgccggtcgactgcggaacatgagctttgtgttgtatagagaaggggtcgcggcccccttacagtaccgccattccgcacagccatgggcagatttcacactgctgggggctcgggcacctggcacgtactcatgttattatcacacccccagcgccccttatgttctttctcagaggtccgaagtcctggtaatatcatgggaaggcgagggcccagaggctagaccagcttcgagcgctcctggaatgcaggccccgggccccccccctagcgatcccggggctcaagcaccaagcctgagctcattcagaccaagaggcctggtgctgcaacccctgttgccgcagacacaggactcctgggatcccgccccaccccccagcgatccgggtgtgtag

SEQ ID NO: 198252 - DNA, 849 bp, synthetic construct
  misc_feature 1..849: note = Description of Artificial Sequence: Synthetic coding sequence
  source 1..849: mol_type = other DNA
atggccctggtgctgatcctgcagctgctgaccctgtggcccctgtgtcataccgatattactccaagcgtcccacctgcttcataccatccgaagccctggctgggggcgcagccggccactgtggttactccaggcgttaacgttactctccggtgccgggctccccagcctgcttggcggtttggattattcaagcctggagagatagcacccttgctgttccgagacgttagctccgaacttgccgaattcttcctagaagaagtgacgcctgcccagggagggatctaccgctgttgctacagacgccccgactggggtcccggggtttggagccagccaagcgatgttctcgagctcctcgtaacagaagaattgccccgccccagcttagtggctttgccaggccccgtggtcggccctggggccaatgtctccttgcgctgcgccgggagactgcgaaatatgagtttcgttctctatagagaaggggtcgccgcccccttacaatatcggcactccgcccaaccatgggctgactttacactcttgggagccagagcacctggcacgtactcctgttactaccatacaccttcagctccatatgtcctgtcacagaggtctgaagtgttggtgatcagctgggagggcgagggacctgaggcaagacccgcaagcagtgcacctgggatgcaggcacctggacccccgccgagcgaccccggcgcccaggcgccatctctgagcagtttcaggccaaggggactcgttcttcagccgctactgccccagacccaggactcttgggacccggctccccctccttccgacccaggagtgtag

SEQ ID NO: 198253 - DNA, 759 bp, synthetic construct
  misc_feature 1..759: note = Description of Artificial Sequence: Synthetic coding sequence
  source 1..759: mol_type = other DNA
atggccctggtgctgatcctgcagctgctgaccctgttcccccccgctagttaccaccccaaaccgtggcttggggcacagcccgcaaccgtcgttacacccggagttaacgttaccttgcgctgtcgcgcaccacagcccgcttggcggttcggattatttaagcccggggagatcgccccactgctcttccgcgacgtatcctccgaacttgctgagttctttctcgaagaagttacacctgcacaggggggcatctacaggtgttgctaccggcgtcctgactggggccccggggtgtggtcacagccatctgacgtcttggagcttctcgttactgaagagttgccgaggcccagcttagtcgccctccccggtcccgtggtggggcctggcgctaacgtcagcctgcgctgtgccggcagactaaggaacatgtcctttgtactttaccgcgaaggagttgccgcccccctacagtatagacatagtgcccagccctgggcggattttacattattaggggccagagctcccggtacatatagttgttactatcatacccccagtgcaccctatgtactgagtcaacggagcgaagttttggtcattagttgggaggactcaggatccagtgactatacacggggcaatctagtgcgtctagggcttgctggactagtactgatctcattaggggcactcgtgacctttgactggagatctcaaaaccgcgctccagccgggatccgaccgtag

SEQ ID NO: 198254 - DNA, 804 bp, synthetic construct
  misc_feature 1..804: note = Description of Artificial Sequence: Synthetic coding sequence
  source 1..804: mol_type = other DNA
atggccctggtgctgatcctgcagctgctgaccctgtggcccctgtgccatacagatattaccccatccgttgccataattgtgccccctgcttcataccaccctaaaccgtggctcggcgctcaaccagcgaccgtggtcacaccgggggttaacgttaccttgagatgccgggccccccagcctgcctggcgatttggtctgttcaagccaggagagatagcaccccttttgttccgagacgtgtcctctgaactggccgagtttttcctggaggaagtgactcctgctcaggggggcatttataggtgctgctacaggaggcccgactgggggcctggggtttggtcacaaccatccgacgtgctggaactccttgttacagaggaactaccacgtcctagtctggtggctctgcctggaccggtggtgggtcccggggctaatgtgtccttaaggtgtgcaggccggttgagaaacatgtcattcgttctctatcgagagggggtggccgcacctcttcagtatcgacactctgcacagccctgggccgactttaccctgctaggcgccagagcccctggtacttatagttgctactatcacaccccctccgccccgtatgttcttagtcagcgaagtgaggttttagttattagctgggaagattccggctcctctgattacacccgaggaaatctcgtccgcctgggcctagcagggctcgtgcttatctctttgggtgcactggtgacttttgattggaggtcccagaaccgggcgccagccggtattcgcccatag

SEQ ID NO: 198255 - DNA, 792 bp, synthetic construct
  misc_feature 1..792: note = Description of Artificial Sequence: Synthetic coding sequence
  source 1..792: mol_type = other DNA
atggccctggtgctgatcctgcagctgctgaccctgtggcccctgtgccataccgacattacaccttctgtacctcctgccagctatcaccctaagccttggctgggcgcacaacctgcaaccgtggtgacccccggggtgaatgtgacgctccgttgccgggccccgcagcccgcatggcgattcggcctgtttaagcccggcgaaattgcccctttactgttcagggacgtgtcaagcgagctggccgaattttttctggaggaggtcacccccgctcagggcggtatttaccgatgttgttaccgccggcctgattggggcccaggtgtgtggtcacagccttcggacgtgctcgagctgctggtgactgaggagcttcccaggcccagccttgtggcactgcctggacctgtggtcgggcccggtgcaaatgtttcactgcgttgcgcaggacggttgaggaacatgtcattcgttctctacagagaaggtgttgcagccccactccaatataggcactcagctcagccttgggctgacttcacccttctcggagccagggccccgggtacgtatagctgctactaccacactcccagtgcaccatacgtcttatcacagcgcagcgaggtactggtcatttcctgggaagattccggtagctcagattacactaggggcaacctcgtaaggttgggcctcgccggccttgtccttataagtttgggggctctggtaacatttgactggaggtctcagaatcgagctccagccggcatacgaccgtag

SEQ ID NO: 198256 - DNA, 645 bp, synthetic construct
  misc_feature 1..645: note = Description of Artificial Sequence: Synthetic coding sequence
  source 1..645: mol_type = other DNA
atgagcaagcccccccccaagcccgtgaagcccggccaggtgaaggtgttccgggccctgtatacatttgagccaagaacacccgacgaactttactttgaagaaggagatatcatatacataactgacatgtccgacacaaattggtggaaaggcacatcaaagggtaggaccggtttgattccttctaattatgtggctgagcaggccgaaagcatcgataacccactgcacgaggcggccaagagggggaatctctcttggcttagggaatgcctcgataacagagtaggggtcaatggacttgataaggcaggatcaactgccctctactgggcctgccacggagggcacaaggatattgtggaaatgttattcactcagccaaacatcgagttgaaccaacagaacaagctgggagacactgctttgcacgcggccgcttggaagggctatgctgatattgtgcaactcctgctcgctaagggcgctagaaccgatctgcggaatattgagaagaaactggcctttgatatggccaccaatgccgcttgcgcgtcgctgctgaaaaagaaacaaggaacagacgctgtgcggacattaagtaatgctgaagactacctggacgacgaggacagcgactag

SEQ ID NO: 198257 - DNA, 897 bp, synthetic construct
  misc_feature 1..897: note = Description of Artificial Sequence: Synthetic coding sequence
  source 1..897: mol_type = other DNA
atgaagaccctgcagagcaccctgctgctgctgctgctggtgcccctcataaagcccgcacctccaactcagcaggattcccgtattatctacgactacggtactgataatttcgaggaatccatcttctcgcaagattacgaagacaagtacctggacggaaaaaatatcaaagaaaaagaaacagtcataatcccgaacgagaaaagtctccaactacaaaaagacgaggctatcacccccttgccgcccaagaaggaaaacgacgagatgccaacctgtctgctgtgcgtctgtttatccggcagtgtgtattgtgaggaagttgatatagatgcagtgccacctctgccaaaagaaagtgcctacctgtatgcgagattcaataagatcaagaaactgaccgccaaagatttcgccgacattccaaatctgagaaggctggactttaccggtaaccttattgaagacattgaggatggcactttcagcaagctttccctgctcgaggaactgtcattagcagagaatcagctcttaaaacttccggtgctgccccctaagctgaccctgtttaacgccaaatacaacaaaatcaaatcacgaggaatcaaagccaacgccttcaagaagcttaacaatctgactttcttatatctcgatcataacgctctggaatccgtgccattgaatctgcccgagagtcttagggtcattcatttacaattcaataacatagcctccatcacagatgacacattttgtaaggcaaacgatacatcttatattagggaccggatagaggaaatccggttagagggcaaccccatagtcttaggaaaacacccaaattcctttatctgtctgaagagacttccgatcggtagctatttttag

SEQ ID NO: 198258 - DNA, 897 bp, synthetic construct
  misc_feature 1..897: note = Description of Artificial Sequence: Synthetic coding sequence
  source 1..897: mol_type = other DNA
atgaagaccctgcagagcaccctgctgctgctgctgctggtgcccttaattaaaccagcccccccgacccagcaagatagcaggatcatctatgactacggtaccgataatttcgaagagagtatattctcccaggattatgaagacaagtatctggacggaaagaatataaaagagaaagagactgtgattattcctaatgaaaaatctttgcagctgcagaaggacgaagctataaccccgctgcctcctaaaaaagaaaacgacgaaatgccaacttgtttactttgtgtttgcctttccggttcggtttactgcgaggaagtggacatcgacgccgttccgcctctgccaaaggagtctgcctatctgtacgcccgctttaacaagattaaaaaactcaccgccaaggatttcgcggacattccgaatctccggcggctcgattttactggcaaccttattgaggatattgaagacggtacatttagcaaactaagtctgctggaagagctgtcactggcagagaatcagctgctgaagctgcctgtgctgccccctaaattaacactgttcaacgccaaatacaataagatcaagtcgaggggaattaaggccaacgcgtttaaaaagctgaacaacttaaccttcctgtatctggatcacaatgccctggagagcgtgcctctgaacctgcccgagtctctcagagtgattcaccttcagtttaacaatatcgctagcatcaccgacgatacattttgcaaggccaatgataccagttacatcagagaccgcattgaggagattagactggaaggcaaccctatagtgctggggaagcaccctaattcattcatctgtctaaaacggcttccaatcggctcgtacttttag

SEQ ID NO: 198259 - DNA, 807 bp, synthetic construct
  misc_feature 1..807: note = Description of Artificial Sequence: Synthetic coding sequence
  source 1..807: mol_type = other DNA
atgctggccaagatcagcaccacctggaagctgttcctgaagctgctgggccctgagattctgctgagttcgctcaagtcacgccattcgttttcacactcgccaagtcatttaggcctcatgcaccggcacgaacatctgctccgcaagactactaagaatttcaagaccgctaccacaaccctgcagagcacattgttactactgctgcttgttccactgattaaaccagctccacccacccagcaagactcccgaatcatctacgactacgggacagataacttcgaagaaagcattttcagtcaggactatgaggataaatatctggacggcaaaaatattaaggagaaagagacagttattatccctaatgagaaatctttgcagctgcagaaggatgaggcaataacgcctcttccgcctaagaaagagaatgacgaaatgcctacctgtctgttgtgtgtatgtctgtccggctcggtgtattgcgaagaggtcgatatcgacgccgtcccgccgctgcctaaagaaagtgcgtacttatacgcacgcttcaataagatcaaaaagctgacagcaaaagactttgctgatatccctaacctgaggagactggattttacagggaatctaatcgaggatattgaggatgggacattcagcaaactgtccctcctcgaagagctgagcttggccgaaaaccaactgctcaagctgcccgtgctcccaccgaagctgacccttttcaacgcaaagtataataagataaaatctcggggcatcaaggcgaacgcttttaagtag

SEQ ID NO: 198260 - DNA, 1842 bp, synthetic construct
  misc_feature 1..1842: note = Description of Artificial Sequence: Synthetic coding sequence
  source 1..1842: mol_type = other DNA
atggccgccgagaccctgctgagcagcctgctgggcctgctgctgctgggtctcctactgcctgcaagtttgaccggcggcgtcggtagcctgaacctcgaggagctaagcgaaatgagatatggcatcgaaatactgccacttccggtgatgggggggcagagtcaaagttcagatgtcgtaattgttagctccaagtacaagcaacgatatgagtgtcgtctgcccgccggcgcgattcattttcagcgcgaaagagaagaagagacacctgcttaccaaggccccggtattccggaactactcagtccaatgcgtgatgccccatgcctcctcaaaactaaggattggtggacatacgaattttgttacggacggcatatccagcaatatcacatggaagactcagagatcaaaggcgaggttctgtatcttggctactaccagtccgcttttgattgggatgatgagactgccaaggcttcaaaacagcatagattaaagagatatcattcccaaacctacggtaatggtagtaagtgcgatctgaatggacgaccgcgcgaggccgaagtccgatttctgtgcgacgaaggtgccggtataagcggtgactatatagaccgagtggacgaacccctgtcatgtagttacgtgctcacaattcgtacccccaggctttgtccacatcctctgttaaggccccctccgtccgccgcaccacaggccatcttgtgccacccgagccttcagcctgaggagtacatggcgtacgtgcaacggcaggccgtagactctaaacagtacggtgataaaatcatcgaggaactgcaggaccttggacctcaggtctggtccgaaacgaaatctggcgtggccccccagaaaatggccggcgctagccctactaaggatgatagcaaagactcggatttctggaagatgttaaacgaaccggaagaccaggcccccggcggcgaggaagtccccgccgaggagcaagatccctcaccagaagcagccgactccgcctccggtgcacccaatgattttcaaaataacgtgcaggtcaaggtgatccgttctccagctgatcttataagattcatcgaagagctgaagggtgggaccaagaagggcaagccgaacatcggccaggagcaaccagtggatgatgcagccgaggtaccgcagagagaaccagaaaaagaacggggcgatcctgagagacaaagagagatggaagaagaggaagacgaggatgaagatgaggatgaagatgaggacgagcgtcagctgctgggcgagttcgagaaagagcttgaggggattctcctgccttccgatagagaccgtctgcgatccgaagttaaggctggaatggaaagagagctcgagaacatcatacaggaaacagaaaaggagttggatcctgacggtctgaagaaggaaagcgaaagggaccgtgctatgctggcgctgaccagtacactgaataaactaatcaagcgcctcgaagagaaacagagccctgagctcgtgaagaagcacaagaaaaaacgggtcgtgccaaagaagccaccaccgagccctcaacctaccggtaagatcgaaatcaaaatagtcaggccatgggcagaggggactgaagagggcgcgaggtggctgacagacgaggatacccgtaacctgaaagaaattttcttcaatatcttagtcccaggagcggaagaagctcagaaggagcggcagcgccagaaggaacttgaatctaattaccggcgcgtctggggttcacccgggggcgaggggaccggagaccttgatgaattcgatttctag

SEQ ID NO: 198261 - DNA, 1959 bp, synthetic construct
  misc_feature 1..1959: note = Description of Artificial Sequence: Synthetic coding sequence
  source 1..1959: mol_type = other DNA
atggccgccgagaccctgctgagcagcctgctgggcctgctgctgcttgggctgctgttaccggcaagcctgacagggggggtaggatccctcaatttggaggagctcagcgagatgcggtacggcatagaaatactcccgctcccagtcatgggggggcagagccagtcatcggatgtagtaatcgtcagttccaaatataagcagcggtatgagtgccggctgcccgcaggtgctatccacttccagagggaaagggaagaggagacccctgcctatcagggtcccggcattccggaactactatcacccatgcgagacgctccctgcttgctgaaaaccaaggactggtggacctatgagttctgttacggccgtcacatccagcagtatcacatggaggatagcgagatcaaaggcgaggttctctaccttggctattaccagtctgcattcgactgggatgacgagacagctaaagcttcaaagcagcaccgactcaaaagataccacagccaaacctacgggaacggctccaagtgtgaccttaacgggcgcccaagagaagccgaagtcaggtttctctgcgatgagggcgctggtattagcggggattatattgatcgcgtggatgagccgcttagctgtagctatgtcctgacgatacgcactccacgtttatgtccacacccgcttcttcgtccccccccatcagcggccccacaagccatcctgtgccatccatccctccagcccgaggagtatatggcatacgtacagcggcaggccgattccaaacagtacggagacaagatcattgaagaattgcaggacctcggcccacaggtctggagtgagactaaaagcggagttgcaccacagaaaatggccggggccagtccgacaaaagacgactcgaaggattctgacttctggaaaatgttgaatgaacccgaggatcaagccccgggcggcgaggaagtgcccgcggaggagcaggatccaagcccggaagccgctgattctgcttccggagccccgaacgactttcagaataatgtacaggtcaaggttatccgaagccccgccgatctgattagatttatagaggaactgaaggggggaacaaagaaggggaagcccaacatcgggcaggagcagcctgtggatgacgctgccgaggtgccccaaagggagcccgaaaaggaaaggggagaccctgaacgccagcgcgagatggaagaagaggaagacgaagatgaagacgaagacgaggacgaggatgagcggcagctcctgggagagtttgagaaagagctcgagggaatactgctgccttccgacagggatagacttcggtctgagactgaaaaagagctggatcctgacggtctgaagaaggaatctgaacgcgatagagcaatgctcgccctgacaagcactctgaataagctcataaagcggcttgaagaaaaacagtcgcccgagttggtgaagaagcacaagaagaagcgcgtagtgcctaagaagccaccaccgtcaccgcagccgactgaggaagatcccgagcatcgtgtgagggtgagagtaactaagttacgcctgggtggtccaaatcaggaccttactgtactcgagatgaaaagagagaacccccagcttaaacagattgagggtcttgttaaagagctcctggagagagaaggtttaactgccgctgggaagatcgagatcaagattgttcggccctgggctgaaggcacagaggaaggtgcccgatggctgacagatgaagacactcgaaacctgaaggagatctttttcaatatccttgtccccggggccgaggaggctcagaaagagagacaaagacagaaggagctggaatccaactacaggagagtatggggatcgccagggggagaaggcacaggggaccttgatgagtttgatttttag

SEQ ID NO: 198262 - DNA, 1683 bp, synthetic construct
  misc_feature 1..1683: note = Description of Artificial Sequence: Synthetic coding sequence
  source 1..1683: mol_type = other DNA
atggccgccgagaccctgctgagcagcctgctgggcctgctgctgttgggacttctactgccagcctccctcaccggtggagtcggtagcctgaacctggaggagctcagtgagatgcgctacgggatcgagatcctcccgctgcctgtcatgggcggccagagtcagtcctctgacgtggtgatagtaagcagtaagtacaaacagaggtacgaatgccgcctaccggctggcgctatacatttccagagggaaagggaagaggaaactcccgcttatcaaggccctggaattcctgaacttctgtctcctatgagagatgccccatgcttgttgaagactaaggattggtggacatatgaattctgttatggaaggcacattcagcagtatcatatggaagacagtgagattaagggagaattcctgtgtgacgagggggccgggatctccggcgattacatcgatagggtggatgagcccttgagttgctcttacgttctgacaatcaggacaccgaggctgtgtccccatcctctgctccgccctcccccaagcgcagcccctcaggccatactgtgccatccttctctgcaacccgaagaatacatggcttatgtccaacgacaagccgactcaaagcagtacggagacaagattatagaagaacttcaggacctcggccctcaagtatggtccgagacaaaaagcggtgtcgcgccacagaaaatggctggagccagtcccaccaaggatgatagcaaggacagtgacttttggaaaatgctcaatgaacccgaggaccaagccccggggggggaggaggtgccggctgaggagcaggacccatcacccgaggctgcggatagtgcttctggagctccgaacgattttcagaacaatgtgcaagtgaaggtgatacggagcccagccgatctaataagatttattgaggagctgaagggtggtacaaagaagggaaagccaaacattgggcaggaacaaccggtcgacgacgccgccgaagtgcctcagcgtgagcctgaaaaggaaaggggcgacccagagaggcagagggaaatggaagaggaggaggatgaagacgaggacgaggacgaggacgaggatgagaggcagctgctgggcgagtttgaaaaagagctcgaaggcatcctgcttccctccgatcgggacagactacgatccgaagtcaaagcaggcatggagagagagcttgagaacattatccaagaaacagagaaagagctagaccctgacggtctgaagaaggagtcagagagagatcgcgctatgctggccctcacctccacactaaacaaacttatcaagaggctggaagagaaacagagcccagagctggtcaaaaagcacaagaaaaaaagagtggttcccaagaagccacctccctctccgcagccaaccggtaagatcgaaataaagatagtccgcccgtgggcagagggcactgaggaaggcgcccggtggctgaccgacgaagataccaggaatctgaaagagatattttttaatatacttgtgccaggcgctgaagaggctcagaaggagaggcagagacaaaaagagctggagtccaactaccggcgtgtatggggttcgccagggggtgagggaacaggcgacctcgacgagttcgatttctag

SEQ ID NO: 198263 - DNA, 1743 bp, synthetic construct
  misc_feature 1..1743: note = Description of Artificial Sequence: Synthetic coding sequence
  source 1..1743: mol_type = other DNA
atggccgccgagaccctgctgagcagcctgctgggcctgctgctgcttgggttgcttctcccggcttctctaaccggaggtgtgggcagcctcaacttggaggaattgagcgagatgagatatggtattgagatcctgccactgcctgtcatgggcggccagagtcagagctctgacgtggtgattgtctcatctaaatacaaacagaggtacgagtgccggctacccgctggggccatacactttcaacgtgaacgagaagaggaaactccagcttatcaaggacccggcatcccggaacttttgagtcctatgagagatgccccgtgcctcctgaagaccaaggattggtggacttatgagttctgctatggcaggcacattcagcagtaccatatggaggacagcgagatcaagggcgaggtcctgtacctcggctattaccagtcagcattcgattgggatgacgagactgcaaaatttctctgtgacgagggtgctggaataagcggcgattatatcgaccgtgtggatgagcccctctcttgctcctatgtactgaccatccgaactcccagactctgtccacaccccctgctgcgaccccctccatctgctgccccacaggcgatcttatgccacccgtctttgcaaccagaagagtacatggcctatgtgcagcggcaagccgtggatagcaagcagtatggcgataagattatcgaggagctgcaggatcttggaccacaggtgtggagtgagactaagagcggcgttgcccctcaaaaaatggctggcgcctcccccactaaagacgatagcaaggacagcgacttctggaagatgctgaatgaacccgaggaccaggccccgggcggggaggaggtgcccgctgaagagcaagatccctcaccagaagcggcggactctgcctccggggccccaaatgacttccaaaacaatgtacaagttaaggttatcaggagcccagcagacctgattagattcatcgaagagctgaagggtgggacaaagaagggcaagcctaatattggacaggagcaacctgttgatgacgcagcagaagtgccacaacgggaaccggagaaagagagaggcgatcctgaaagacagcgcgagatggaagaagaggaggacgaggacgaggacgaggatgaggacgaagacgagcgtcagttgttgggggagtttgagaaagagctggaaggaatcctgctgccgagtgatcgcgataggctgcggagcgaagtcaaagcaggcatggaaagagagcttgaaaacatcatccaagagacagaaaaagagctggatcccgacggcctcaagaaggaaagtgaacgcgatcgggcaatgcttgcactgactagcactcttaacaagctcatcaagaggctagaggagaagcagtcacccgaattggtaaaaaaacacaaaaagaagagggtggtcccaaaaaagccacccccttcaccacagccgaccgggaaaatagaaataaaaatagtgagaccatgggcagaaggcacagaagagggagcaaggtggctgacagacgaagacacacgcaacttgaaagagatattcttcaatatccttgtgcccggggctgaagaagcccagaaggagaggcagagacagaaggagttagaatccaactatcggcgtgtgtggggatcacccggaggcgaaggcactggtgatctagacgagtttgacttttag

SEQ ID NO: 198264 - DNA, 2004 bp, synthetic construct
  misc_feature 1..2004: note = Description of Artificial Sequence: Synthetic coding sequence
  source 1..2004: mol_type = other DNA
atggccgccgagaccctgctgagcagcctgctgggcctgctgctgctgggcctactgttgcctgcctcactgaccggaggagtcgggtctctgaacctggaggaactctccgagatgcggtacggcatagagatactgcctctgcctgtcatgggaggtcagtctcagtcctctgacgtagtcatcgtgtcaagcaagtataaacagcgctatgaatgtagactgccagcgggcgcaatccacttccagcgcgaacgcgaagaagagacaccagcttaccaaggtccaggcattccggagctgcttagtcccatgcgcgatgctccttgtctgctcaagacgaaagactggtggacctacgagttttgttatgggaggcatatccagcagtaccatatggaagattctgaaatcaaaggagaggtgttatatttaggatattatcagagcgccttcgattgggatgacgaaaccgccaaggcttctaaacagcacaggttaaagcgctatcattctcagacgtatgggaacggaagtaagtgtgacctgaacggccggccaagagaagcagaggtgcggttcctttgcgacgagggcgcgggaataagcggggattatatcgatcgggtagatgagcctttgtcttgctcctacgtactgactattcggacaccgcgcctctgtccccatccgttattacgacccccgccaagtgccgccccacaggctattttatgccatccctccttacaaccagaagaatacatggcgtacgtccagcgccaggctgattctaaacagtatggcgacaagatcattgaggaacttcaggacctggggcctcaagtgtggagcgaaacgaaaagcggagtcgctccgcagaaaatggccggggccagtcctactaaggatgactcaaaagattctgacttctggaaaatgttgaacgaaccggaagatcaagcccctggaggggaggaagtacctgctgaagaacaggatcccagccctgaggcagccgactctgcgtctggcgcacctaacgatttccagaataatgtgcaggtaaaggtgatcagaagccccgcagatctgattagattcatagaagaactcaaagggggtacgaagaagggaaaacccaatattgggcaggagcagcccgtcgacgatgccgctgaggtgccccagcgtgaacccgagaaggagagaggcgatcctgagagacagagggagatggaggaggaggaggatgaggacgaggatgaagacgaagatgaggacgagcgacaactgctgggggaatttgagaaagagttggaaggaattttactcccctctgacagggatcgattgcgcagcgaagtgaaggctggcatggagcgtgagctggaaaacatcatccaggagaccgaaaaagagctagatcccgatggcttaaagaaagaatcagaaagagatagggccatgctggcacttacttccaccctgaacaagttgatcaaacgactggaagagaagcagtcccccgaactagtgaagaagcataagaagaaacgggtagtcccaaagaagcccccgccttcaccgcagcctaccgaggaagatcccgagcatcgggtccgggtgagggtcacgaagctgcgactgggtggaccaaaccaggatctgacggtgttggagatgaaacgggagaatccccagctcaaacagatagagggccttgtaaaggaacttcttgaaagagaagggctgacggccgccggtaagattgagatcaagatcgtgaggccttgggccgagggcactgaggagggcgcacgctggcttaccgacgaggacacacgcaatctgaaagagatcttcttcaatatattggttccaggggctgaggaagctcagaaggagaggcagcggcagaaggagttagagtctaattaccgcagagtttggggaagtcccggcggcgaagggacgggcgacctggatgaattcgatttctag

SEQ ID NO: 198265 - DNA, 1794 bp, synthetic construct
  misc_feature 1..1794: note = Description of Artificial Sequence: Synthetic coding sequence
  source 1..1794: mol_type = other DNA
atggccgccgagaccctgctgagcagcctgctgggcctgctgctgctcgggctgttgctccccgctagcctgactggcggagttggctctctgaacctagaggaactgtccgagatgaggtatggaatagagatccttcctctgcctgtcatgggaggccagagccagtcttcggacgtggttatcgtaagcagtaagtacaagcagagatacgaatgtcgtttgcccgccggcgctatacactttcagcgagaaagggaggaagaaaccccagcatatcagggacctggaattcctgaattattatcccctatgcgtgatgcgccttgtctgctgaaaaccaaagattggtggacgtacgagttttgttatggaaggcatattcaacagtatcatatggaagacagtgagattaaaggcgaagtgctgtatctgggatactaccagtccgctttcgattgggatgatgaaactgcaaaggctagtaagcagcaccgtctgaaaaggtatcacagccaaacatacggcaatggttccaagtgtgatcttaatggacggcctagggaagccgaggtgagatttctgtgtgatgaaggcgcgggtatcagcggagactacatcgacagagtggatgaacccctaagctgctcatatgttctgacaatccgaacaccacgactgtgcccccaccccctactgcgtccgccccctagcgcagctccccaggcaatactctgtcaccctagcctgcaaccggaggagtacatggcttatgtacagcggcaagccgactccaaacaatatggcgataagatcatcgaagaactgcaagatctcggtccacaggtgtggtctgaaacaaagtcaggcgtggccccccagaaaatggccggtgcgagtccaaccaaagatgattctaaggactctgatttttggaagatgttgaacgagcctgaagaccaggcccccggcggcgaagaggtgccagcagaggagcaggatcctagccccgaggcagccgactcagctagcggtgctcccaacgatttccagaataacgtacaagtcaaagtgatccgaagtccagctgaccttatccggtttatcgaggaattgaaagggggcaccaaaaaggggaagcctaacatcggtcaggagcagcccgttgatgacgcagcagaagtgccccagagagaaccagaaaaagaacgtggcgaccccgagcggcagcgggagatggaggaggaagaggatgaagatgaagatgaggatgaagacgaagacgaacggcagctgttaggggagtttgaaaaagagctggagggaatcctgctgcccagcgatcgcgatagactgcgcagtgaaaccgagaaagagttggatcctgatggcttgaagaaggaaagtgagcgagaccgggccatgctggcattaacaagtacacttaacaaattaatcaagaggttggaagaaaaacagtcaccagagctggtgaagaaacacaagaagaagagagtggtgcccaaaaaacctccaccttctcctcaacccaccggcaagatcgagatcaagattgtgaggccctgggccgaagggactgaagagggggcgagatggctcacagacgaggacacacgcaacttaaaagagatcttttttaacatcctcgtcccaggggccgaggaggcccagaaagagcgccagcgacagaaggagctggagtcaaactacagacgagtgtgggggagtcccggaggggagggtacgggcgacctggacgaattcgatttctag

SEQ ID NO: 198266 - DNA, 1839 bp, synthetic construct
  misc_feature 1..1839: note = Description of Artificial Sequence: Synthetic coding sequence
  source 1..1839: mol_type = other DNA
atggccgccgagaccctgctgagcagcctgctgggcctgctgctgctagggctcctcctgcctgcttctttaactggcggagtcggcagcctgaacctagaggaactgagcgagatgaggtacgggatagaaatactgcccttgcccgtgatggggggccagagtcagtcttcggatgtcgtcattgtgagcagcaagtacaaacagagatatgagtgtcgtttgcccgcgggcgccatccattttcagcgagagagggaagaggagacaccagcataccagggaccagggatacccgagctcctctctcctatgagggacgccccttgtctgctcaaaacaaaagactggtggacatatgagttctgttacgggcgacacattcagcagtatcatatggaggactctgaaattaaaggagaggttctgtatttaggctactaccagtccgcctttgattgggatgacgagacagccaaggcctcaaagcaacatcgtcttaagcggtatcacagccagacttatggtaacggatctaaatgtgatctgaacggccggccacgggaggctgaagtaagattcctgtgcgatgagggggccgggatctcaggcgattacatcgaccgcgtggatgagcctctgtcttgctcatatgtgctcacaatccggaccccacgcctgtgcccccacccattgctgcgaccaccacctagcgccgccccccaagctatcctgtgtcacccaagtctgcaacctgaggaatatatggcttatgttcagcgccaggccgatagcaagcagtacggcgataagatcatcgaggagcttcaggatctcggccctcaggtgtggagcgagacaaaaagtggtgtggcaccacaaaagatggccggtgcttcgccaacaaaagatgattccaaagactccgatttctggaaaatgctgaatgagcctgaggaccaggcccctggtggagaagaggtcccagcggaagaacaggacccgagtccagaggccgctgactcagcgagcggagcaccaaacgattttcaaaacaatgtgcaggtaaaagtgatcaggtcacccgctgacctgattcggttcatagaggaattaaaaggaggcacaaaaaagggcaaacccaatattggtcaggagcaacccgtagatgacgccgctgaggtgccccaaagggagcccgaaaaagagaggggcgacccagagcgtcagagagaaatggaagaagaagaagatgaagatgaggatgaagatgaagatgaggacgagagacagctgctaggggagtttgaaaaagagctcgaaggaatactgctgccgagtgaccgcgataggctccgtagtgaagtgaaagcaggtatggagcgagagctggaaaatattattcaggaaacagagaaggagctggaccccgatggcctgaaaaaagaaagcgagagagaccgggccatgctggctctcacttctaccctcaacaagctcatcaagcgattagaagagaagcagtccccagaactggtgaaaaagcacaaaaagaaaagggtggttccgaaaaagcccccccctagcccccagcccactgggaagattgagatcaagatcgtcagaccttgggccgagggcacagaggagggagctagatggctgaccgacgaagacacccgcaaccttaaagaaattttcttcaatatcctggtgcctggagctgaagaggctcagaaagagagacagcggcagaaggaactcgagtctaactacaggcgggtttgggggtctccaggaggtgaaggcaccggagacctcgatgagtttgatttttag

SEQ ID NO: 198267 - DNA, 3462 bp, synthetic construct
  misc_feature 1..3462: note = Description of Artificial Sequence: Synthetic coding sequence
  source 1..3462: mol_type = other DNA
atgagccaggagcccaccacctacagcctgttcctgttcctgttcttatcccacggagtgtcgtcttatacggtgcccaattcacgtcaggatctccatcctcttctgcagaatatggcagaagaaatcattgacggatcgtatctaaatgcacttctggatttaatacagttccagtcctcgcacgtgtggaccgatgacctgtcccatcgggtacttgcatacctgaactctaggaacgtggcctttaccatccccagcctccaggccgcagtggagaatcacctggagcagcggttgcatcaacctcagaagctgctagaagacctgagaaaaacggacgcacagcaatttcggaccgcgatgaagtgccttctggaggacaaaaaagacggtctcgacttaaaggatatcatcatcgaccttggggagattcgcgaaagagcgctgcagtctcctggcgttaatagaagcttgtttcttatcaccctcgaacggtgctttcaaatgctgaattcactggaatgcgtggaaatactgggcaaggttctcagaggcagttctggcagcttcctgcagcctgatatcaccgaaagactgcctagagacctgagggaggatgcatttaaaaacctgagtgctgtgttcaaggacctgtacgataaaacttcagcgcacagtcagcgggccctctattcgtggatgactggtattttacaaacatccagcaacgccacggatgactccgccagttgggtatccgccgagcacctgtgggtcttaggccggtatatggtgcatctcagctttgaagaaatcaccaaaatatccccaatagagataggtctcttcatatcttacgataacgccacaaaacagttagatatggtttatgatatcactccagaactggcccaggcttttctggaaagaatatcctcgtccaatttcaacatgcgcaatacaagcacaatccaccggcaagctcatgagctctgggcgctcgaaccttttccaaagatgttaggactactcgtgtgtttttacaatgacctagaattactggatgccaccgtagcgcaagtgttgctttaccagatgataaaatgttcccacctgagaggcttccaggcgggagtgcagaagctaaaagccgaactactggatatagcaatggagaaccagaccttgaacgaaacacttgggtccctgtccgacgcggttgtaggtctaacctactctcagctggagagcctcagtccagaggccgttcacggagcaatttcaacgttaaaccaggtctcaggctgggctaaatcccaggtgatcatcctgtctgcaaaatacctggcacacgagaaggtgctgagcttctacaacgtgagtcagatgggggccctcctggctggggtatctacacaagcgttctgctctatgaagagaaaggatatctcacaggttttacgtagcgccgtatctcagtacgtcagtgatctgtcccccgcacagcaacagggcattttgtctaagatggtgcaggcggaggacacggcacccggtatcgtggaaatacagggcgccttttttaaagaggtgtctctgtttgacctgcgccgccaacctgggtttaactctacagtgcttaaggataaagagttggggaggagtcaggcactctttctgtatgagttgctgcttaagaccacgcgcagacccgaagaacttctgtccgcaggacaactagtcaagggagtgacatgttctcacattgacgcgatgtctaccgattttttcttagctcactttcaggattttcaaaacaatttcgccctgttgtcgccctatcaggtgaactgccttgcttggaaatactgggaagttagcaggctgagcatgcctcccttcttgctggccgccctgccagcccgatacctggcatcggtccctgctagtcagtgtgtgccattcctgatcagcctgggcaagagctggcttgattcactcgtgctagacagccacaagaaaacgagcgtactaagaaaagtacagcagtgtctggacgattctattgccgatgagtacactgttgacatcatgggaaaccttctgtgtcatctccctgctgccatcatcgatagaggaatctcccctcgggcgtgggccactgccctgcatggacttagggattgtcccgacctgaaccctgagcagaaggctgctgttcggctgaagctgctggggcagtacggtcttccccagcactggaccgcagaaaccaccaaagatttaggcccatttttagtcctgttcagtggcgacgagctctcgagtatcgcaaccaagttcccagagattctgttacaagccgcttccaagatggcaaggacgctgcccaccaaggaattcctatgggcagtgtttcagtctgtacgaaactctagtgacaagattcccagctatgaccctatgcccgggtgccacggggttgtggctcctagctcagatgacatctttaagctggcagaagcaaacgcctgctgggccctggaagatctgcggtgcatggaagaagatactttcatccggacagtcgagctcctcggagccgttcagggattcagtcgacctcagttgatgacactgaaagagaaagctattcaggtttgggatatgccatcctattggcgcgagcatcatattgtgtctctgggtcgtattgcactggcactgaatgagtccgagcttgaacagctggatttgtcctctatcgacaccgtagccagtctctcctggcagactgaatggaccccgggtcaagccgaaagtattctgcagggctacctggacgacagcggctacagcatccaagatctaaagtccttccacctggtgggactgggcgcgaccctgtgcgccattaatataaccgagattccacttatcaagatctcagaattccgggtcgttgttgccaggattggaactctgctatgttctacccacgtgctcgccgagttcaaaaggaaggcagaggttgtctttggagatccaacagagtggacctccagtgtcctccaggaactggggaccatcgctgccggactcaccaaggccgaactgagaatgctggataaggatctgatgccttattttcagcccagcgccatcaagtgtctcccagatgagatattcaaggaactgagcgctgaacagattgcctcactgggccctgagaatgccgccgctgtgactcacgcacagaggagacgcctaagccctcttcagctgcagagccttcagcaggctctagacggcgccaagactcacagctggcaagatgcacccgcgagcgccgggcctacacggacttcttcaagcagatctccagcaggggctttgcaatcatgggggctctggcttggctgccccctgctggtgctgatggcgaagttgctgtggtag

SEQ ID NO: 198268 - DNA, 1647 bp, synthetic construct
  misc_feature 1..1647: note = Description of Artificial Sequence: Synthetic coding sequence
  source 1..1647: mol_type = other DNA
ccccgggccgtgtgggtggaggcccggggcggcgcccagcaccccacaatgagacgaactgctccactgcaccgaggcacctggtctaaaatgtccatcatactcagagccaggtacttagcatccgtgccggccagccagtgtgtcccctttctgatctccctcggcaagagttggctggacagtctggtgctggatagccacaagaagacctccgtactgcgcaaggtacagcagtgcttagatgacagcatagctgacgaatacactgttgatatcatgggcaatctgctgtgccatcttcccgcagcaatcattgataggggaattagtcctagagcatgggccaccgcactacatggcctgagagactgcccagatctgaacccagagcagaaagcggcagtgcgtcttaaactcctcggccagtacggtctcccacagcactggaccgctgagaccacaaaagaccttggtccttttctcgtactcttcagcggagatgagctgagctctatcgctaccaagttcccggagattctgttgcaggctgcctctaaaatggcccggacattgcccactaaggagttcctgtgggcggtgtttcagtccgtccgaaacagcagtgacaagattccgtcctatgatcccatgccgggctgccacggggtcgtcgccccctcttcagatgatatcttcaaactggccgaagctaacgcctgctgggccctggaggatctccggtgtatggaggaggatacattcattcgaacagtcgagctgcttggcgccgtgcaggggttttcacgcccacagctgatgacgctgaaggaaaaggctatacaagtgtgggacatgccttcatattggagggagcatcatatcgtctctttgggccgcatcgcgctggcccttaatgaatccgaactggaacagttagatctctccagcatcgatacagtggccagcctaagttggcagaccgaatggactccagggcaggcagaatcaatcctgcagggttacctggacgacagcggctatagcattcaggaccttaagagctttcacctggttggcctcggggccactctgtgcgcaatcaatatcaccgaaatccctcttattaaaatttctgaattccgcgttgtagtggccaggattgggaccctcctgtgtagtacccacgtcctggccgaatttaaacggaaggccgaggtcgtgttcggcgatcccacagaatggacctcatcagtccttcaagaacttggtaccatagccgccgggctcacaaaggcagagctccgaatgcttgacaaggatctgatgccttactttcagcctagtgctatcaaatgtctgccagatgagatttttaaggagctgagcgcagagcagatcgctagtttaggtcccgaaaacgctgcggcagtgacccatgcccagaggcgaagacttagcccactccaattgcagtccctccaacaggccctggatggagccaaaacacattcctggcaggacgcccccgcctcagcgggacctacccggacctcaagttcgcggtctcccgcaggggccctccagagctgggggctctggctggggtgtccgcttctggttttgatggcaaaactcctttggtag

SEQ ID NO: 198269 - DNA, 3183 bp, synthetic construct
  misc_feature 1..3183: note = Description of Artificial Sequence: Synthetic coding sequence
  source 1..3183: mol_type = other DNA
atgggcaacagcatcacctaccgggaccaggccgccgtggagaaccacctagaacagaggctccaccagccacaaaaactgttggaagatctgcgaaaaactgacgcacagcaatttaggactgctatgaagtgtctgcttgaggacaagaaggatgggctggacttgaaggacattatcatcgacctaggggaaatccgagagcgtgccctgcagagtcctggggtgaaccgctcactcttcttgatcaccctggaaaggtgcttccagatgctgaattccctggagtgtgtcgaaatcttaggtaaggtactcagaggatcttctgggagcttcttgcagcccgacataacagagagactgccaagggatcttagagaagacgcattcaagaacctctcagcagttttcaaggacttatacgacaaaacgtccgcccattcacaaagagcgctgtactcctggatgaccggcattctacagacatcttccaatgccacagatgactcagccagttgggtgagcgccgagcatctgtgggtcctgggtaggtacatggtgcacctgtccttcgaagagattaccaaaatcagccctatagagatcggcctgtttatttcttatgataacgcgacaaagcagctggatatggtgtacgacataactcctgagctggctcaggcgtttctggaaagaatttcttcctccaacttcaacatgaggaacacgtccaccattcacagacttggactccttgtttgcttctacaatgatctggaacttctcgatgcaactgtcgcccaagtgctgctctatcagatgattaagtgtagccacctgcgggggttccaggccggggtccagaagcttaaagcggaactactggatatcgccatggaaaaccaaacccttaacgagaccttagggtcactgagcgatgcggtggtcggcctgacttattcacagctggagtcattgagccctgaggccgttcatggagcaatcagcacactgaaccaggtctcagggtgggcaaaaagccaggtcattatattaagcgccaaatacttggcacacgagaaggttctctcattttacaacgtgtcccagatgggcgcactgctggcgggggtcagcactcaggcgttctgttcgatgaagagaaaggacatttcccaagtgttgagatcagccgtgtcacagtatgtgtctgacctgtcacccgctcaacaacaaggtattctctctaagatggtgcaggccgaggacacagcccccggtatcgtcgagatacagggtgctttcttcaaggaggtgtccctctttgatctaagacgccagcctggatttaatagcaccgtgctcaaggataaagaacttggccggtctcaggcgctgttcctgtacgaactcctcttgaagaccacgagacgcccagaggaactcctgtcggcaggccaactagtgaaaggagtcacgtgcagccatattgacgccatgagtaccgacttctttttggcccatttccaggatttccagaataattttgccctgctcagcccctatcaggtgaactgcttagcgtggaagtactgggaggtgagccgcctgtctatgccccctttcttgctcgcagcccttcccgctaggtacctcgcaagcgtgcctgcatcccagtgtgttccttttctgatttctctgggaaagtcgtggctcgactctctagtgttggatagccacaaaaagaccagcgtgctacgcaaggtgcaacaatgtttggatgattctattgccgacgaatacaccgttgacatcatgggcaatcttctgtgccatctgcctgctgctatcatcgaccggggcatcagcccccgagcatgggcaaccgctctacacggcctgagggactgccctgacctgaatccagaacaaaaggcggccgtacggctcaaactgcttggacaatacggtttaccccagcactggacagccgagacgaccaaggatttggggcctttccttgtccttttttcgggtgatgaactctcaagtattgcaaccaagtttccggagatcctactccaggcagcttctaaaatggcacgaacactcccgactaaggaatttctgtgggccgtgttccaatctgtgaggaactcttccgataagattccctcctacgatcccatgcctggctgtcacggtgtcgtcgctcctagttctgacgatatttttaagctggctgaagcgaatgcatgctgggccctcgaagatctgcgttgcatggaagaagacacctttatccggacagtggaactcctcggcgcagtccaaggcttctcacgaccacagctcatgaccctgaaggaaaaggccattcaggtgtgggacatgcctagttactggcgcgaacaccatatagtgtccctggggagaattgctctggccttgaatgagtccgaacttgagcagttagacctgagcagcattgacactgtcgcaagcctgtcatggcagactgaatggactccaggccaggcagaatcaatactgcaagggtacctggacgactccggctattccattcaagatctcaagtcatttcatctggtgggcctaggggccacactatgcgctattaatattaccgagataccactgatcaaaatctccgagtttagggtcgtggtcgcaagaatcgggaccctgctctgttcaacccatgttctggccgaatttaaacgaaaggcagaagtagtattcggagatccaacagagtggacgtcatcagttttgcaagagctcggtactatcgccgcagggctgacgaaggccgagctgcgcatgttagataaggatctaatgccatatttccaaccctccgcaatcaaatgtctgcctgatgagatcttcaaagagctaagcgctgagcagattgcgtcgctgggcccagagaatgcagcagccgtgacccacgcgcagagaaggaggctaagcccactccagctgcagtctctgcaacaggccctggatggggctaagacacattcctggcaggatgctccggcttccgcaggccccactaggaccagttcttctaggagcccagccggtgccctccagagttggggcctgtggctaggctgcccactccttgtgctgatggccaaattgctctggtag

SEQ ID NO: 198270 - DNA, 2448 bp, synthetic construct
  misc_feature 1..2448: note = Description of Artificial Sequence: Synthetic coding sequence
  source 1..2448: mol_type = other DNA
atgttccggctgggcctgctggtgtgcttctacaacgacctggagctgctcgacgccaccgtggctcaagtgctgttgtatcagatgataaaatgttcccatctgcggggattccaggcaggcgtgcagaagcttaaagccgagctgctagatattgccatggagaaccagaccctcaacgagacactagggtctcttagcgacgctgtcgtgggtctcacctactcccagcttgaatctctttctccagaagctgtgcacggagcgatatctaccctcaaccaggtgtcggggtgggccaaatcacaagtgatcatcctgtctgccaagtacctggcacacgaaaaggtcctgtcattttacaatgtgtcccagatgggcgccctccttgctggagtgtcaacgcaggccttttgctcaatgaaacgcaaggatatcagtcaggttcttcggtccgccgtaagtcaatatgttagcgacctgtcaccagcgcaacaacaaggcattctgtccaagatggtacaggcggaggatacagcaccaggtatcgtggagattcagggtgctttctttaaagaagtgagcctgttcgatctgagacgccagcccggattcaactctaccgtactgaaggacaaggaactcggtcgctcgcaagccctcttcctgtatgagctcctcctgaaaacaactcgcagacccgaagagttgctttcagcaggccagttagtgaagggagtaacttgttcacacattgatgcgatgtccacggatttttttctggcccattttcaggatttccagaataacttcgctctgctgagcccttatcaggtcaattgcctcgcttggaaatactgggaagtgtctaggttatctatgcccccttttttgttggccgccctcccggctcgttacctggcttctgtgcccgcatcccaatgtgtgccatttttgataagcctcgggaaaagctggctcgactccctggtgctggactcccataaaaaaacctcagttctgcggaaggttcagcaatgcctggacgattctatcgccgatgagtacacagtagatatcatggggaatttgctctgccacctccccgccgctattattgaccgaggaataagccctagagcttgggccacagcgctccatggcctccgagattgtccagatttaaatccagagcaaaaggccgccgtgcgcctgaagctgctgggacagtatgggctgccccaacattggacagccgaaactacaaaagacttgggaccgtttcttgtcctgtttagcggggacgagctgtcgtctattgctactaaatttcctgagatcctgctgcaggctgcgagtaagatggcgagaacactgcccactaaagagtttctatgggccgtattccagagcgtcaggaacagtagcgataaaattccctcctacgatccaatgccaggttgtcatggagtggtggcccccagtagtgatgatatttttaaactggcagaagctaatgcatgttgggcactggaggatctgcgatgcatggaggaggatacatttattcgtacagtggaactcctcggagccgtgcaaggtttttcacgcccccaattgatgaccctgaaggaaaaagccattcaggtgtgggacatgccttcctactggagagagcaccacatcgtgtccctaggacggatagcactcgcacttaatgaaagtgagctggaacagctggatctttcttccattgatacagtcgcatccttgagctggcagacagagtggacaccggggcaggccgagtccatactccagggctacctggatgatagcgggtatagcattcaggacctgaagagttttcatctagtcggattgggcgcaacgctttgtgctattaatatcacagaaatacccttgattaagatttccgagtttagagtggttgtggccaggattggcacactcctgtgctccactcatgtgctcgccgagtttaaacggaaggccgaagtcgtgttcggagaccccactgagtggacctcttcggtgctacaggagttaggcaccattgccgccggccttaccaaagccgaactgcggatgctggacaaggacctcatgccctatttccagccctcagcgatcaagtgtctgcccgacgagatcttcaaggagctcagcgccgaacaaattgcctcgttagggcctgaaaatgcagccgcggtaacgcatgcccagcgtaggagactctcacccctgcaactacagtcactacagcaggccctggatggggccaagacacactcatggcaggatgcccctgcatctgccggacctacgaggacctcttcttcaagaagcccagcaggagctctgcagtcttgggggctgtggcttgggtgtccactgctggtgctcatggcaaaacttttatggtag

SEQ ID NO: 198271 - DNA, 3420 bp, synthetic construct
  misc_feature 1..3420: note = Description of Artificial Sequence: Synthetic coding sequence
  source 1..3420: mol_type = other DNA
atgagccaggagcccaccacctacagcctgttcctgttcctgttcctgagtcatggggtgagcagctacaccgtcccaaatagtcgtcaggatctgcacccgctcctccagaatatggctgaggaaataatcgacgggtcttatctcaatgccctcttggaccttattcagtttcaatcttcgcatgtgtggaccgacgacttgtctcatagggtgctagcctatcttaattctcgcaacgtcgcttttaccattcccagtcttcaagccgctgtggagaaccacttagagcagagactccaccagccacagaagctgttagaggatttgcgaaagaccgatgcccaacagttccgcaccgctatgaagtgcctgctcgaggataagaaggacggcctcgatctcaaggatatcattattgacctgggtgaaattcgcgaacgggctctccaatccccaggcgtgaatagatctttatttctgataactttagagcggtgcttccagatgctaaacagtctggagtgcgtcgaaattttgggcaaggtcttgcggggcagcagcgggagcttcctacaacccgacattacagagcgactccctcgcgacctccgcgaggatgcattcaaaaacctgtcagctgtcttcaaggatctgtatgacaagactagcgcccatagtcagcgcgcactgtactcatggatgaccggcatactacagacgagctctaatgccacggatgatagtgcatcttgggtgtccgccgaacatctctgggtgctgggtaggtacatggttcatctttcgttcgaggaaataaccaagatttcccccatcgagatcggcctttttatttcttatgataacgccacgaagcagcttgacatggtatatgatataactcccgagctcgcgcaggccttcctcgaaaggatcagtagttctaatttcaacatgagaaatacgagtaccatacacagattggggttacttgtttgcttctacaatgatttagagctccttgatgccactgtagcccaggtcctcttataccagatgattaagtgctcccatctcagaggctttcaggctggcgtacagaaactcaaagcagagcttcttgacatcgccatggaaaatcagacattgaacgagacacttggttccctgagtgacgcggtggtgggactgacatactcccagctggaatcattgagccccgaggcagtgcatggagccatttctacgctgaaccaggtcagcgggtgggccaaatcccaggtcatcattttgagcgcaaagtaccttgcacacgagaaggtactatctttctataacgtatcacaaatgggggctctactagccggcgtgtccacccaagctttctgctctatgaagcggaaggacatttcgcaagtgctccgaagcgctgtgagccagtacgtcagcgacctctccccagcccagcagcaaggaattttgtcgaagatggttcaggctgaagacaccgcaccaggaattgttgaaattcagggagcttttttcaaggaggtttctctttttgatctaaggagacaaccaggctttaactccactgtattgaaagacaaagagctgggcagaagccaggcgctctttctatatgaacttctgctaaagaccacccgccggcctgaggaactgctgtccgctggtcagctggtcaagggagtgacatgttcccatatagacgcgatgtctaccgactttttcctggcccactttcaagatttccagaacaacttcgcactcctttccccgtaccaggtcaactgtctcgcctggaagtactgggaggtgagccgacttagcatgcccccgttcctgcttgccgctttacccgcacgatacctggccagtgttccggcaagtcagtgcgtccctttcctcatttcactcggcaaatcctggctcgacagcctcgtgctggatagccacaaaaaaactagcgtcctgaggaaagtccagcaatgccttgatgacagtatcgctgacgagtatacggtggacattatgggcaatttgttgtgtcacctgccagctgcaatcatcgatcgcggaatctcgcctagagcctgggccactgcactacacggcctgagggactgtccagacttgaatcccgaacagaaggctgctgttagactcaaacttttagggcagtatggtctgcctcaacactggactgctgagactacgaaagacttaggcccttttttagtgttgttttctggcgacgaactctcatctatcgcaacgaaatttccagaaatcttattgcaagcagcttctaagatggctagaactctacccacaaaggagtttctctgggcagtgtttcagagcgtcaggaattcatcagacaagatacccagttacgatcctatgcctggctgccatggcgtggtggctccctcctcagatgacattttcaagctggcggaggctaatgcgtgctgggcgctcgaagacctcaggtgtatggaggaagacacctttataagaaccgtggagctcctaggcgccgtgcaaggtttcagcaggcctcaactcatgaccctgaaggagaaggctattcaggtgtgggacatgccatcctactggagagagcaccacattgtgtcactcggccggattgcccttgccctgaacgagtctgagcttgagcagttggacctgtccagcatagacactgtagcgtcactgtcctggcagaccgaatggactcctggacaagcagagagcattctccagggctaccttgacgactccgggtattccatccaggacctcaaatcttttcatctggtgggtctcggcgccactctttgcgccatcaacataactgaaattcctttaatcaaaatttctgagtttagggtcgtcgtggccaggatcggcaccctgttgtgttctacacacgtcttggcggaatttaagaggaaggccgaagtggtgtttggcgacccgacagaatggaccagttcagtgctgcaggagctcgggacaatcgctgctggtctaactaaggcagagttgcgaatgttagacaaggaccttatgccatatttccaaccctccgcaattaaatgcctccccgacgagatcttcaaagagctgagcgcagagcagattgcgagcttggggccagagaatgctgcggcagtgactcacgctcagagaagacgcttatctcctttgcagcttcagtctttgcagcaggctctggatggggctaagacccatagctggcaggacgctccggcatcagcaggcccgacccgaactagcagttcacggagtcccgcaggcgccctgcagtcgtgggggctgtggcttggctgtcctctcctggtattgatggccaagctgctgtggtag

SEQ ID NO: 198272 - DNA, 1434 bp, synthetic construct
  misc_feature 1..1434: note = Description of Artificial Sequence: Synthetic coding sequence
  source 1..1434: mol_type = other DNA
atgatcgccttcctgctgaccagcgtgctgatgatcccccacgccggaggacacccactcgatacaccacacctgcctcaggaactccccccaggactgcccaataacattaacataacatttttcagcgggatgtttaagaatgttgagagtgtcgccgaaatttttgactgtctgggtccgcactttacttggctccaggccgtatttacaaactttcccgtgttaatacagttcgtaaatggaatgaagtgcgtggctggactgtgcccacgagactttgaggattacgggtgtacttgtaggttcgagatggagggtctgccggtggatgagtccgatagttgctgctttcagcatcgcaggtgttatgaggaggccgctgagatggattgccttcaagaccctgcgaagctatcaactgaggtgaattgtgtgtccaaaaaaatcatttgcgaatcgaaggataattgtgaacatttactctgcacatgcgacaaagctgccattgaatgtctcgccagatcctcactaaactccagcctcaatctgttggacacttctttttgccttgcccagacaccggagacaacaatcaaggaagatttgactacgttgctcccgcgggttgtacccgtcgaacccactgacaccagcctgacagcgctgtccggagaagaggccggacatgatcaggaaggtgtgggcgcggctagagcgaccagcccaccaggctccgccgagatagtcgccactcgcgtcaccgcaaagatagtcaccctggtgcctgctggtatcaagagcctcggcctggccgtgagcagtgttgagaatgaccctgaggagaccacagagaaggcatgcgaccgattcacttttctgcatttaggctccggagacaatatgcaagttatgccccagctgggcgaaatgttgttttgtctaacctccaggtgcccagaagagtttgaatcttatggctgttactgcggacaagagggtcgaggcgagcctcgcgatgacttggaccggtgctgtctatcccatcactgctgcctggagcaggtgagaagactgggctgtctgctcgaaagactcccgtggtcccctgttgtgtgcgtggaccatacacccaaatgtggagggcagtctctgtgtgaaaagcttctgtgcgcctgcgatcagactgctgcagagtgcatgacctccgcctcctttaaccagagtctcaaatccccgtccagacttggctgccccggacaaccagccgcctgcgaggatagtctccaccctgtaccagccgcccctacgttgggatcgagtagtgaagaggattctgaggaggatccccctcaggaagacttgggccgggccaagaggttcctcagaaagagcctcgggcccctcggaatcggcccgctgcacggccgatag

SEQ ID NO: 198273 - DNA, 1482 bp, synthetic construct
  misc_feature 1..1482: note = Description of Artificial Sequence: Synthetic coding sequence
  source 1..1482: mol_type = other DNA
atgatcgccttcctgctgaccagcgtgctgatgatcccccacgccggggggcatccactggacaccccccacctgccccaggagttacccccgggcctgccaaataatatcaacatcacctttttctctggaatgtttaagaatgtggaatcagtggcggaaattttcgactgcttaggacctcattttacatggctgcaagcggtgttcactaactttcccgtgctgatccagttcgtgaacggtatgaagtgtgttgctggactgtgtcctagggacttcgaggattacggttgcacatgcagatttgagatggagggtctgcctgttgacgagagtgattcttgctgtttccagcatcgccggtgctatgaggaggcggcagaaatggattgtctgcaagacccagccaaactgagcaccgaggtgaattgcgtctctaaaaagatcatttgcgagagcaaagacaactgtgagcacctgctgtgcacctgcgacaaggcggcgattgaatgcttggctaggtcttctctaaactcatctcttaacctccttgacacatctttctgtctcgcccagacacccgaaaccaccatcaaagaagacctcacgacactgctacctagggtagtgcctgttgagcccaccgacacttctcttacagcgttaagcggggaggtcgccgccgaaacagaagcagaccgcctcatcacactcagcaaaaagaaggcagggcacgatcaggagggcgtgggcgccgcccgagcgacatctccccctggatctgccgagattgtggccacgcgcgtcacagcaaaaattgtgactctcgttccagctggcattaagtccctggggttagcggtaagtagtgtggagaacgacccagaggagaccaccgaaaaagcatgtgacaggttcaccttcctccacttgggcagtggagataatatgcaagtcatgcctcaactcggggaaatgctgttctgcctcacaagcagatgtcctgaagaattcgagtcatatggatgctactgtggtcaggaggggcggggggaaccacgtgacgatctagacaggtgttgcctgtcacaccactgttgcctagaacaagtcaggcgactgggctgcctcctggaaagattgccttggagccccgtcgtgtgtgtggatcatacacctaaatgtggggggcagagcctgtgtgagaaattgctttgtgcttgcgaccaaactgccgctgagtgcatgacatccgcctcgttcaaccagtctttgaagagcccgagccggcttggatgtcctggtcaaccagcagcgtgcgaagacagcctgcaccccgttcctgccgcgccaaccctcggctccagcagcgaggaggattctgaggaggacccccctcaagaggacctcgggcgcgcaaaaaggttcctgcgtaagtcactggggccgctgggtattgggcccctgcacggccggtag

SEQ ID NO: 198274 - DNA, 5994 bp, synthetic construct
  misc_feature 1..5994: note = Description of Artificial Sequence: Synthetic coding sequence
  source 1..5994: mol_type = other DNA
atggccctgctgatccacctgaagaccgtgagcgagctgcggggccggggtgacaggattgccaaagtgacgttccgaggtcagtctttttactcccgggtattggagaattgtgaagacgtcgccgacttcgatgagacttttcggtggcccgttgccagctctattgacaggaacgaaatgttagagattcaagtatttaactattcaaaagttttctcaaacaagttaatagggacattcaggatggtgctgcagaaggtagtcgaagagagccacgtagaagttacggatactctcattgacgataataacgctattataaagacatccctctgtgtcgaggtccgctaccaggcgacagacggcacggtggggagctgggatgacggcgatttcttgggcgatgaaagcctccaggaagaagaaaaagattcacaggaaacggatggcctcctgcccggttcaaggccctcctcacgaccaccgggtgaaaagtccttccgtcgcgcaggccgaagtgtgttcagtgccatgaagctaggaaagaataggagccacaaagaagaaccacagagaccagacgaacccgccgtactagagatggaggacctggatcacctggctatcagactgggcgatgggttggaccctgatagtgtgagcctcgcctccgttacagcgttgaccacaaatgtatcaaacaaaaggtctaaaccggacattaaaatggagccctccgcagggcgtcccatggactatcaggtgtcaatcacagtcatcgaggccagacagctcgtcgggttgaatatggatcccgtagtttgtgtggaagtaggagacgataagaaatatacatctatgaaggaaagtactaactgtccatattataatgaatactttgtgttcgactttcatgtaagccctgatgttatgttcgacaagataatcaagatttcggtgatccatagcaaaaaccttctaaggtccggtactctggtgggatccttcaaaatggacgtgggtacggtgtattcacagcctgagcatcagttccaccacaagtgggcgatcctgtccgacccagacgacattagtagcggtcttaaaggatatgtaaagtgcgacgtcgctgtagtcggaaagggcgacaacatcaagaccccccataaggctaacgagacagatgaggatgatatcgagggaaatctgctgttaccagaaggcgttccaccagaacggcagtgggctagattctacgtcaaaatttacagagcagagggtctgccgcgcatgaatactagtcttatggccaatgtgaaaaaggcatttattggcgaaaacaaagacctcgttgacccttatgtccaggtattcttcgccgggcaaaaagggaagacgtccgtgcagaagtcgagctacgaacccctgtggaacgagcaagtggtgtttaccgatttattcccaccactgtgcaagcgaatgaaagtgcagattcgggactccgataaagtgaacgacgtggccatcgggacacatttcatcgatctgagaaaaattagtaacgacggagacaaggggttcttaccaactctgggtccagcatgggtcaacatgtatggctccaccaggaattacaccttgctagacgagcaccaggacttgaacgaagggttgggggagggcgttagctttcgggctcgtttactgttaggtctggccgttgagatagtggacacgtccaatccagagctgaccagcagcacagaggttcaggtggagcaagctactccaatttcagaaagctgtgccggtaagatggaagagttttttctttttggagccttccttgaagcctccatgattgatagacgaaacggcgataagccaattacattcgaggttactatcggcaactatggcaatgaagtagacggcctatcccggccacagaggcctagaccacggaaagaacccggagatgaggaagaggttgacctcattcagaatgcatccgatgacgaagccggcgatgccggagatctggcgtccgtgtcatctaccccccctatgcggccacaggtgaccgatcgaaattacttccacctaccgtacctcgagcggaaaccctgtatttacataaaatcctggtggcccgaccaaagaaggcgactgtacaacgcgaatatcatggatcatatcgcagacaagctggaagaggggcttaacgacatccaggagatgatcaagacagaaaagtcctaccccgaaagaagattgagaggtgtgctggaagaactatcatgcgggtgttgtcgcttcctgtcactggcagacaaggatcagggccacagctcacgaaccagactggacagggaaagactgaagtcatgcatgagggagttagaaaatatgggccagcaagccagaatgctcagggcccaggtcaagagacacaccgtgcgggacaaacttcggttgtgtcagaacttccttcagaagctcagattcttggccgatgagccacagcattctatcccagacatatttatatggatgatgtcaaacaacaagagggtcgcctacgctagagttccctccaaggatctgctgtttagcatcgtggaggaggagaccggaaaagactgtgccaaggtgaagaccttgttcttgaagctgcccggcaagagaggcttcggaagcgcaggatggacggttcaggccaaggtggaactttacctttggttgggactgtctaagcagcgtaaggagtttctgtgcggtctgccttgcgggtttcaggaagtcaaggccgcacaggggttgggactgcacgccttccccccagtctccctcgtttatacaaagaaacaggcttttcagctccgggcacacatgtatcaggccaggagcctgtttgcggccgattccagtgggctttctgacccttttgccagggtgttcttcataaaccagagccagtgtaccgaggttctcaacgagaccctatgccccacctgggaccaaatgctcgtgttcgacaatttggagctgtacggtgaagcacacgagttgagagatgacccacctatcatcgtaatcgaaatctatgatcaggactcaatggggaaggctgactttatgggacggaccttcgccaagcctctcgtcaagatggcagacgaggcatactgcccccctagattcccccctcagctggagtattatcagatctatcgcggaaacgccactgcaggcgacctcctcgcggctttcgaactgctgcagatcggcccagccggcaaagcggatcttccccctattaacggtcccgtggacgtcgaccgtggtcctataatgcccgtgcctatgggtatcagacctgtccttagcaagtatcgggtggaggtgctcttttgggggctcagggacctcaagcgcgtaaatctggctcaggttgaccggccgcgagtggacattgagtgcgcaggtaagggtgtccagtcatcactcattcacaattacaagaaaaaccctaatttcaacaccctagtaaaatggttcgaagtggatcttcctgaaaacgagcttctccaccccccattgaacatccgagtggtcgattgtagagcctttgggaggtataccctggtagggagtcacgccgtcagctctctcaggcggttcatttaccgacctcccgaccggagcgcccctagctggaacaccacagtgagattactacgtagatgccgagtactgtgtaacgggggctccagctctcactccaccggcgaagtcgttgtaacaatggagccggaagttcccatcaagaaactcgagacgatggtaaagctcgatgccaccagcgaagcagttgtgaaagtagatgttgccgaggaagaaaaagagaaaaagaagaagaaaaaaggtacagctgaagaacctgaagaagaggaacccgacgaatccatgttagactggtggtcaaagtatttcgcttcgatcgacactatgaaagagcagctaaggcagcaggagccttcggggattgatctggaagagaaagaagaggtggacaacaccgaaggattgaagggcagcatgaaaggaaaggaaaaagctcgcgcagccaaagaggaaaaaaagaaaaagacacagtcttctggatccgggcaaggctctgaggcccccgagaagaagaagccaaagattgatgagctgaaggtctaccccaaagagctcgaatccgagtttgacaatttcgaagattggctgcacactttcaatctccttcggggaaagaccggcgacgatgaagacggatccactgaggaagaaagaatagttggcagattcaaagggtctttatgtgtgtataaggttcctctgcctgaggatgtctctcgtgaagccggctacgattccacctatggcatgttccagggaattccgtcgaacgatccgataaatgtgctggtgagggtttacgtggtgcgagccacggatctgcatcctgcggatattaacggaaaggctgacccctacatcgctattcgactcgggaagacagatattcgagataaggagaactatatctcaaagcaactcaaccccgtgtttggcaagtccttcgacatcgaagcctcattccccatggaatccatgctaacggtggccgtgtatgactgggacctggtcgggacagatgacctgatcggcgagaccaaaattgacttagaaaaccgcttctattcaaagcaccgagccacatgtggcattgcacagacctactcgacacacgggtataatatttggagagaccctatgaagccaagtcagattttgacgagattatgcaaggatgggaaggttgacggcccccactttgggcctcctggtcgcgtgaaagtggcgaaccgcgttttcacaggtccttccgaaatagaagatgaaaacgggcagagaaagccaacagacgaacacgtagctctcctggccctcagacactgggaagatattccgagagcaggctgccggctcgtacctgaacacgtagaaacccgtcccctgctaaaccctgacaagcctgggatcgaacagggccggcttgagttgtgggttgacatgtttccaatggatatgcccgcccccggcacccccctggatatctcaccacggaaaccgaagaagtacgaactgagggtgataatttggaatactgatgaagtggtgctcgaggacgatgatttcttcacgggggaaaagagcagtgatatctttgttcgcggttggctgaagggacaacaagaggacaagcaggacaccgacgtgcactatcacagtctgacgggcgaaggtaacttcaattggagatacttgtttcctttcgactacctggctgccgaagagaagattgtgatcagtaagaaggagtccatgttttcctgggatgagactgagtataaaatccctgctaggctcactctccagatctgggacgccgatcattttagcgcggacgatttcctgggcgcaatcgagcttgatcttaaccgatttccgcggggggcaaagacagccaagcaatgtacaatggagatggctaccggcgaagtcgatgtgcctctggtgagcatcttcaagcagaagcgagtcaagggctggtggccccttctggccagaaatgagaatgatgaatttgaactcactggcaaggtggaagctgagctgcacctcttaacggctgaggaagctgagaagaatccggtgggactggcccgcaacgaacccgaccctctggagaaacctaaccggcccgacacttcattcatctggttcctgaatccattgaagtccgcgcggtatttcctttggcacacctacagatggctgctgctgaaactgctgctacttctgttgctgctgcttctactcgctctattcctgtactctgtgcccggttatctggtgaagaaaatcctgggcgcatag

SEQ ID NO: 198275 - DNA, 3693 bp, synthetic construct
  misc_feature 1..3693: note = Description of Artificial Sequence: Synthetic coding sequence
  source 1..3693: mol_type = other DNA
atgatcaagaccgagaagagctaccccgagcggcggctgcggggcgtgctcgaggaattaagttgtgggtgctgccgtttcctgagcctggccgacaaagaccaggggcactcttcaaggacgcgtctggatcgtgaacggctgaaaagttgtatgcgcgagctagagaatatgggccaacaggctcggatgctgagggcacaagtcaagcgccatactgtgcgagacaagctgcgactctgccagaacttcttacagaagctgcggttccttgctgacgaaccacagcattcaatacctgacatatttatctggatgatgagcaacaataagcgcgtggcatatgcaagggtcccaagcaaagatctgctattcagtatcgtcgaggaggaaaccggtaaagactgtgccaaggtcaagacgttatttttgaagttgcccgggaagcgaggcttcgggtcggctggctggaccgtgcaggctaaagtggagctctatttatggcttggactgagtaagcagagaaaagaatttctttgcggccttccttgcggattccaagaagttaaggctgcccagggcctgggcttacacgcgttcccgcccgtctccttggtgtacacaaagaagcaggctttccagttaagggcccacatgtatcaagcccggagtctgtttgcggccgattcatccggactgagtgacccctttgctagagtcttcttcattaatcagtcacagtgcacggaggttctgaacgagaccctgtgcccaacctgggatcagatgttagtgttcgataatctggaattatatggggaggcccatgagctgcgagatgacccacctattatcgtgatcgagatctatgatcaggattcaatgggtaaggcggatttcatgggcagaacatttgctaaacccctggtgaaaatggctgatgaggcatattgccccccccgttttcctcctcagctcgagtactaccagatctaccgaggtaatgcaactgccggggatctactagcagcctttgaactgttgcaaatcggtccagctgggaaggccgacctccctcctatcaatgggcccgttgacgtggatcgagggccgatcatgcctgtgccaatgggtatccgtccagtcctctcaaagtatcgcgtcgaagtgcttttttggggcctacgggatctcaagagagtaaacctcgcacaggtggataggccacgggtggatatcgagtgcgctggtaaaggcgttcagagctctcttatccacaattataagaagaaccccaacttcaatacccttgtgaaatggttcgaggtggacctgcctgagaatgaactactccaccccccactgaacatacgagtggtcgactgtagggcattcgggaggtacactctagtcggctctcacgccgtcagcagcctccggcgatttatctacagaccaccagaccgtagcgcacctagttggaataccaccggagaggtggtggtgactatggaaccagaagtgcccatcaagaagcttgaaacaatggtcaagctagacgcaactagtgaggcagtcgttaaggtggacgtggccgaggaagaaaaggagaaaaagaagaaaaaaaaaggaaccgcagaggaacccgaggaagaagagcctgacgagagcatgctcgactggtggtcaaagtactttgcgagcattgacactatgaaagagcagctgagacagcaggaaccttccgggatcgacctggaggagaaggaagaagttgacaataccgaggggttgaaagggtcaatgaagggaaaagagaaagcacgcgctgctaaggaggagaagaagaagaagactcaatccagtggctctgggcagggtagcgaggctcccgaaaagaaaaagcccaagattgatgagttgaaggtgtatccaaaagaactcgagagcgagtttgataattttgaagattggttgcacacgttcaatttattacggggaaaaaccggcgacgacgaggatggcagtactgaagaagaaagaatcgttggccgatttaagggatcgttatgcgtgtacaaggtaccactcccagaggacgtatccagagaggccggatacgacagtacctacggcatgttccaagggattccttcaaacgatcccatcaacgtgctggtgcgcgtctatgtcgtgcgcgctacagacctacacccagctgatatcaacgggaaggctgacccatacatagcaatacggcttggcaaaaccgacattagggacaaggaaaactacatttccaagcagctgaacccagtttttgggaagtcatttgatatcgaagcctcctttcccatggagtctatgctaaccgtcgcagtgtacgactgggatcttgtaggcaccgatgaccttataggagagacaaaaattgatctcgagaaccgcttttacagtaagcacagggccacgtgtggtatcgctcagacttactcaactcacggatacaacatatggcgtgaccctatgaagcccagccaaattctgacgcgattgtgcaaagatggcaaagtagatggtccgcattttggcccacccggtcgggtgaaggtggccaatcgggtgtttactggacccagcgagatcgaagatgaaaatgggcagagaaaacctaccgacgaacatgtcgcactcctggcgctccgccattgggaggacatccctagagctggatgcagactcgtgcccgaacacgtcgaaactaggcccctactcaatcccgacaagcctggtatcgagcaaggaaggctggagctttgggtggatatgtttcctatggacatgcctgcgccaggtacacctcttgatatctctcccaggaagcccaaaaagtatgaactgcgagtaattatctggaacaccgacgaagttgtgctggaagacgatgatttctttaccggggaaaagtcgagtgacatcttcgtccgcggatggctcaagggccagcaggaggacaagcaggacaccgatgtgcactaccactcactaaccggcgagggcaactttaactggcggtatctgtttcctttcgactacctagccgctgaggaaaaaatagtcatctcaaaaaaggaatctatgttttcttgggacgagactgaatataaaataccagcccgcttaacactccagatttgggacgctgaccatttctctgccgatgactttctgggcgctattgagctagatctcaacaggttccctcggggggctaagactgctaaacagtgcacaatggaaatggccacgggagaagtcgatgtgcccttggtgtcgatctttaaacagaaacgcgtgaaaggctggtggccactgctggccaggaatgaaaacgacgagttcgagcttaccggaaaagtggaggctgagctgcaccttttaaccgccgaggaagccgagaagaaccccgtcggcctggcccggaacgaaccggatcccctcgaaaaacctaatcgtcctgatacgtcattcatttggtttctcaacccattgaaaagtgcaagatacttcctctggcacacctatcgctggctcctgctcaagcttttactcctgctcctgctgctgcttttacttgccctgttcctctattccgtgcctgggtacctggtcaaaaagatcctcggggcttag

SEQ ID NO: 198276 - DNA, 3693 bp, synthetic construct
  misc_feature 1..3693: note = Description of Artificial Sequence: Synthetic coding sequence
  source 1..3693: mol_type = other DNA
atgatcaagaccgagaagagctaccccgagcggcggctgcggggcgtccttgaagagctttcttgcggatgctgcaggttcttgtcgctggctgacaaggaccaggggcactcctcaagaaccagactggatagagagcgactcaaatcttgcatgagggaactggagaacatggggcagcaggcacggatgctgcgtgctcaggtgaagcgccacacagtccgggacaagctcagactctgccaaaacttcctgcagaaactacgattcctggctgacgaacctcagcatagtatacccgacatattcatctggatgatgagtaataacaagcgcgtggcatatgcacgcgtgcctagcaaggatctgctgttttccatcgtagaagaagagaccggcaaagactgcgctaaagttaagaccctttttctcaagctgcctggaaaaaggggttttggatcagccgggtggactgtgcaggctaaggtagaattgtatctctggctcggattaagcaagcagcggaaggagttcctttgtggcttgccttgtggattccaggaagtgaaggccgctcaagggctgggcctgcacgcttttccccctgtatccctggtgtacaccaagaaacaggccttccagctgcgcgcccacatgtaccaggcacgtagtctgttcgcagccgactcttctggactgagcgatccatttgcacgcgttttttttattaatcaatcccaatgcacggaagtgctgaatgaaactctctgtcccacctgggatcaaatgctggtgttcgataatctggagttgtacggtgaagcccacgaattgagagatgatccaccaatcatcgtgattgagatatacgatcaggactcaatggggaaggccgatttcatgggtcgtacatttgctaagccgttagtaaagatggcggatgaagcctattgtcctcctagattcccaccacagcttgagtactatcagatctatcgcggcaatgccacagccggggatctgctggctgccttcgaactgctgcagatcgggcctgccggcaaggctgatctaccgccgatcaacggtcccgttgacgttgaccgcggcccaattatgcctgtgcctatgggtatccggccagtgctgagcaagtacagagtggaggtcctcttctggggactgcgggacttgaagagagtgaatctcgcccaagttgacaggccacgggtcgatattgaatgcgccggtaagggggtccagtccagtcttatccataattacaagaagaacccgaactttaacactttagtgaagtggtttgaagtagacctcccggaaaatgagctgcttcacccgcccctgaatattagagtcgtcgactgcagagccttcggcagatacacgctcgtcggctcccatgccgtttcatcgctgcgccgatttatatatcgcccccctgatcggtcggccccaagctggaacaccacaggcgaggtggtcgtgacaatggagccagaggtcccgattaaaaagctggagaccatggtcaaactagacgccacatccgaagcagtcgttaaggtcgatgtcgccgaggaagagaaagagaagaagaagaagaagaagggcaccgccgaagaacccgaggaagaggagccagacgaatcaatgttggattggtggtccaaatacttcgcctccattgacaccatgaaagagcaactccggcagcaggaaccgtctgggatcgacctggaggagaaggaggaggtcgataatacagagggcctgaaaggctctatgaagggaaaagaaaaggcccgtgccgccaaggaggaaaagaaaaagaagacacaatcgtccggctccgggcaaggttcagaagcaccggaaaaaaagaaacccaagattgacgagctgaaagtgtatcccaaggagctggaaagcgagttcgacaatttcgaagactggctccatacattcaatctattaaggggcaagacgggtgacgacgaagacggtagtacagaggaggagcgaatcgttggccggttcaaaggcagcctctgcgtctacaaagtgcctctgcctgaggatgtctctcgggaggccggctatgattctacttacgggatgttccaaggcattccgagcaatgatcccattaacgtgctggttcgagtgtacgttgttcgcgccaccgatcttcacccagcagacatcaacggcaaggcagacccctacatcgcaatacgcctaggcaagacagatattcgtgataaggaaaattacatttcaaagcagctcaacccagtgttcgggaagagcttcgatatcgaagccagcttcccaatggaatccatgctgactgtggccgtttatgattgggacctggtcggaacggatgacctcataggggaaacaaagatcgacttggaaaaccgtttttattccaagcatcgggccacttgtggcattgctcaaacttatagtacccacggctacaatatatggagggatccgatgaagccatcccagatcctcactcggctttgcaaggacggaaaggtggatggcccacatttcgggcctccaggccgggtgaaggtcgcaaacagggtgtttaccgggccgtcggagattgaagacgagaatggacagcgtaaacctaccgacgagcacgttgccctgctagccctgagacactgggaggatattcctagggccggctgcaggctggtgcctgagcatgtggaaacacgccctttgctcaacccggacaagccaggtattgagcaggggcggctggaactatgggtggacatgtttccaatggacatgcccgctccgggaaccccattagacatctcgccccgcaagcctaagaaatacgagctaagagtgattatttggaatacggatgaggtagtcctcgaggacgacgatttttttactggggagaagagttcagatatcttcgtacgcggctggttgaagggacagcaggaggacaaacaggatactgatgttcactaccattccctgacaggtgagggcaacttcaactggcgctatctgttccccttcgactacctggctgcagaggaaaaaatcgtgatttctaaaaaagagagcatgttctcatgggatgagactgagtacaagatcccagcccggctgacgctccagatctgggatgccgatcacttctctgccgacgacttcttgggggccattgagctcgaccttaaccgatttccaagaggggctaaaaccgccaagcagtgtaccatggagatggccaccggcgaggtggatgtgcctctggtgtccatcttcaaacagaaacgggtgaagggatggtggccactgctcgcaagaaatgagaacgacgagttcgagctgacagggaaagtggaggccgagctgcatctcctaaccgccgaggaggcagagaaaaacccggtcgggcttgccaggaacgaacctgatcctctggagaaacctaaccgccctgacaccgcctttgtttggttccttaaccctctgaaaagcatcaagtacctgatttgcactcggtataaatggctcattataaagattgtactggcgttgctgggactgctgatgctcggactcttcctatactctcttccaggctacatggttaagaaacttcttggggcttag

SEQ ID NO: 198277 - DNA, 234 bp, synthetic construct
  misc_feature 1..234: note = Description of Artificial Sequence: Synthetic coding sequence
  source 1..234: mol_type = other DNA
gaggccgagaagaaccccgtgggcctggcccggaacgagcccgacccattggaaaaaccgaaccggccagataccgcctttgtttggtttctcaatcctctgaaaagcatcaagtacctcatctgtacacggtataaatggttaattattaaaatcgttttggcccttggctgtagttgctgggggcccctgcagcccccgtggctccacggacaaaaggccccctgggggtag

SEQ ID NO: 198278 - DNA, 342 bp, synthetic construct
  misc_feature 1..342: note = Description of Artificial Sequence: Synthetic coding sequence
  source 1..342: mol_type = other DNA
gacttcctgggcgacgagagcctgcaggaggaggagaaggacagccaagagaccgacggattgctgcccggctcgcggccatcatccagacctccgggcgagaagagctttaggagcaagggtagggaaaagactaagggaggacgcgatgatgagcataaggccgggcggagcgtatttagcgcaatgaaactcggcaaaaatcgaagtcataaggaggaaccgcagagacctgacgaacctgcggtgctggagatggaagatctggatcacctcgctattagacttggcgacggattagatcccgactccgtgtctcttgcctctgtcacagcactgtag

SEQ ID NO: 198279 - DNA, 3924 bp, synthetic construct
  misc_feature 1..3924: note = Description of Artificial Sequence: Synthetic coding sequence
  source 1..3924: mol_type = other DNA
atgatgaccgacacccaggacggccccagcgagagcagccagatcatgcgcagtctaacccctttgattaatagagaagaagcattcggagaggccggcgaggcagggttatggcccagcatcacccacacccctgacagtcaggaggagggtttgaacgacatccaagaaatgataaagactgagaagagctatcccgaacggcgcttacggggagtcctggaagagctctcatgcggctgctgcaggtttctgagccttgcggacaaggaccaaggccacagcagtagaacacgtttagaccgggagcggctaaagagctgtatgagagaactggagaacatggggcaacaagcaaggatgttgcgcgctcaggtgaagagacataccgtgagggataaattgaggttatgtcaaaattttcttcagaaactgaggttcctcgcagacgaaccacagcactccatccccgacatcttcatttggatgatgtccaacaataagagggtcgcatacgcgcgcgtgccctctaaggacctgttgttctcgattgttgaggaggagacgggtaaagattgcgccaaggtgaagactctgttcctgaaactgccaggcaagcgcggcttcggtagtgctgggtggacagtgcaggctaaggtagagctctacttatggctggggttatcaaagcaacgaaaggaatttctgtgtggcctgccttgtggtttccaagaagtcaaggctgcccaggggctcggcctgcatgcctttccccccgtcagtctggtgtacacaaagaagcaggcgtttcagctgagagcacatatgtatcaggccaggagtctcttcgctgctgactcctctggcctaagtgacccgttcgcccgcgtctttttcatcaaccagtcccaatgcaccgaggtgctgaacgagacactgtgcccaacctgggatcagatgttagtcttcgataatcttgagttatatggtgaagctcacgagcttagagacgatcccccaatcatagttattgaaatctatgatcaggattcaatgggcaaagctgatttcatgggcaggacattcgcgaaaccgcttgtgaagatggctgatgaagcctattgcccacccagatttcctccacagctggaatactaccagatctaccgaggaaatgccacagccggtgatttactggcggccttcgagctgcttcagatcggcccagccggaaaggccgatctccctccgatcaatggccccgtggacgtggatcggggccccattatgccagttcccatgggaataagacccgtcttatccaaatatagggtggaggtgctgttctggggccttcgcgatctgaaacgagttaatcttgcacaagtggaccgcccaagagtggatatcgagtgtgctggcaagggtgtacagagcagccttattcataactataaaaaaaacccaaactttaacactttggtcaaatggttcgaggtggatctgccggagaacgaattattgcatcctccccttaatatccgcgttgttgattgtcgagccttcggcagatatactttggtggggtctcatgccgttagcagtctccgacgctttatctatcgacccccggatagaagtgccccgtcctggaatacaaccgtgcggctgctcagaaggtgcagggtgctttgcaacggcggctccagctcacacagcaccggagaggtggtggtgacaatggaaccagaggttccaatcaagaagttagaaacgatggttaaacttgacgctaccagcgaggctgtggtaaaagtcgacgtcgcagaagaagagaaggagaagaaaaaaaagaagaagggtactgccgaagagccagaggaggaagaacccgacgaatccatgctggattggtggagtaaatacttcgcgtcaattgatacaatgaaggagcagctgagacagcaggagcctagcgggatagacttagaagaaaaggaagaggtggacaacacagaggggctgaaaggctccatgaagggtaaggagaaagcccgtgcagctaaagaagagaaaaagaaaaaaacgcagtcatcaggctcaggacagggctccgaggcccctgagaaaaaaaagccaaagatcgatgagctcaaagtgtatcccaaagaactggagtctgaatttgacaacttcgaagactggctgcatacgttcaacctgctccggggcaaaacaggcgatgatgaagacgggtctacagaagaggagcggattgtaggtcgcttcaaaggaagcttgtgtgtttataaggtgcccttgccagaggacgtttctcgggaagccggatacgattctacatacggaatgttccaaggtatcccctctaacgaccccattaacgtactggtgcgcgtctacgtagttagagccactgacttacaccccgctgacataaacggcaaagcggacccgtatatcgctataagactcggtaagacagacatcagggacaaagaaaactatatatccaaacagcttaatcccgtcttcgggaagtcattcgacatcgaagccagttttccgatggagtctatgctgactgtggcagtctatgattgggacctggtcggcaccgacgatttaataggtgaaacaaaaattgacctggagaatcgcttttactccaaacatcgggcaacctgtggcattgcacagacttactctactcacgggtataacatctggcgcgaccctatgaagccctcccagatcctgacccgcctctgcaaagacggaaaggtcgacggcccccacttcgggccccccggacgcgtcaaagtggcaaaccgtgtttttactgggcccagcgaaatcgaagacgagaacggtcagcgaaaacctacggatgagcatgttgcgttgctcgcactcagacattgggaagatattccccgagcgggatgtcgtctcgtgcctgagcatgtggagacacgcccacttctgaaccccgataaacctggtatagagcagggccgactggaattatgggtggatatgtttccaatggacatgcctgcccccggaacgcctttggacattagccctagaaagccaaagaagtacgagcttcgggtaataatctggaatacagatgaagtagtgctagaggacgatgacttcttcaccggtgagaagagttctgatatattcgttagaggatggttaaagggacagcaagaagataagcaggatactgatgttcactatcattcacttactggagagggtaattttaattggcgttacttgttccccttcgactacctcgctgctgaggagaaaattgttatctcaaagaaggagtccatgtttagctgggacgagaccgaatacaagataccagcgcgccttacgctccagatttgggatgccgaccattttagcgctgatgatttccttggggccatcgagctggaccttaacagatttcctagaggtgccaaaaccgcaaagcagtgcaccatggaaatggcgactggcgaggtggacgtgcccctggtttctatctttaaacagaaacgtgtcaaggggtggtggcctcttttggctaggaatgaaaacgacgagttcgagctgacgggcaaggtcgaagccgagttacacttgcttaccgccgaggaggccgagaaaaatcctgtagggctagctagaaatgaaccggatcctctggagaaaccaaatagacctgatacttcatttatctggttcctcaaccctctgaagtccgcccgttattttctctggcacacctaccgttggttactgctgaagcttctgctcctgctgctgcttctcttgctgctcgctctatttctctacagcgtgcctggctacctggttaagaagatcctcggcgcctag

SEQ ID NO: 198280 - DNA, 4527 bp, synthetic construct
  misc_feature 1..4527: note = Description of Artificial Sequence: Synthetic coding sequence
  source 1..4527: mol_type = other DNA
atgttccccgcccggggcgtgcccctgcacctggagggcgagggcgtgtttccctggggaccaggggacgtgagtttgccatatctgtctacctctgacgtaagcttcagcgtaatcgtcgagaatgtaaactgttactcttctgggatgatttgtagaaaattcatttcaatcaacgttggcaacagcctaatcgtgttcgatgacgatagcggcaatccaagccccgagtcctttctggacgataagcaggaggtgcatacttggagggtgggcttctttacgctcgtgcattttccccaggaacatatcaccttactttgggaccagcgcaccactgtgcacgtgcaggccgggccacagtggcagggccagttggcgggcctatgcggaaactttgatttgaaaaccataaacgagatgcgtacaccggagaatctcgagctgacaaacccccaggagttcggatcgtcctgggctgccgttgagtgtccagacactctggacccccgcgatatgtgcgtgctgaatcctttgagggagccttttgccaagaaggagtgcagcatactgctgtccgaagtgtttgagatctgccatcctgtggtggatgtgacctggttttattctaactgcttgacagacacctgcgggtgctctcaaggaggcgattgcgaatgtttttgcgcctctgtgagcgcctatgcacaccaatgctgtcaacacggcgtggctgtcgattggcgcacacctagactgtgcctgttaggtaaaggcccctatcagctcagcagcctcgctgcaggcggcgctctagttggcatgaaggcagtgggcgacgacattgtactggttcggaccgaagatgtggcccccgcggatatcgtctcatttttgcttaccgctgccctgtacaaagcgaaggcccatgaccctgacgtggtatcactggaggccgcggatcggcctaacttcttcctgcacgtcaccgctaacgggtccctagagctggcaaagtggcaggggcgagatacctttcagcagcacgcatcctttcttctacaccgcggaacaaggcaggcgggactggtcgcactggagagccttgccaaaccgtcttctttcctctacgtctcaggcgcagttctcgcgctacgcctctatgaacacaccgaggtttttcggaggggcaccctgtttcggctgttggatgcaaagcccagtggggctgcataccctatttgtgaatggaggtacgacgcctgcgcctccccgtgcttccagacttgcagggatcctcgggctgcctcttgtcgagatgtgcctagggtggagggatgtgtcccggtgtgccccaccccccaagtgctggacgaggtcacccagaggtgcgtgtacctggaggactgcgtcgaacccgccgtttgggtccctaccgaggcactaggtaatgaaaccctaccacccagtcaggggttgccaactccttcagacgaagaaccacagctgtcacaagagtcacccaggacgcccacccataggccagcactgactccagccgcacctttgaccacagctcttaaccctccagttactgccactgaggaaccagtagtttcgcccgggcccacacagactaccttacagcagcccctcgaactgacagcatctcagcttccggctggacctactgagagccccgcgagcaagggagtaaccgctagcctgctcgcaataccacatacaccagagtcgagcagcctgcctgtggccttgcagacccctaccccgggtatggtgtcaggcgcaatggaaaccacaagagtaaccgttatcttcgccggctctccaaacattacagtgagtagccgcagccccccagcaccaagattcccattgatgactaaggccgttaccgttagaggacacggctctctgccagtccgtacaacacccccccaaccgagcttaacagcaagcccttcatcccgcccagtcgcgagtccaggcgccattagccgttctcctacctcatcaggaagccacaaggctgtactgacacccgctgtgaccaaagtgattagtagaactggggtgccccagcccacacaggcccaatccgcctctagtccatctaccccactcactgtggccggcactgctgctgaacaggtcccagtgagtcccttggccactaggtccctcgaaattgtcctgagcactgaaaaaggtgaggcaggtcacagccaacctatgggttcacctgccagtcctcagccacaccccctgccaagcgcaccccctaggcctgcgcaacacactacaatggcgactcgatcccccgccttgccccccgagacccctgctgcagcatcactaagcactgccacagacggactggcagcaacgccctttatgtctctagaaagtacccggccttctcaactcctttctggtctgccacccgacacctcactacccctcgccaaggtcggtacctcagccccagtcgccaccccaggcccaaaggcaagtgtcatcacgacacccctgcaacctcaagcgaccacccttccagcccagaccctctcacctgttcttccctttacccctgctgctatgacacaggcacatccccctacacatatcgctcctccggccgccggcactgcaccgggcctcctgcttggcgcaacattgcccacctccggcgtgctcccggtggcggaaggaacggcctcaatggtgtccgtggtgccgaggaagtcaaccacgggaaaggtggcgattttgagtaaacaggtgtctttgcctacaagcatgtatggctctgctgaaggcggacccactgaactaaccccagccaccagccatcctttgactcctttggtggccgaaccagagggcgctcaggcgggaacggccctgcctgtccctacgtcatatgccctgagccgggtatccgcaagaacagcaccacaagactccatgctggtcttgctaccccagctggcagaggcccatggcacatccgccggtccacatttagccgcagaacccgtcgatgaggctaccaccgagccatccggaaggtccgctcctgcactctctatcgtggagggacttgctgaggcactggcgacaaccacagaagcaaacacttccaccacctgcgtgcccatcgcagagcaggactgcgtccggcatatatgtctcgaggggcagctcatccgtgtcaatcagagccaacattgtcctcaaggcgcagcgccccctaggtgcggcatcttagggctagccgtccgcgttggtggggaccgatgctgtcccctgtgggagtgtgcttgccggtgtagcatcttccctgacttaagcttcgtgaccttcgacggatcgcatgttgccctgttcaaagaggcaatctacattttgagccagagccccgacgagatgttaacggtacatgtcttggattgcaagtctgcgaatctgggccacctgaattggcctccgttctgtttggtgatgctgaatatgacccacttagcccaccaggtgaccattgatcgctttaatagaaaagtaactgtggatttgcagccagtctggcctccagtgagtaggtacggcttccggatcgaggataccggtcatatgtatatgattctcacaccatccgatatccagattcagtggttacactcatcgggcctaatgattgtggaggcaagcaagacctcgaaggcacaggggcacggtctgtgcggtatctgcgatggcgacgctgctaatgatttgacactgaaggatggcagcgtggtaggcggtgcagaggaccctgccccattcttagatagctggcaagtgccctctagcctaacatccgttggccagacacgcttccgtccagattcctgtgccaccaccgattgctctccatgtctgagaatggtgtccaatcgaacgtttagtgcttgtcatcgctttgtgcctccagagtctttctgcgagttgtggatcagagataccaagtatgtccaacagccctgtgtggcgctgacagtgtacgtggcaatgtgccacaagttccacgtgtgcatcgaatggaggagaagtgattattgcccattcctctgtagttccgattcgacataccaagcctgcgtcacagcctgtgagcctcccaaaacatgtcaggatgggatcctcggacccctggaccctgagcactgtcaggtcttaggtgagggatgtgtgtgctccgaggggaccatcctgcaccggcgccactcagccctgtgcatcccagaagctaagtgtgcctgcggagactgtcctgatagcataccagagtgtcaagagggcgaggcgttgactgttcatcgcaacactacagagctgtgttgcccattgtatcagtgcgtgtgtgagaactttcggtgtccacaggttcagtgcggtctcgggactgctctggtcgaagtgtggagcccagaccggtgttgtccctacaagtcctgtgggtag

SEQ ID NO: 198281 - DNA, 8778 bp, synthetic construct
  misc_feature 1..8778: note = Description of Artificial Sequence: Synthetic coding sequence
  source 1..8778: mol_type = other DNA
atgggcgtgctggccagcgccctgtgctggctgctgtgcgtgtggctcccttggggcgaacaggccgccgaaagtctgcgcgtccagcgcctgggggaacgcgtggtggacagtggacgctctggcgcacgggggatgcgcaacgtcaaaggcatgcgaaatggacccgcccagaccagggtgtcttcatcatctagccatcaggaggccacactagctatgggggacaaggctaccgtcgttggcggccagcaggcggaggctcccgattctgtcgccatgagtagttgggaaaggcgactgcacagggcgaagtgcgccccaagttacctttttagttgcttcaatgggggagagtgcgtgcaccccgccttttgtgattgtcgccgctttaatgctactggtccgaggtgccagatggtatacaacgccggacccgagcgcgactcaatctgccgcgcttgggggcagcaccacgtggagacattcgatgggctgtattattacttaagcgggaaggggtcctacactttggtgggacgccacgagcccgaggggcagagcttcagcattcaggtgcacaatgatcctcaatgtggaagtagtccatacacctgcagccgcgccgttagtctgttcttcgtcggggagcaggaaatccatcttgcgaaagaagtcacacacgggggaatgagggttcagcttcctcacgttatggggagtgctagactgcagcagctggctggctatgtcattgtgcggcaccagagcgcttttactctggcttgggacggcgccagtgccgtgtatattaagatgagtcctgagctgctggggtggactcacggactttgcggtaacaataatgccgatccgaaggacgatctcgtcacttcctccggcaagctgacagatgatgtggtcgaattcgtccattcatggcaggagcaggccccaaaccaaccacccgggccaaccacctcaagcctgccccgcccaccatgtctgcagcagaatcccgggactatgcagggtgtctatgaacagtgtgaggctctgctgaggcctccatttgatgcttgtcacgcttacgtttctccgctgcccttcaccgcaagttgtacatcagatctttgccagtctatgggagacgttgctacgtggtgtagagccctggccgaatatgcacgggcatgcgcacaggccgggaggcctctccagggatggagaactcagctgagacaatgtaccgtgcattgtaaggaaaaggccttcacctacaacgagtgtatcgcgtgttgccctgcttcttgtcacccccgggctagttgcgtcgacagtgaaatcgcgtgcgtggatgggtgctattgtcccaatggactaatatttgaagatggcggctgtgtggcccccgccgagtgtccatgtgagtttcacggcaccctctaccctccaggctcagtcgtgaaggaggattgcaacacctgcacatgcacatctggcaaatgggagtgtagcaccgcggtgtgtcccgcagagtgttcggtgaccggtgatatacactttactacgtttgatggccggcggtacactttcccagcaacctgccagtatattctcgcaaagtccagaagctccggcaccttcaccgtcaccctgcagaatgctccctgcggcttgaaccaggatggggcctgtgttcagtccgtgagcgtgatccttcatcaggaccctcggcgccaggtgactctaactcaagcaggagacgtactactgttcgatcagtacaaaatcattcctccgtacaccgatgatgccttcgagatacgacgcctgtcatccgttttcttgagggtccgcacgaacgtgggggtaagagttctttacgaccgggaggggcttcgactgtatctgcaggtcgaccagcgctgggttgaagacaccgtggggctctgtggaacctttaacgggaatacacaggacgacttcttgtcacccgtgggcgtcccggagtctacacctcagctatttggtaatagttggaagaccctgtcagcatgttcgccattagtgtccggctcccccctcgatccttgtgacgtgcacctccaagctgcgtcttactcagtgcaggcttgcagcgtactcacaggtgagatgtttgccccctgcagcgccttcctgagtccggtaccttactttgaacaatgcagacgcgacgcctgccgctgtggacagccgtgtctttgcgcaactcttgcacactacgcacacctctgccgaaggcatggactgcccgtggactttagggccaggcttcccgcctgcgccttgagttgcgaggcctctaaagagtacagcccttgcgtcgctccttgcgggaggacctgtcaggaccttgcttctcccgaagcctgcggagtagacggaggtgacgatctcagccgtgacgaatgcgtggagggctgtgcctgccctccagacacctatctcgacactcaagccgatctgtgtgtccctcggaaccagtgttcctgccatttccaaggcgtggattacccccccggagactccgatattccctcacttgggcattgccattgtaaggatggggtaatgtcttgtgactcgcgcgctcccgccgctgcgtgtcctgccggacaagttttcgtcaactgctccgacctgcataccgacctcgaacttagcagagaacgcacttgcgagcagcagctgctgaacctctctgtgtccgctcgagggccttgcctgtccggctgtgcatgtccacagggccttctgcggcacggcgacgcgtgctttctccctgaagagtgcccctgtacatggaaggggaaagagtatttcccaggggaccaggtgatgagcccctgccacacatgcgtgtgtcaacgcggcagcttccagtgcaccttacatccatgtgcctctacatgcacagcgtacggggatcgccactaccggacatttgatggattgccctttgatttcgtcggggcttgcaaggtgcatctagtaaaatccacaagcgatgtttccttctccgttatagttgagaatgtcaattgttactcttcaggtatgatctgtagaaaatttattagcataaatgtgggaaattctttaatcgtcttcgacgacgactcgggaaacccttcccccgaaagctttctcgacgacaagcaggaggtgcatacatggcgcgtgggctttttcaccttggttcatttcccccaggaacacattaccctgttgtgggatcagcgtacgacagtgcatgtgcaggcaggcccccagtggcaaggccaattagcagggctttgcggaaactttgacctgaagaccatcaatgagatgagaactcctgagaatctggaactcacaaatccacaagagtttggcagctcgtgggcagcggtggagtgcccagacacactggaccctagggacatgtgtgtgctcaaccctctccgggaaccctttgcaaagaaggagtgcagcatcctcttgtctgaggtgtttgagatctgtcatccagtggtggacgtcacatggttctattctaactgcctcacggacacatgcgggtgcagccagggtggcgattgcgaatgtttctgcgccagtgttagcgcatatgcacaccaatgttgtcagcatggagtcgccgtggattggcggacaccaaggctgtgtccttacgattgtgacttttttaataaagtattggggaagggtccttatcaactctctagtttagccgcaggtggcgctttagtggggatgaaagccgtgggcgatgacatcgtgctagtccgaaccgaggacgtggcaccagctgacatcgtatcgttcctcctgacagctgctctgtacaaggctaaggcacacgacccggacgtggtgagtttggaagctgctgatcgccctaactttttcctgcatgtaacggccaatggctctcttgagctggccaaatggcagggaagggatacattccagcagcacgcctctttcctgttgcacagagggacccggcaggccggcctggtagccctcgagtccttggctaaaccatcttcattcctctatgtttctggcgccgtgttagccctacggctctacgagcacacagaagtgttccggcggggcactctgtttcggctgctcgacgctaaaccctctggggccgcctatccaatatgtgaatggaggtacgatgcctgtgcgtcaccatgcttccagacctgccgtgatcccagggcagcttcttgcagggacgtcccaagggtggagggatgtgtccccgtgtgtcctacgcctcaggtactggacgaagtcacacagagatgcgtgtacctcgaggattgtgtggaacctgctgtgtgggtgccaaccgaggcactcggcaacgagacgttgcctccttcccagggtcttcctaccccctcagacgaggagccacaattaagccaggaatctccgcgaactcctactcatagacccgcactgacccctgctgctccccttacaaccgctttgaatcccccggtcaccgctaccgaggagccagtggtttcacctggcccgacacaaacaacacttcagcaacccctggaactgacagcctcacaacttcccgccggacccacagagtcccccgcctcaaagggggttaccgccagccttcttgccataccccataccccagagagctcctctttgcccgtcgccctgcagactcccactcccggaatggtctctggcgctatggagacaactcgggttaccgtgatctttgccggatccccaaacatcacagtgtccagtaggtcaccccccgcacctcgtttccccctgatgacaaaggccgtgacagtccgcgggcatggaagcttgcctgtgagaactacacctccacagccttctcttacagcttctcctagttccaggcccgttgcctcccccggggcaatttccaggtccccgacctcatctggaagtcataaggccgtactcacacccgctgtcaccaaagtcatcagcaggaccggtgtcccacaaccaactcaggcacaatctgccagctcaccaagtacacctctgaccgtggcgggaactgcagccgaacaggtcccagtgtcccccctagccactagaagcctggagattgtgctctcaacagagaagggggaggctggacattcccagcctatggggtctccagctagtccgcagccgcaccccttgccttctgctccccctcgccccgcccaacacacgaccatggcaaccaggtcccctgctctcccaccggaaacaccagccgcggcctccttgtctactgccacagatgggcttgctgctacccctttcatgtctttggaatctacgagaccgtctcagctgctgtctgggctgccaccggacacatcccttcccctcgctaaggtcggcacgagtgcccctgtcgctactcccggccccaaggcttccgtgattacaacacccctgcagccccaagcaactaccctgcccgctcagactctctctcctgtgctgccttttactcctgcagctatgactcaggcacatccaccgacacacatcgctccacctgcggctgggaccgcccccgggctgctgctgggcgccacgctgcccacttccggcgttctcccagtggcggaaggaaccgccagcatggttagtgtggttccacgcaaaagtacgacggggaaggtggcaatcctcagtaagcaggtgtctctcccaaccagtatgtacggcagtgctgagggaggcccgaccgagctcacccccgcaacaagccacccgctcactcccctggtagcagagcctgaaggagcccaggctgggacagctctccctgtacctacatcctatgcactgagccgcgtgtctgctaggactgctccacaggatagcatgctcgtcctcctgcctcagctggccgaggctcatgggacttccgctggacctcatctggctgccgagcccgtcgacgaggctacaactgagccatctggacgctccgccccagccctctcaattgttgagggtctcgccgaggcccttgccacaaccactgaggccaatacctctactacctgtgtgcccatcgccgaacaggactgcgtccgacacatctgcctggagggtcagttgataagggtgaaccagagccagcactgtccccagggcgctgccccaccccggtgcggtattctcggcttggcggtacgtgtgggaggcgataggtgttgccctttgtgggagtgcgcatgtagatgcagtatcttccccgacttatcatttgtgacattcgatggaagccatgtcgctttgtttaaggaggccatatacatcctatcccagtcacccgatgagatgctgactgtacacgtgctcgattgcaaatccgcaaatttgggccatcttaactggcctccattttgtctcgtgatgttgaatatgacgcacctggcacaccaggtgactatagatcggttcaataggaaagtgaccgtggacctgcagcctgtatggcctcccgtgagtagatacggctttaggattgaggatacaggccacatgtatatgatactgaccccgtccgatatacagattcaatggttgcactcatctgggcttatgattgtggaagcctcaaaaactagtaaagcccagggccatggtctatgtggcatttgtgacggagacgcagctaacgatctgaccctcaaagacggatcagtcgtggggggcgctgaagaccctgccccgtttctggactcctggcaagtaccaagctcattaacctcagtcggccaaacccgattccgcccagatagttgcgccacaaccgactgttcgccttgcttacggatggtctccaataggacattttccgcttgccaccgtttcgtgccacctgaatctttctgtgaattatggattcgggacacgaagtacgttcagcagccctgcgttgcgttgactgtgtacgtcgcaatgtgccacaagtttcacgtgtgtatcgaatggcggcgctccgactattgtccattcctgtgctcttcagactccacctatcaggcatgcgtcaccgcctgcgaaccccccaagacatgtcaggacggcatcctggggcctcttgaccctgagcactgccaagtcctgggcgaggggtgtgtgtgcagtgagggcactatccttcaccggcggcactctgctctgtgcattccggaggccaaatgcgcatgtacagatagcatgggagtgccgcgggctttgggtgagacctggaattccagccttagcggctgctgtcagcaccagtgccaggctcctgacaccatcgtgccagttgatttgggatgtccttcaccacgccctgaatcttgtctgaggttcggggaggtggctctgctgctcccgaccaaggatccctgctgcttgggaacagtgtgtgtttgcaatcagacactttgtgaaggcttggcccctacgtgccgtcccgggcaccgtctcctcacacacttccaagaggacagctgctgcccatcctattcttgcgagtgtgaccccgatctgtgcgaagccgaacttgtcccaagttgccgccaggatcaaatcctgatcactggacgactgggagactcttgttgcactagctatttctgtgcctgtggggactgtccagatagcattcccgagtgtcaggagggcgaggcgcttacagtgcatagaaacacaaccgagctgtgttgccccctgtaccagtgtgtatgcgaaaactttagatgtccacaggttcagtgtggcctgggaaccgcgcttgtggaggtttggtccccagacagatgctgcccatacaaaagctgtgaatgcgattgtgacaccatacccgtgcctcggtgccatttatgggagaagagccagttggatgaggagttcatgcactccgttgaaaacgtctgcgggtgtgccaagtatgagtgtgtgaaagcacctgtatgtctctcaagagagctgggcgtcatgcagcctggccaaacggtggtggagctctccgccgacggcgtgtgtcatacttctcgctgtacaaccgtcttggatcccctaactaacttttaccagattaacaccacctcagtactgtgcgacatccattgcgaggcaaaccaagagtacgaacacccgcgggatctggctgcttgttgcggcagctgtaggaacgtgtcgtgcctcttcactttccctaatggcacaacctccttgtttctgcccggagcctcctggattgcagattgcgcccgccatcactgcagttcgacccccttgggcgctgtgctggtgcgcagccctattagctgcccacctttgaatgagacagaatgcgcaaaggttgggggctctgtggtaccttcacttgaaggatgttgccgaacttgtaaggaggatggccgctcatgtaaaaaagtcactattcgcatgaccattaggaagaacgagtgtagatcaagtacgcctgtcaatctcgtgtcctgtgatggccgctgcccatcggcgtccatctacaactataacatcaacacctatgcacgcttctgcaagtgttgtagagaggtgggactgcagagaaggagcgtacagctattctgcgccacaaacgctacttgggttccatatacagtacaggaaccaactgactgtgcatgccagtggagctag

SEQ ID NO: 198282 - DNA, 387 bp, synthetic construct
  misc_feature 1..387: note = Description of Artificial Sequence: Synthetic coding sequence
  source 1..387: mol_type = other DNA
atggcccggatcctgctgctgttcctgcccggcctggtggccgtgtgtgccgttcacggaatttttatggatagattggcttccaaaaaactctgcgccgacgacgaatgtgtgtacaccattagcctggcatctgcccaggaagactataatgcaccagactgccgcttcatcaacgttaagaagggccagcaaatatacgtgtattctaaactagtcaaggagaacggggctggcgaattctgggctggatccgtgtacggcgatgggcaagacgaaatgggggttgtcggctattttccccgcaatctcgtgaaagagcagagggtgtatcaggaggcaacgaaagaagtcccgaccactgatatcgatttcttctgcgaatag

SEQ ID NO: 198283 - DNA, 1446 bp, synthetic construct
  misc_feature 1..1446: note = Description of Artificial Sequence: Synthetic coding sequence
  source 1..1446: mol_type = other DNA
atgcagctgtacagcagcgtgtgcacccactaccccgccggcgccccagggccaaccgctgctgctccagccccccctgcagcagccaccccgttcaaagttagcctgcagcctcctggcgcagccggtgcggcccccgagccagagaccggtgaatgtcagccggccgccgccgctgagcatcgggaagcggccgcagtccccgccgcgaagatgcccgcatttagctcctgcttcgaggtggtgagtggggctgcggctccagccagtgctgccgctggacctccgggcgcttcctgcaaaccacctctgcctccccattatacatccaccgctcaaatcactgttagagcactcggtgcggaccgtttactgctgcacggaccagaccctgtgccaggagcagccggcagtgctgcagctccccgaggtaggtgtctcctcctcgcccccgccccagctgcaccagtcccacccagacggggcagttccgcatggctgttagaagagcttctgcgcccagactgtccagagccagcaggcctcgatgctacccgagagggaccagacagaaacttccgactgtctgaacaccggcaagccctggccgccgccaagcatcgcggaccggcggctactcccggctccccagacccaggacctgggccttggggcgaggagcatctcgctgaacgtggccctaggggctgggaaagaggcggcgaccgttgcgatgcccccgggggcgatgccgctcggaggcctgatcctgaggcagaggctcctccagccggcagtatagaggcagcgccatcctcagcagccgaacccgtgattgttagcagatctgaccccagggatgaaaagcttgctctgtacctcgctgaggtagaaaaacaagacaagtacctgcgtcagcgcaacaagtaccgtttccacatcattcccgatggtaactgcttatatagggctgtgagcaagacagtatacggggaccagtcattgcaccgtgagctcagagagcagacagtccattatattgctgaccacctggaccacttctcacctctaatcgagggcgacgttggcgaattcatcatagctgccgctcaggatggggcctgggccgggtaccctgagttgctggccatgggccaaatgctgaacgtcaatatccatttgactactgggggcaggttggagtcccctacagtgtctacaatgattcactaccttggtccagaggattctcttcggcctagcatttggctctcatggctcagcaacgggcactatgacgccgtgttcgaccatagctaccctaatccggaatatgacaactggtgcaagcagacacaggttcaacggaagcgagatgaggaactcgcgaaatccatggctatttctctgagcaaaatgtatattgaacagaacgcctgtagctag

SEQ ID NO: 198284 - DNA, 1197 bp, synthetic construct
  misc_feature 1..1197: note = Description of Artificial Sequence: Synthetic coding sequence
  source 1..1197: mol_type = other DNA
atgagccggaagcaggccgccaagagccggcccggcagcggcagccgcaaggcagaggccgaacgcaagagggacgagcgcgcggctcgtagggctctagcgaaggagaggcgtaacagacccgaaagtggcggcggaggcggatgcgaggaggagtttgtgagcttcgcaaaccagcttcaggcgctcggattaaagctgagagaagttccaggggacgggaactgtttgttccgggccctcggcgatcagctcgaaggacactcccgtaatcacctcaagcatcgccaggaaaccgttgattacatgatcaaacagagggaggatttcgagccatttgtggaagatgatataccatttgagaaacatgtggccagtttggctaagcctggcacttttgcaggcaacgatgccatagtcgcattcgctaggaatcaccagttaaacgtagtgatccatcaactgaacgccccactttggcagatccggggaacagaaaagtcctcagtcagggaactgcacatcgcatatcgctacggagaacactacgacagcgttagaagaatcaacgataacagtgaggccccggcccatctccaaaccgactttcagatgcttcaccaagatgaaagcaataaacgcgaaaaaatcaagaccaaagggatggactcggaagatgacctaagagatgaggtggaagacgccgtgcagaaggtctgtaatgcaaccggttgctccgattttaatctgatcgtgcagaacctcgaggcagagaattacaatatcgagtctgcaattattgctgttctcaggatgaatcagggaaaaaggaacaacgccgaggaaaacctggagcctagtggacgagtccttaagcagtgcggccctctgtgggaagaaggaggaagcggagcgagaattttcggaaaccaaggcctgaatgagggaaggacagaaaacaacaaagcccaggcttcaccgagcgaagaaaataaagctaacaagaaccaattagcaaaggtcaccaataaacagcggagagagcagcagtggatggaaaagaagaagcggcaggaggagaggcatcgccataaagcacttgaatctcggggatcccatcgggacaacaacaggagcgaggctgaagccaacacccaggtaacgctagtcaaaacttttgctgctcttaacatctag

SEQ ID NO: 198285 - DNA, 438 bp, synthetic construct
  misc_feature 1..438: note = Description of Artificial Sequence: Synthetic coding sequence
  source 1..438: mol_type = other DNA
atggcctgcatccactacctgcgggagaaccgggagaagttcgaggccttcatcgagggctccttcgaagagtacctgaagcggttggagaatccacaggaatgggttggacaggtagagatatcagctctgagcctgatgtatcgcaaggactttattatctaccgcgagcccaacgtctcaccaagtcaggtgactgaaaataactttccagaaaaggtgttactctgtttctcaaacggaaaccactacgatattgtgtatccaatcaagtataaagaatcgtctgctatgtgccagagcctgctttacgagctactatatgagaaagtatttaagaccgacgtgtctaaaatcgtgatggagctcgacacattggaggtcgctgatgaggataatagtgagatctcagactccgaagatgatagctgtaaatag

SEQ ID NO: 198286 - DNA, 3345 bp, synthetic construct
  misc_feature 1..3345: note = Description of Artificial Sequence: Synthetic coding sequence
  source 1..3345: mol_type = other DNA
atggaggccgccgtgggcgtgcccgacggcggcgaccagggcggcgcgggtcctcgggaagatgccacaccaatggacgcatatttgcgcaagctgggtctctataggaaactggttgctaaggacgggtcctgcctattccgagcagttgcagaacaggtactgcattctcagagtcgccacgtggaggtgcgcatggcttgcattcattacttaagagaaaacagggaaaagttcgaggcctttattgagggttcatttgaggagtatttgaagcgcttagagaatccccaggagtgggtcggccaggttgagattagtgctctttctctgatgtataggaaagactttatcatttacagagagcctaatgtgtcaccgtcccaagttacagagaataatttcccagagaaggtgctgctctgctttagcaatggcaatcactacgatattgtctaccctatcaagtacaaggagtcttcagccatgtgccagagtctgctatacgaactgctctacgagaaagtctttaagaccgacgtctccaaaatcgtcatggaactcgatactttggaagtggccgacgaggacaactccgagataagcgattctgaggatgattcgtgcaaaagtaagaccgccgccgctgctgcagacgtcaacggattcaaacccctgagcgggaacgaacaactaaaaaataacggcaatagtacctccctcccgcttagtagaaaggtcctgaaatctctcaaccccgccgtctatcggaatgtggaatatgagatttggctgaagtccaagcaagctcaacaaaagagggactactccattgcggcggggctccaatatgaggtgggggataaatgccaggttcggctcgaccacaacggcaagtttctgaacgccgacgtgcagggaatacattccgagaacgggccggtcctggtggaagaacttgggaagaagcatacatctaagaaccttaaagccccaccccctgaatcctggaacactgttagcggaaagaaaatgaagaagccaagcaccagcggtcagaactttcactctgacgttgattaccgggggccaaaaaacccatctaagccaataaaggccccatcagccttgcccccacggttacagcaccctagtggcgtgaggcagcacgcattttctagccatagttccggcagtcagtctcagaagttttcgtcagaacataagaaccttagccgtacacccagccaaatcatacgaaagcccgatcgggaaagagtggaagacttcgaccacacctcacgtgaatccaactactttggcctgagtccggaggaaagaagagagaagcaggccattgaggaaagtaggctcctatatgaaatccaaaaccgggacgagcaagcatttccagctttgagttcctcgtctgtcaaccagagcgccagccagagctcaaatccctgcgtccagaggaagagctcacatgtgggggataggaaggggtctcggcgaagaatggataccgaggagaggaaggataaggactcgatccacggacactcacagctggacaagcggcctgagccttcaacattggaaaacatcactgatgacaaatatgcaaccgtgtctagtccaagtaaatccaagaagttagagtgcccgagccccgccgagcagaaacctgccgaacacgtgagtctttccaaccccgcaccgctgctggttagcccagaggtgcacttgactcccgctgtccccagtctccctgctaccgtccccgcttggccatccgagcctacgacctttggccctacgggcgtgccggcccccatccctgtcctgagtgtcactcagacgctgaccaccggaccggacagtgcggtgtcccaagcacaccttaccccttcacctgtgccggtttctatccaggctgtgaatcaacccctgatgcctctcccacagaccctgtcactttatcaggatcctctgtacccagggtttccctgtaacgagaagggcgatagagccatcgtgccaccatattctttgtgtcagaccggtgaggacctgccaaaagacaaaaacatcttgcgattttttttcaacctcggagtaaaggcgtattcctgcccaatgtgggccccacatagctatttatatcctctgcatcaagcctatctggcagcatgccgcatgtaccctaaagtgccagttcccgtttatccccataatccatggtttcaggaggcacctgcagcacagaacgagtccgattgcacatgtacggatgctcactttcctatgcagacagaggcgagtgtgaatggccagatgccacagcctgaaatcggcccgccaaccttctccagtccactagtaatacccccttcccaggtgtcggagagtcacgggcaactatcctaccaggcagaccttgagtccgagacaccaggacagctcttgcacgcagattacgaagaatcattgtctggcaaaaatatgttcccccagccgagctttggccctaacccatttctgggacccgtgcctattgctccccccttctttccccacgtgtggtatggctatccctttcaggggttcatcgagaatcccgtcatgaggcagaacatagtgttgccttccgacgagaagggggagctggatctgtctctcgagaatctcgacctaagcaaggactgcggtagcgtaagtaccgtcgatgaatttcccgaggctcggggtgagcacgtgcactctctccccgaggcaagtgtctcgtcaaagccggacgaaggaaggaccgagcaatcctcccaaaccagaaaagccgacaccgccctggcctccattcccccagtcgccgagggcaaggcgcaccccccaacacaaattctgaatagagagagagagaccgtcccggtggagctggagccaaagagaactatacagagcttgaaagagaaaacggagaaagtgaaggacccaaaaaccgccgcagacgtggtttcccccggtgctaattcagtggattcacgtgtacagaggcccaaagaagaatcttctgaggacgagaatgaggtgagtaatatcctacgtagcgggcggagcaagcagttttacaaccagacttacggatcgagaaagtacaagtccgattgggggtattcagggaggggtggataccagcatgtgaggagcgaggaaagctggaagggacaacctagcagatctagggacgaaggctatcagtaccatagaaatgtccggggaagaccgttcaggggggaccgtcgcaggagtggcatgggggatggccacaggggacagcatacctag

SEQ ID NO: 198287 - DNA, 3150 bp, synthetic construct
  misc_feature 1..3150: note = Description of Artificial Sequence: Synthetic coding sequence
  source 1..3150: mol_type = other DNA
atggcctgcatccactacctgcgggagaaccgggagaagttcgaggcttttatcgagggatcatttgaagaatatttgaagcggctggagaacccccaggaatgggtaggccaagtggagatttctgcattgagcttgatgtacagaaaggattttattatctacagagaacccaatgtttcgcccagtcaggtcaccgagaataattttccagaaaaggtgctgctctgcttttccaacggcaatcattacgacatcgtgtatcccattaaatataaggagtcttccgccatgtgccagagcctgctgtacgagctgctttatgagaaagtgttcaaaacagacgtctcgaaaattgtcatggagcttgacaccctcgaggtcgccgatgaagacaactcagagataagtgacagcgaagacgatagctgcaaaagcaagaccgccgcagctgctgccgacgtgaacggcttcaaaccattgtctggcaacgagcagctaaaaaacaacggaaacagtacctccttgccactatccagaaaggttctgaaatcattgaatccagccgtctacagaaatgtggaatacgagatctggttaaaatccaagcaggcccaacagaaaagagactacagcattgctgccgggctgcagtacgaagtgggtgacaagtgccaagtccgccttgatcataatggcaaattcctgaacgccgatgtgcagggcatccactcagagaatggacctgtgctcgttgaggaactgggtaagaaacacacatcaaagaatctcaaggcgcctcctcccgagagctggaacaccgtgagcggaaaaaagatgaagaagccttcaacctctggccaaaactttcacagtgatgtggattatcgcggacccaagaacccttcaaagcctattaaagccccttctgctttgcctccaagactgcaacatcccagtggtgttaggcaacatgcattctcctcccatagttccggatcccagtctcagaaattttcttccgagcacaagaaccttagcaggactccttctcagatcataagaaagcctgatcgagagagggtggaagatttcgatcacaccagccgggagagcaattacttcggcctgtcaccagaggaacgaagagaaaaacaggcaatcgaagagagccgcttattgtacgagatacagaacagagatgagcaggcctttcctgctctctcaagcagcagcgttaatcagagcgcctcccaatcttctaatccctgcgttcagcggaaaagctctcatgtaggcgatcgaaaaggatctcgcagacggatggatacggaggagcgtaaggacaaagacagcatccacggccactctcagctggataaaaggcccgaaccgtctaccctggagaacattactgacgacaagtatgccactgtgtcgtcaccaagcaagagcaaaaagttggagtgcccctcccccgctgagcagaagcccgctgaacacgtgtccctgtccaatcctgcccccctgctagtcagcccggaagtgcacttgactcctgctgtgccttctcttcccgcaacagtgcctgcctggccctctgagcccactacattcggaccgacaggcgtgcccgcgcctattcccgttctgagcgtgacacaaactctgacgaccgggcctgactctgccgtttctcaggcccatctgacccctagtcccgtgcccgtgagtattcaggccgtgaatcagcctctgatgccattgccacagactttaagtctctaccaggatccactttatcccggctttccgtgtaacgagaaaggagatcgggccatcgttcctccttatagtctgtgccagactggcgaggacctacccaaggacaagaatatcttaagattcttttttaatctcggggtcaaggcctacagctgtccgatgtgggcacctcactcctacctgtacccacttcaccaggcctatctcgccgcttgtagaatgtacccgaaggttcctgtccctgtgtatccccataatccatggtttcaggaagcccccgccgcacagaatgaaagtgattgcacatgcaccgacgcacactttccaatgcaaacagaggcgtctgtgaacgggcagatgccccagccagaaatcggcccccctacattttcaagtccacttgttatacccccttcccaggtgagcgagtctcatgggcagctctcctatcaggccgatttggaaagcgaaactcccggccagttgctccacgccgattatgaggaatctctttctggaaagaatatgttccctcagccatcgtttgggcctaaccctttcttgggccctgtgcctatcgcgccaccgttttttcctcacgtctggtatggataccctttccagggttttatcgagaatccagtaatgaggcagaatatcgtcctccccagcgacgaaaagggcgagcttgacctctcccttgaaaatttggacctgtctaaggactgtgggtccgtctccacagtggatgagtttccagaggccaggggtgagcacgtacacagcctcccagaagcgtccgtgtcctctaagcccgatgagggccgaaccgaacagtcgagccagaccagaaaggctgacactgccctggcaagcatccctccagtggcagagggaaaggcacacccccctactcagatacttaatcgggagagggagaccgtccctgtagagctcgagcccaagaggaccatccagtccctgaaggaaaagacagaaaaagtaaaggaccctaaaacagcagctgatgtggtgtccccaggggctaattctgtcgactcacgcgtgcaacggcctaaagaagagtctagcgaggatgagaacgaggtctcgaacatcctgcgctcaggcaggtcaaaacagttctataaccagacgtatggcagcaggaagtacaagagcgactggggctattccggtaggggaggttaccagcatgtgcgcagtgaggaatcatggaagggccaaccgtccaggtcccgcgacgaaggataccagtatcacaggaatgttcgggggcggcccttccgcggggacagacggcggagcgggatgggtgatgggcatcggggtcagcacacttag

SEQ ID NO: 198288 - DNA, 420 bp, synthetic construct
  misc_feature 1..420: note = Description of Artificial Sequence: Synthetic coding sequence
  source 1..420: mol_type = other DNA
atggcctgcatccactacctgcgggagaaccgggagaagttcgaggcttttattgaaggctcattcgaggagtatctaaagaggctggaaaatccccaagaatgggttggacaggtcgagattagcgcattaagcctaatgtataggaaagacttcataatttacagagagcccaatgtctctccatcacaggtgaccgagaacaatttccccgaaaaagtcctgctgtgctttagcaatggcaaccattatgatatagtgtaccccatcaaatataaggaaagcagtgccatgtgccagtctctgctctatgagttgctgtatgagaaggtgttcaaaactgatgtctctaaaatagttatggagctcgacaccctggaggtcgctgacgaggataatagcgagatctcagactcctag

SEQ ID NO: 198289 - DNA, 438 bp, synthetic construct
  misc_feature 1..438: note = Description of Artificial Sequence: Synthetic coding sequence
  source 1..438: mol_type = other DNA
atggcctgcatccactacctgcgggagaaccgggagaagttcgaggcctttattgaaggatccttcgaggagtatttaaagaggttggagaatccacaggaatgggtgggccaggtggagatcagcgccctgtcactgatgtatcgtaaggactttataatttacagagaaccaaacgtgtctcctagtcaggtaacggaaaataactttcccgagaaggtcctgctttgcttcagcaatggaaaccattacgatatagtctatccgatcaagtacaaagaaagttccgctatgtgtcagagcctgctgtacgaacttttgtatgaaaaggttttcaaaaccgacgtgagcaagattgttatggagttggataccctggaggtggctgacgaagataactccgaaatttcagactcagaggatgattcttgtaaatag

SEQ ID NO: 198290 - DNA, 1716 bp, synthetic construct
  misc_feature 1..1716: note = Description of Artificial Sequence: Synthetic coding sequence
  source 1..1716: mol_type = other DNA
atgaccatcctgcccaagaagaagccccccccccccgacgccgaccctgctaatgagccaccaccaccgggccccatgcctccagccccccgacgcgggggcggagtaggggtaggaggcggtggaaccggtgtgggcggcggagatcgagaccgggattcaggagtcgtcggcgcccgccctagggccagccctcccccccagggacccctccctggcccaccaggcgctctgcaccgatgggctcttgcggttccacctggtgcggtggccggaccccggcctcagcaggcaagtcctcctccgtgcgggggacccggcggtccagggggggggcctggggatgcactgggcgccgcggctgccggtgttggcgcagccggcgtggtagttggggttggtggagccgtgggagtgggcggctgctgtagtggtcctggccacagcaagaggcggcgacaggcccctggagtgggagctgtgggtggaggaagcccggagcgggaggaggtaggggctggatataactcggaggatgagtacgaagcggccgccgcccgcattgaagcaatggatcctgccaccgttgagcagcaggagcactggttcgagaaggcccttcgggacaaaaagggatttattattaagcaaatgaaggaagatggtgcatgcctgttcagagccgtcgccgatcaggtgtatggggaccaggatatgcatgaggtcgtgcgcaaacactgtatggactacttgatgaagaacgccgactatttttcaaactatgtcaccgaggactttactacttatatcaatagaaagcgcaagaacaattgccacggtaatcacatcgagatgcaggccatggcagaaatgtacaacaggcctgtggaggtatatcaatactctactgggacgagtgcagttgaacctatcaataccttccacggtatccaccagaacgaagatgagcctattcgcgtgagttatcacaggaatatacactataatagcgtggtgaaccccaacaaagcaactattggagtggggctaggactgccatcattcaagccaggctttgcagagcagtctctgatgaaaaacgccattaagacttccgaggaatcttggatcgaacagcagatgctagaggataaaaaaagagccacagattgggaagcgactaacgaggccattgaagagcaggtcgcgagggagtcctacctacaatggctgagggatcaggagaaacaggccagacaggtgcgcggtcctagccagccacgcaaggcaagcgctacttgcagttctgccactgccgccgcctcctctgggctagaggaatggacttctaggtccccacggcagcgatctagcgcttccagccctgaacatcccgaactgcatgccgagctcgggatgaagcctccatcccccgggactgtactggcgctggccaagcccccctcgccatgcgctccagggacgagcagccagttctcagcaggagcggacagagccaccagtccgctggtatcactgtaccctgcgctggaatgcagggcactcattcaacaaatgtccccatcggcgttcggcctcaatgactgggatgatgatgagatattggctagcgtcctcgcagtatcccagcaggaatatcttgatagtatgaagaaaaacaaggttcatagggatccccctcctgacaagagctag

SEQ ID NO: 198291 - DNA, 1701 bp, synthetic construct
  misc_feature 1..1701: note = Description of Artificial Sequence: Synthetic coding sequence
  source 1..1701: mol_type = other DNA
atgaccatcctgcccaagaagaagccccccccccccgacgccgaccccgctaatgaacctccaccaccagggcctatgccgcccgccccccgaagggggggtggcgtcggagtgggcggcggcgggactggggtgggtggtggcgaccgagacagggattctggagtcgtgggagccaggccgcgtgcaagtcctccaccccaaggtcctctccctggacccccgggagccctgcaccggtgggccctggccgttccgcccggcgctgtagccggccccagacctcaacaagccagccccccaccttgcggaggcccgggtgggcctgggggcggccccggcgatgcccttggagctgcggcggctggggtgggggcagctggcgttgtggttggtgtgggaggagccgtcggcgtaggagggtgttgctccgggcccgggcacagcaagcgccggcggcaggccccgggcgtgggggctgtaggaggcgggagcccagaacgggaggaagtcggggcgggctataactcagaggacgagtatgaggctgccgctgcccgaatagaggctatggaccccgccactgtggagcagcaagagcattggttcgagaaggccctgcgagataaaaagggcttcataataaagcaaatgaaagaggacggagcctgcctctttcgcgctgtggcagaccaggtctacggcgatcaggatatgcacgaagttgtgcgcaagcactgtatggattacctaatgaagaatgccgactacttttccaattatgttacggaggacttcacaacctacatcaacagaaagcggaagaataattgtcatgggaaccatatcgagatgcaagctatggcggagatgtacaaccgcccagtggaagtgtatcagtacagcactgaacccataaacacgtttcatggcatacatcagaacgaggacgagccaattcgcgtgagctaccaccggaacatccactacaactctgtcgttaatcccaataaagccaccatcggagtcggacttggtcttcctagctttaaaccggggtttgctgagcaaagtctcatgaaaaatgctattaaaacttccgaagagtcctggatcgagcaacagatgctcgaagataagaaacgtgccaccgactgggaagctacaaacgaggccatcgaggagcaggttgctagagaatcttacttgcagtggcttcgggatcaggagaagcaggcaaggcaggtccgcggcccatcccagcctcggaaggccagtgccacctgcagttcagctactgccgcagctagctcagggcttgaagaatggacatcaaggtccccacgccagagatcttcggcatcttccccagagcatccagaactccatgctgaactgggaatgaaacccccctcccccggcaccgtgttggcgttggctaagccgccctctccttgcgcgccaggcacgagctctcagttctctgcgggtgcggatcgcgctacatctccattagtctctttatatcccgcactggaatgtagggcattgatccagcagatgtcgccatctgcgttcggtctcaacgactgggatgacgacgagattttggcctccgtgcttgcagtcagccaacaggagtatttagactctatgaaaaaaaacaaggtccacagggacccacctccagacaaatcctag

SEQ ID NO: 198292 - DNA, 1701 bp, synthetic construct
  misc_feature 1..1701: note = Description of Artificial Sequence: Synthetic coding sequence
  source 1..1701: mol_type = other DNA
atgaccatcctgcccaagaagaagccccccccccccgacgccgaccctgcaaatgagcccccacctccgggacccatgccacccgcccctagaagggggggcggggtcggagtcgggggaggcggaaccggagttggcggcggggaccgggacagggactcaggcgtggttggtgcccggccacgcgcttcccctccaccccaggggccacttccaggaccaccaggagcgttgcaccgttgggccttagcagtcccaccaggagcagtcgctggccctcgcccacagcaagcatccccccctccttgtggaggtcctggcgggccagggggaggcccgggcgacgcgctcggggctgccgccgctggggtgggggccgccggggtggttgtgggggtggggggcgccgtcggtgtcggtggatgctgcagcgggccagggcactccaaacggcgccgacaggcaccgggtgtaggcgctgtgggcgggggatccccagagagggaagaagtgggggctggatacaactcagaggacgagtacgaggccgctgcagcaagaattgaggcgatggaccctgccaccgtcgagcagcaggagcattggtttgaaaaggctctgagggacaagaaaggcttcattatcaagcagatgaaggaggatggcgcatgtctgtttcgggcagtggccgatcaagtctacggtgatcaggatatgcatgaggtggtgcgtaagcattgcatggactaccttatgaaaaatgccgattactttagcaattatgtgacagaagacttcaccacctacatcaacagaaagaggaagaataactgccatggtaaccatatagagatgcaagccatggccgaaatgtacaacaggccagttgaagtgtatcagtattctaccgagcctatcaacaccttccacgggattcaccagaatgaggacgagccaatccgggtaagctatcacagaaacatccactataatagtgtggttaatcccaacaaagcgactatcggggtgggcctgggtctacccagtttcaagcccggattcgccgaacagagcctcatgaaaaacgcgataaaaacatctgaagaaagttggatcgaacagcaaatgctggaggataagaagagagcgacagattgggaagccacgaacgaggcgatcgaggagcaagtagctagggagtcctacctgcaatggctccgggaccaggagaagcaggcaaggcaggtgagaggaccaagtcaaccccggaaggctagcgctacttgttcatccgctacagctgcagcttcatctggcctcgaagagtggacgtctagaagtcctcggcaaagaagctcagccagctcccctgagcaccccgagcttcatgccgagctgggcatgaagcctccctccccagggacagttctggccttggctaagccaccctctccctgcgcccctggcacttcgtctcagttctccgcgggggcagatagggcgacttcccccttggtttctctctacccagccctggaatgtcgcgctctaatccagcagatgagtccaagcgcatttggcctaaacgactgggacgatgatgaaatccttgcttctgtgctagccgtgtcccagcaggagtacttagactctatgaaaaagaataaagtccatagggatccgccgccagataagtcttag

SEQ ID NO: 198293 - DNA, 1050 bp, synthetic construct
  misc_feature 1..1050: note = Description of Artificial Sequence: Synthetic coding sequence
  source 1..1050: mol_type = other DNA
atgaaggaggacggcgcctgcctgttccgggccgtggccgaccaggtctatggagatcaggacatgcacgaagtagtgcgcaagcactgcatggactacctcatgaaaaacgcggactactttagcaattacgtgaccgaggactttaccacatatattaatagaaagcggaaaaacaactgccacggaaaccatatcgaaatgcaagctatggccgagatgtataatcgtcctgtagaggtttaccagtacagtacggagcctatcaacacctttcacggaatccaccagaatgaggatgagcccatcagagtcagttaccataggaatatccactacaacagcgtagtcaatccaaataaggccacaatcggggtgggcttggggttgcccagtttcaaacctggattcgccgaacaatctctgatgaaaaacgcaattaagaccagtgaagagtcttggatcgaacagcaaatgcttgaggataaaaagcgcgccacagattgggaagcaaccaacgaggctatcgaagagcaggtagcaagggaatcgtacctccagtggctgagagaccaggaaaagcaagctaggcaggtcagagggcctagtcagcctcgaaaagcttccgccacctgcagtagcgctaccgcagccgcctcatccggcctggaggagtggacatccaggtcccccagacaaaggtcttcggcaagttccccagagcaccccgaactccatgcggaactggggatgaagccaccatcacccggcacggttctggccttggccaagcctccaagcccatgcgcccctgggacctcctctcagtttagcgctggtgctgacagagcgacctcccctctcgtctctctatatcctgccctcgaatgcagagccttgatccaacagatgtccccatctgccttcgggttgaacgactgggatgacgacgaaatcctggcctcagtactggctgtatcccagcaggagtacctcgactcaatgaaaaaaaacaaggttcatcgtgaccccccgccagacaagagttag

SEQ ID NO: 198294 - DNA, 1629 bp, synthetic construct
  misc_feature 1..1629: note = Description of Artificial Sequence: Synthetic coding sequence
  source 1..1629: mol_type = other DNA
atgaccatcctgcccaagaagaagccccccccccccgacgccgaccccggaggtactggggtgggaggcggtgatcgggacagggattctggtgtggttggagcgcgccccagggcaagcccaccacctcaaggtccattgcccggcccaccaggagccttgcacagatgggcactagcggtgcctcctggtgccgtcgccggtcctcggccacagcaggcctccccacctccttgcggcgggcctggagggccaggtggcggtcctggcgacgctctgggggctgcggcagcaggggtaggtgcagcaggggtggtagtcggcgtcggcggggccgtcggtgtgggcggatgctgttcggggcccggccatagcaaaagacgtagacaggcgcccggcgtgggtgcggtcgggggcggatcccctgaaagggaggaagtcggcgccgggtacaattctgaggatgagtatgaggccgccgctgcccgcattgaggcaatggaccctgccacagtcgaacagcaagagcattggtttgaaaaagctctgcgggacaagaaaggcttcataatcaagcagatgaaggaagacggtgcatgcctgttccgcgctgttgctgatcaggtttatggcgaccaggacatgcacgaagtggtcagaaagcactgtatggactacctgatgaaaaatgcagattactttagtaactacgtgactgaggacttcactacctatataaacagaaaacggaagaataattgtcacggtaatcatattgaaatgcaggctatggctgagatgtataatagaccagtggaggtctaccagtactcaaccgagccaatcaacactttccacggaatccaccagaatgaggatgagcctatcagagtttcttatcatcgcaacattcactataactccgtggtgaatcctaacaaagctaccattggcgtcggcctggggctgcccagcttcaaaccaggatttgctgagcaatcccttatgaaaaacgccatcaagaccagtgaggagagctggattgagcaacagatgctggaggataagaagagggccacggactgggaagcgaccaatgaggcaatcgaggagcaagtagcaagagagagctatctccaatggctaagagaccaggagaagcaggccaggcaggttcgtggcccatcccagccgcgtaaggcctctgctacctgtagctcagcaactgcagctgcttcatctggcctcgaggaatggacttcacggagccctcggcagcgcagtagtgcctcatcaccggaacaccccgagctgcatgctgaacttgggatgaagcccccatctcccggaacagtccttgctcttgctaaacccccatccccctgtgcccctggtacaagttcgcagttctccgctggcgcggatcgggctacatcccccctcgtcagcttatatccagcacttgagtgccgcgccctcatccagcagatgtccccttctgcatttgggctcaacgactgggacgatgatgaaatcctggcttctgtactcgctgtctcgcagcaggagtaccttgactcaatgaagaagaataaagtgcacagggatccaccgccggataaatcttag

SEQ ID NO: 198295 - DNA, 1335 bp, synthetic construct
  misc_feature 1..1335: note = Description of Artificial Sequence: Synthetic coding sequence
  source 1..1335: mol_type = other DNA
ggcgtggtggtgggcgtgggcggcgccgtgggcgtgggcggctgctgctcggggcccggccatagcaagcgcaggagacaggccccaggagtcggcgccgtgggaggtggctcaccagaaagagaagaagtaggtgcaggttataatagcgaggacgagtacgaagcagcagctgctcggatagaggccatggaccccgccactgttgagcagcaggagcactggtttgaaaaagctcttcgagataagaagggtttcattattaagcagatgaaagaggacggggcatgtctgtttcgcgccgtcgccgaccaggtttacggggaccaagatatgcacgaggtggtcagaaaacattgtatggactacctgatgaagaatgccgactacttctctaactatgtgacggaggactttacaacatacatcaatagaaagcggaaaaataattgccacgggaaccatatcgagatgcaggcaatggcagagatgtacaaccgtccagtagaggtttatcagtattccactgggactagcgccgttgagcctattaacactttccacggcatccaccaaaacgaagatgaacctattcgcgtgagctatcatagaaacatccattacaacagtgtagtgaatcctaataaagccactataggggttgggctggggctgccgtcctttaaaccgggttttgccgagcaatcccttatgaaaaacgccattaagacatccgaggaatcttggattgagcagcagatgcttgaagataaaaagcgcgctacagattgggaagccactaacgaagctattgaggagcaggttgcgagagaatcatacttgcagtggctcagagaccaagaaaaacaggccagacaggtgcgaggtccctctcagccaagaaaggcctccgcaacctgctcctccgcgaccgccgccgctagttcagggctcgaggaatggacaagccggtcccctaggcaacgttcctctgcgtctagccctgagcacccagagctgcatgctgagctggggatgaaaccaccatcccccggcaccgtgttggcgctggcaaagcctccctccccctgcgctccagggacttcgtcacagttttcagctggggcagacagggcaacttcaccactcgttagcttgtaccctgctcttgaatgccgtgctctcatccagcaaatgtccccttccgcctttggtttgaatgactgggacgatgatgaaatactcgctagcgttttagcagtgtcccagcaggaatatctcgactccatgaagaagaacaaagtccaccgggatccccctcccgacaagagctag

SEQ ID NO: 198296 - DNA, 867 bp, synthetic construct
  misc_feature 1..867: note = Description of Artificial Sequence: Synthetic coding sequence
  source 1..867: mol_type = other DNA
atggacgaccccaagagcgagcagcagcggatcctgcggcggcaccagcgagagcgccaggagcttcaggcacaaattcgttccttgaaaaattctgttccaaagacagacaaaaccaagcggaagcagctgttgcaagacgtcgcccggatggaggccgagatggcccagaaacaccgccaagagctggagaagtttcaggatgattcctctatcgagagtgtggtcgaggacttggcaaagatgaatctggagaatcgtccccccagatccagcaaggcccatcgaaaacgagagcggatggaaagcgaggagagagagcggcaggagtctatcttccaagcggagatgagcgagcacctagcaggtttcaagcgggaagaagaagagaagctcgccgctatcttgggggcgcgcggtctcgaaatgaaagccatccctgccgatggtcactgcatgtacagagcgattcaggatcaactcgtgttctctgtgtctgttgagatgctgaggtgtagaacagcctcttatatgaaaaagcacgtggatgaattcctgccgttcttttctaaccccgaaacatccgacagtttcgggtatgatgacttcatgatctactgtgataatattgtcaggactactgcctggggaggacagctcgaactccgggctctttcccacgtgcttaagacccccatagaggtgatccaggctgattccccaacactgatcattggagaagagtacgtaaagaagcctatcattctcgtatatctgcgttacgcctacagcctcggagaacattacaacagcgttacaccgttggaggccggtgctgctggaggcgtgctccccaggcttctctag

SEQ ID NO: 198297 - DNA, 972 bp, synthetic construct
  misc_feature 1..972: note = Description of Artificial Sequence: Synthetic coding sequence
  source 1..972: mol_type = other DNA
atggagccccgggtgcgggtggagggctggaaggtgcccaccagccggtgtaggttcctgctagctcgagtactgggctatctggtggtcatggaggccgtgctgaccgaggagcttgatgaagaagagcagctcctgagacggcaccgaaaggagaagaaagaactgcaggccaagatccagggcatgaagaatgccgtgccgaaaaatgacaagaaaaggaggaaacagctgaccgaagacgtggccaagctagagaaggagatggagcagaagcatagagaagaattagaacaactcaagctaacgacgaaagaaaataaaatcgattcggtggctgtcaatatcagcaaccttgtattggagaaccagccaccgaggatcagcaaggcccagaaaagaagagagaagaaggctgcccttgaaaaagagagagaggagagaattgctgaggcagagattgagaacctgaccggcgcccgtcatatggaatcggagaaattagcccaaattttggcagccagacaactggagatcaagcagataccttccgacggccactgcatgtataaggccatcgaggaccagttgaaggagaaggattgcgctttaaccgtagtagccctgcgatcacagacagctgaatatatgcagagtcatgtggaagattttctgcctttcctaactaaccctaacacaggtgacatgtacacacctgaagagtttcagaagtactgcgaggatatcgtgaataccgccgcatgggggggccagcttgagttaagggctctctctcatatcctgcaaacacctatcgaaattatccaggcggactcgccccctataattgttggagaagaatactctaagaagcccctgattttagtgtacatgaggcatgcatatggtttgggtgaacactataactccgtcacaagactcgtgaacattgtgacagagaactgcagttag

SEQ ID NO: 198298 - DNA, 579 bp, synthetic construct
  misc_feature 1..579: note = Description of Artificial Sequence: Synthetic coding sequence
  source 1..579: mol_type = other DNA
atgatcagcaaggagaagaaggccgccctggagaaggagcgggaggaacgaatcgcggaagccgagatcgaaaacttgaccggagcccggcacatggagagtgaaaagctcgcacagatcctggctgctcgccagttggagatcaaacagatcccatctgacggccactgtatgtataaagctattgaggaccagctgaaggagaaggactgcgccctaacagtggtggctctcagatcacagacagcagagtacatgcagtctcacgtggaagacttcttgccttttcttactaatcctaataccggagacatgtataccccagaagagttccagaaatactgcgaggacatcgtgaacactgcagcatgggggggtcaattggagctgcgagccctctcccatatcctgcagacccccattgagattatccaggccgactccccgcctatcatcgtgggtgaagagtactccaaaaaacctttaattcttgtatacatgcggcatgcctatggcctcggcgagcactacaacagcgtgacccgcttagtgaacatcgtgaccgagaactgctcctag

SEQ ID NO: 198299 - DNA, 2781 bp, synthetic construct
  misc_feature 1..2781: note = Description of Artificial Sequence: Synthetic coding sequence
  source 1..2781: mol_type = other DNA
atggtgagcagcgtgctgcccaaccccaccagcgccgagtgctgggccgcccttctgcatgaccctatgactctggatatggatgctgtcctgagcgatttcgtgaggagcaccggagctgagccagggcttgcgcgggacctcttggagggcaagaattgggatctgacagctgcgctgagtgactatgagcaactgcggcaagttcacacggctaatcttccccacgtctttaatgaaggtagggggccgaaacagcctgaacgcgagccacaacctgggcacaaagtggagaggccatgtctgcaaagacaggatgatattgcccaggaaaaacgcttgagcagaggcatttctcatgcctcctctgcaatcgtgtctcttgcccgctcacatgtagcttctgaatgtaacaatgagcagttccccctggagatgccaatctatacatttcagctcccagatctgtctgtgtacagcgaggactttaggtcattcatcgagcgagacctcatcgaacaggccaccatggtagcccttgagcaggctgggcgactgaactggtggtccactgtctgcacctcatgtaaaaggctccttcctctggccactactggagatggaaactgcctgctgcacgccgcaagcctcggcatgtgggggttccacgatcgcgatctggtgctcaggaaagccttatatactatgatgagaactggagccgaacgtgaggccctgaaacgccggtggcgctggcagcagactcagcagaacaaggaggaggagtgggaaagagagtggactgagctgcttaaactcgcaagttccgagccccggacccacttttccaaaaacggtggtacagggggaggagtagataatagtgaggatcctgtgtacgagtctctggaagaatttcacgttttcgttctggctcatatcctgcggcgacccattgtcgtggtcgcagatacaatgctcagggacagtggcggggaagcctttgcaccaatcccatttggcggaatttatctgcctctggaggtgccgcccaatcgctgccactgctcccctctagttctggcgtatgatcaggctcacttctccgccctggttagtatggaacaacgcgaccagcaaagggagcaagcagtgatcccgctcacggactccgagcataagttgctgccactccactttgcagtggatccaggtaaagactgggaatggggcaaagatgacaatgataacgcccgcctagctcacctaattctgtcgctggaagctaagctcaacctccttcacagctatatgaacgtaacctggatcaggattccgtctgagacccgagcccctctggctcaacctgaaagtcccactgccagcgcaggcgaagatgtccagagcctcgccgattctctcgattctgatagggatagcgtgtgttcgaactctaacagtaataatggtaagaacggcaaggacaaggaaaaggagaaacagcggaaggagaaggataagacacgcgctgattctgttgccaataaactgggtagtttctctaagactttgggcatcaagctcaagaagaatatgggcggactggggggtctggtgcacggtaagatgggacgagctaactcagccaatgggaagaacggcgatagcgccgagagagggaaagaaaaaaaagccaagtctagaaaaggcagtaaagaagagtcaggagcgagtgccagcacatcccctagcgagaagaccactccaagtcctaccgacaaggcagcaggtgctagccccgccgagaagggaggcggccctcgcggggacgcttggaagtacagtaccgacgtcaagctgtctcttaatatacttagagccgccatgcaaggagaacgaaagtttattttcgcaggacttctgctcacttcccatagacatcagtttcacgaagagatgatcggatattacctcacatctgcccaggagcggttttctgcggagcaggagcagagaagacgggatgctgctaccgctgcagctgcagccgctgcggcggccgctgccacagctaaacggccgccacgacgccccgaaactgaaggtgtgccggtgccggaacgagcgagccctgggccaccaacgcagcttgttctgaaactgaaggagcgcccttctccaggacctgctgcgggacgtgcagccagagcagccgcaggcggcaccgcgagtcccggcggaggcgcacggagagccagcgccagcggacccgtgcccgggcggtctccccctgcgcccgctaggcagagtgtaatacacgtgcaagcctcgggggctcgagatgaagcctgcgcacctgccgtgggcgcgctgcgcccctgcgccacctacccccagcagaaccgctctcttagtagccagagctactccccagccagagcggccgctttgcgaaccgttaataccgtggagagtctggctcgtgcagtgcccggggccctgcctggagccgccggtaccgccggtgcagcagaacacaaaagtcagacctacaccaacggcttcggggctctgagagacgggttggaatttgcagacgctgacgctcctacagcacgcagtaatggagagtgtggaagaggcgggccagggcctgtccagagacgctgtcagagggagaattgcgctttttatggccgagctgagaccgaacattattgctcatattgttaccgggaagaattgcggaggcgacgggaggccagaggagccagaccttag

SEQ ID NO: 198300 - DNA, 2802 bp, synthetic construct
  misc_feature 1..2802: note = Description of Artificial Sequence: Synthetic coding sequence
  source 1..2802: mol_type = other DNA
atggtgagcagcgtgctgcccaaccccaccagcgccgagtgctgggctgccctgttacacgacccaatgaccctcgacatggatgctgttttatccgacttcgtgagatcaaccggggccgagcctggtcttgcccgcgacttactcgaagggaagaattgggatctgacagctgcactgtccgattacgagcagttgcgccaggtgcacacagcgaacctgccgcatgtttttaatgaggggcgagggcctaaacaacccgaaagggagccccagcctgggcacaaggtggaacggccctgtctgcaacggcaagatgatatcgcgcaggagaagcgcctctcccgcggaatcagccacgcctcttctgccattgtgagcttggcccggagccacgtggcctctgaatgtaacaacgagcagttcccgctggagatgcccatctatacctttcagctgcctgatctctccgtctacagcgaggatttccggtccttcatcgagcgcgatctaatcgagcaggccaccatggttgcactcgagcaagcggggcggctgaactggtggtcaacggtctgcaccagttgtaaacgacttctccccctggcaaccacaggggacggcaattgcttgttacacgcggctagtctgggcatgtggggcttccacgatagggatctagttttgcggaaagcattgtataccatgatgagaaccggcgccgaacgggaagctctgaaacgccgctggcgatggcagcaaacccagcagaacaaggagtccgggttggtttataccgaggaagaatgggaaagagaatggacagagctgctgaagctcgcctcctctgagccccgcactcacttttctaagaatggaggaacggggggaggagtggataacagcgaggaccccgtctatgagagtctggaggagttccacgttttcgttctggctcacatactcaggaggccaatcgtggtcgtcgccgataccatgttgagggatagcggaggtgaggcctttgcgccaatccctttcggaggaatctacttgcctctcgaagtgcctcccaatcgctgtcactgtagtcccctggtcctggcttatgatcaggcgcacttttctgctctggtttcaatggagcagcgggatcaacagcgtgagcaggccgtcatcccactgacagactcagagcacaaattgcttcctctgcatttcgctgtcgatcctggtaaagactgggagtggggcaaggatgacaacgataatgcccgtctggcacatttgatcctttctctggaagccaagttgaacctgctgcatagctacatgaacgtcacttggatcaggatccctagcgaaactagggcgcccctggcacagccagagagccccacggcaagcgctggcgaagatgttcagtcccttgcagattccttagattccgatcgggactccgtctgctcgaactccaattccaataatggcaaaaacggaaaagataaggagaaagaaaagcagcggaaagagaaggataaaaccagagccgatagcgtcgccaataagctggggagcttcagtaaaacgctgggcattaaattgaagaaaaacatgggaggcctgggaggcctggttcacggcaagatgggtagagccaattcagccaatggcaagaatggagatagtgcagaacgcggaaaggagaagaaggccaagagcagaaagggctcaaaagaggagtccggggctagtgcttcaacctctccttccgagaaaactaccccctcaccaacggacaaggccgccggcgcttctcctgcagaaaagggaggaggccccagaggagatgcatggaaatatagtacggacgtcaaactttcattgaatatcctgcgcgccgctatgcagggcgagcgcaagttcatctttgcgggattgttgttgaccagccatcgacatcagttccacgaagaaatgataggatactacctcacctcagcacaggaaagatttagcgccgagcaagagcaacgtcgtcgcgacgccgccactgccgccgctgcggcggccgctgccgcagctgccacggcaaagaggcctcctaggagacccgagacagagggagtgcctgtccccgaacgggccagtcctggaccccctactcaactggtgttaaagctcaaggagagaccctccccaggccctgctgctggacgagcagcgcgagccgcggccggcggtaccgctagtcctggcggtggcgcgcgccgcgcttccgcttcgggtccagtccccgggagaagtccacccgctcccgcaaggcagtcagtgattcacgtgcaggcctcaggcgctcgggacgaggcctgtgcaccagcagtgggcgcactgcggccctgtgccacatacccacagcagaatcgttccctcagtagccagtcatattcgccggcacgtgcagccgccctgcggacggtcaatactgtggagagtcttgctcgggctgtgcccggcgctctacccggagccgctgggacagccggcgcagccgaacacaaaagccagacatataccaacggcttcggtgccttgagagatggcttagaattcgctgatgctgatgcccccaccgcaagatccaacggggaatgcggacgaggggggcccggtcccgtccagcgccgctgtcaaagggagaattgtgccttttacggtcgagccgaaacggagcactactgctcctattgctatcgtgaggagctaagacgccgtcgggaagcccgcggcgcgagaccatag

SEQ ID NO: 198301 - DNA, 333 bp, synthetic construct
  misc_feature 1..333: note = Description of Artificial Sequence: Synthetic coding sequence
  source 1..333: mol_type = other DNA
atggtgagcagcgtgctgcccaaccccaccagcgccgagtgctgggcggccctattgcatgatcctatgactctagacatggatgccgtgctaagtgatttcgtaagatcaaccggggccgaaccgggcctggctcgcgatttgctggaaggcaagaactgggacctgaccgcagccctaagcgattatgagcagctcagacaggtgcatacggccaacttgccccatgtctttaacgagggccgcggtcctaaacagccggagcgtgaaccacagcctggccacaaggtggagcgaccctgtttgcagcgtcaagacgatattgcacagtag

SEQ ID NO: 198302 - DNA, 2532 bp, synthetic construct
  misc_feature 1..2532: note = Description of Artificial Sequence: Synthetic coding sequence
  source 1..2532: mol_type = other DNA
atgaccctggacatggacgccgtgctgagcgacttcgtgcggagcacgggagccgaacccggactggccagagatctgctggagggaaaaaactgggacgtgaacgctgccctatcagactttgagcagctgcggcaggtgcatgcagggaaccttccccctagtttcagtgaagggtctgggggttccagaaccccagaaaagggtttttccgacagggagccaacaaggcccccacgtccaatattacagaggcaggacgacatagttcaagagaagcgcctgtctaggggcatcagccatgctagttcttccattgtgtctttagctcgcagtcatgtaagctccaatggtggcggcggtgggtctaacgagcacccattggaaatgcccatttgtgcctttcaactgcccgatctcactgtctataacgaggattttaggtcgtttatcgaacgggacctgatcgaacaatctatgctggtcgccttggagcaggcaggtcggctgaactggtgggtatctgtcgaccccacctctcagcggctcttgcccctagcaacgacaggagatggtaactgtctgcttcacgccgcctctctgggtatgtgggggttccacgatcgggacctcatgctgcggaaggcgttatacgccttgatggagaaaggagttgagaaagaggcccttaagcggcgttggaggtggcagcaaactcagcagaacaaggagtcaggtcttgtgtataccgaagacgagtggcagaaagaatggaacgagcttataaaactcgctagctctgagcctcgcatgcatctggggacaaacggcgccaactgtggtggcgtggagagctcagaggagcctgtgtacgaatccctggaagagttccacgtgttcgtactggcacacgttttgcgcagacctattgtcgtggtcgctgataccatgctgcgggacagcgggggagaggcattcgcacctatcccttttggtggcatttacctgccactggaagtccccgcctcccaatgccatcgcagccctttggtgctggcatacgaccaagcccacttctcagctctggtgagcatggagcaaaaggagaatactaaggagcaggctgtgatccccctgacagacagtgaatataagctgttgccactgcacttcgcagttgatcccgggaaaggctgggaatggggaaaggatgattcagataacgtgcgcttggcctcagtcatactgagtctagaggtaaaacttcacctgctacattcctacatgaacgttaagtggattcctctgagctctgacgcacaagctccactagcgcagccagagtctcccaccgcttctgccggagacgagccccgttccacaccggaatccggggacagcgataaggagtcggtgggctcaagcagcacgtctaatgaaggaggccggaggaaggagaagtctaagagggatagggaaaaggataaaaagcgcgctgactccgtagcaaataaactcggatccttcggaaagactttagggagtaagcttaagaagaacatgggcggcctgatgcattccaagggatcgaaacccggaggggttggaaccgggctgggtggatccagtggaaccgagactttagaaaagaaaaaaaagaattcgctgaagtcctggaagggaggtaaggaagaggctgccggcgatggaccagtaagtgagaaaccgcccgcagagagcgtcggaaatggtggtagtaaatactcccaggaagtaatgcagtccctgagcatcctgaggacagcaatgcagggggaaggcaagttcatattcgtcgggaccctgaaaatggggcatagacaccagtaccaggaggaaatgatccaaagatacttgtctgatgccgaagagcgatttctcgccgagcagaagcagaaggaggctgaaaggaagattatgaacggcggcatcggcggtggccccccccctgctaagaagcccgaaccggacgcaagggaggaacaacccacaggcccacctgccgaaagccgggctatggcgttcagcaccgggtaccccggggatttcactatccccaggccgtccggggggggggtgcactgccaggagcctagacgtcagcttgcaggcggtccctgtgttggtggattaccaccttatgcgactttccctcggcagtgcccacctggtagaccttatccccatcaggacagtatcccatcccttgagccgggcagtcattctaaggatggactgcaccggggcgcgctgctgccacccccctatagagttgcagacagctactctaacggataccgtgagcctccagaacctgacgggtgggcgggaggccttcggggcctcccacccacccagacgaagtgtaagcagcctaactgcagtttttacggccaccctgagaccaataacttttgttcttgctgttatagagaggaattacgaagaagagaacgcgagccagatggtgagctgctggttcacaggttttag

SEQ ID NO: 198303 - DNA, 1284 bp, synthetic construct
  misc_feature 1..1284: note = Description of Artificial Sequence: Synthetic coding sequence
  source 1..1284: mol_type = other DNA
atgaccctggacatggacgccgtgctgagcgacttcgtgcggagcactggcgctgagcctggacttgccagggacttactggaggggaagaactgggatgtgaacgccgccttatcagacttcgaacaactccgccaggtccatgccgggaatttgccaccgtcttttagcgagggatccggagggtctagaacaccagagaaaggcttcagcgaccgggaacccacaagacctccacggccaattcttcagcgacaggacgatattgtgcaggaaaaaaggctgagcagggggatttctcacgcgtcaagcagcatcgtatccttagcaagatcccacgtgtcctcaaacgggggtgggggcggaagcaatgagcaccctctggagatgccaatctgcgcctttcagttgcctgatctaaccgtgtataatgaagatttccgaagcttcattgagagagatttaatagagcagagcatgctggtggctctcgaacaggcagggcggctgaattggtgggtctccgtcgaccctacatcacagagactcctgccactggccacaacaggcgacggtaactgcttactccatgctgcatcactcgggatgtgggggttccacgacagagatttgatgctgcgaaaggccctgtatgcattaatggagaagggggtggaaaaagaagccctcaagagacgctggagatggcagcaaacccagcagaacaaggaatccgggctcgtatacaccgaagatgaatggcaaaaggagtggaatgagttgataaagctggctagcagcgagcctcggatgcaccttgggactaatggcgccaactgtgggggcgtcgagagctctgaggaaccagtttatgagtcactggaggagtttcacgtgtttgtgctggcccacgttctgagacggcccattgtggtagtagccgacacaatgctccgagactccggtggcgaagcctttgctccgattccattcggaggcatctacctgccacttgaggttcccgcctctcaatgtcaccggtctccattggtgctggcatacgatcaggctcactttagtgctctagtttctatggagcagaaggagaataccaaagagcaagctgtgatcccgctgaccgatagcgaatataaactcctgcctctgcactttgcagtcgatcccggcaagggctgggaatgggggaaagacgactctgacaacgttcgcctggcttcagttatcctgagcttggaagtcaaattacacctgctgcactcttag

SEQ ID NO: 198304 - DNA, 2445 bp, synthetic construct
  misc_feature 1..2445: note = Description of Artificial Sequence: Synthetic coding sequence
  source 1..2445: mol_type = other DNA
atgaccctggacatggacgccgtgctgagcgacttcgtgcggagcacaggagcagagcctggactcgcaagggacctacttgagggaaaaaactgggatgtcaacgcagccctgtcagactttgagcagctcaggcaagtgcatgccggtaacttgccgccaagcttctcagaaggtagcgggggttctcggacccccgaaaagggtttttcggacagggagcccactcgacccccaagaccgatccttcagagacaagatgacattgttcaggagaaaaggctaagcagaggtatctctcatgcatcttctagcatagtgtcacttgcccgatcacatgtgtcatcaaatgggggaggcgggggcagcaatgagcaccctctggaaatgccgatttgtgcgttccagctgccagacctgaccgtgtataacgaggattttagatcatttattgagcgcgatcttatagagcagagcatgctggtggcactagaacaagctggcagactgaactggtgggtaagtgtggaccctacatcacagcgacttcttcccttagctacgaccggagacggcaactgtctgcttcacgccgcctctctgggaatgtggggcttccatgatcgcgaccttatgctaaggaaagcgctttatgcactcatggaaaagggggtggagaaggaggccctgaaaaggcgctggaggtggcagcaaacacagcaaaataaagagagcggccttgtttatactgaggatgagtggcagaaagagtggaatgagctgatcaaactagccagctctgagccgagaatgcacctgggtacaaatggcgccaattgtggcggcgtcgaatcctccgaggaacccgtgtatgaatcactcgaagagttccatgtgttcgttcttgctcatgtgctcaggcgccctatcgtcgtggtggccgacacaatgctgcgagactccggcggcgaggcatttgccccgataccatttggggggatctatctgccattggaggtgcccgcgtcgcagtgtcacaggagcccactggtgctggcctatgatcaggctcatttcagtgcccttgtttctatggagcaaaaggaaaatactaaggagcaggctgtgattcctctcaccgactcagaatacaagcttctacccctccatttcgctgtggatcccggtaaaggatgggagtgggggaaggatgattctgataatgtgcggctcgcgtccgtaatattatcccttgaggtgaaactccatttgctccattcatatatgaacgttaaatggatccccctgtctagcgacgcccaagccccattggcacagcctgaatcccccacggcatctgctggagatgagccacgcagtaccccagagtcaggtgacagcgacaaggaatctgtgggtagctctagtacttccaacgaggggggccgtcgcaaagaaaagagtaaacgcgatagagagaaggacaagaagcgagcggacagtgtggcgaataaacttggttcttttggcaaaaccctcggaagcaagctcaagaagaatatgggcggcctcatgcattcaaaaggatccaaacctggcggcgtcgggaccggcctcggcggctcctccgggacagaaactttggaaaagaagaaaaagaattccctgaaatcatggaaaggcgggaaagaagaagccgccggcgatggaccggtttcggaaaagccacccgctgagtcggtgggcaacggcgggagcaagtacagtcaggaggtcatgcaatccttgagcatactaagaacagccatgcagggggagggaaaatttatctttgtcggtaccctgaaaatgggtcaccggcatcagtatcaggaagagatgatccagcggtatttgtccgacgccgaagagcgttttctagctgaacaaaagcagaaggaagctgaaaggaagataatgaatggcggaatcggcggtgggcctccacccgccaaaaagccagagccggatgcaagagaggaacagcccactgggcccccggcagaatcccgggccatggcattctcaaccggttaccccggggattttactataccgcggccctcaggaggcggagtgcattgccaagaaccaaggaggcagctcgccggcggcccatgcgtcgggggcctgcccccctacgccactttcccaaggcagtgcccacccgggcgcccttatccccatcaagacagcatcccaagtctggagcctgggtcacactcaaaggacggcctccatcgcggagcgctgttacctccaccctacagagttgccgattcctattctaacggttatagagaacctccagagccagacgggtgggccggcgggttacgaggactccctccgacccagacaaagtgcaaacaaccagacggagaactgttagttcaccgattttag

SEQ ID NO: 198305 - DNA, 927 bp, synthetic construct
  misc_feature 1..927: note = Description of Artificial Sequence: Synthetic coding sequence
  source 1..927: mol_type = other DNA
atgtgcggcgtggagggctgctgccagggcggcgccacccggcggggttctctcccaggagggcgacagctggctacgcgcaagcgttctgtcgtgcgccgttgtctcaaaatggccgctgaagaaccgcagcaacagaagcaggagccactgggctccgactccgaaggggttaattgccttgcatacgatgaggccatcatggcccagcaggaccggatacagcaggaaatcgctgtccagaacccactggtgagtgagcggctggagctgagcgtgctctacaaggagtatgccgaagacgacaacatctatcaacaaaagataaaagacctgcacaaaaagtactcctatatcaggaagacacgacctgatggaaactgcttttatcgagcctttggattttctcacttagaagccctgctcgatgattcaaaggagttacagcggttcaaggctgtgagcgcgaaaagcaaggaggacctggtgtcacagggatttacagaattcacgatagaggattttcacaacacctttatggacctaattgaacaggtggagaagcagacaagcgtggctgacctgctagcttcattcaacgaccagtcgaccagcgactacctcgtggtctacttgaggttgctgaccagtggctatctgcagagagagtcgaaatttttcgaacactttattgaagggggacgcacagtgaaagagttttgccaacaggaggtcgaaccaatgtgcaaagagagcgaccacattcacatcatcgctctcgcccaggcgctttccgtctctatccaggtagagtacatggatcgcggtgaaggcggaactacaaacccccacatatttcccgaaggttcagagcctaaggtgtatctgctgtacagacccggccactatgacatattgtataagtag

SEQ ID NO: 198306 - DNA, 816 bp, synthetic construct
  misc_feature 1..816: note = Description of Artificial Sequence: Synthetic coding sequence
  source 1..816: mol_type = other DNA
atggccgccgaggagccccagcagcagaagcaggagcccctgggcagcgattctgaaggtgtgaactgcctcgcatacgacgaggctataatggcgcaacaggatagaatccagcaggagattgcagtgcagaacccccttgtatccgagcgccttgaactgagcgtactatacaaagagtacgctgaggacgacaatatctatcagcaaaagatcaaagacctccacaaaaagtattcttatataagaaaaacccggcccgatggaaactgcttctatagagctttcggattctcacacctagaagctctgctcgatgattcgaaagaactgcagcgctttaaggctgtgtcagcaaagagcaaagaggacttggtgagccaaggcttcacagagtttaccatcgaagacttccataacactttcatggacctaattgaacaggttgaaaagcagacctcagtcgccgacctgctggcttcctttaatgaccagagtaccagcgactatctggtcgtctacttgcggcttctcacttccgggtatctgcagcgcgagtctaagttctttgagcattttatcgagggcggccgcaccgtaaaggaattttgtcagcaagaggtcgagcctatgtgcaaagaaagcgaccacattcatattatcgctctcgcacaggctctgagtgtgtccattcaggtggagtatatggatcgcggggagggaggcaccacaaacccacatatcttccccgaggggtccgaacccaaagtgtacctcctgtatagacccggacactacgatatactatataaatag

SEQ ID NO: 198307 - DNA, 816 bp, synthetic construct
  misc_feature 1..816: note = Description of Artificial Sequence: Synthetic coding sequence
  source 1..816: mol_type = other DNA
atggccgccgaggagccccagcagcagaagcaggagcccctgggcagcgacagtgagggagttaactgtctggcttacgacgaggccatcatggcacagcaggacagaattcagcaggagatcgctgtacagaacccactcgtgtcagagcgactggaactgtcagtgctctataaagaatacgccgaggatgacaacatctatcagcagaaaatcaaggatcttcataaaaaatactcttatattcggaaaaccaggccagacggcaactgcttctatcgggcctttgggttttcacatctggaggctttactggacgactctaaagaacttcagcgatttaaagccgtatcggccaagtctaaggaagatctcgtaagtcagggattcaccgaatttacaatagaggacttccacaacacctttatggatcttatcgagcaggtggaaaagcaaactagtgtggctgatttactggcatcgtttaacgatcagagcacgtccgactatctggtggtttatttgcggttgttgacctccgggtatctgcagcgggagagtaaatttttcgaacacttcatcgagggaggccggaccgtcaaggaattttgtcagcaggaagtggagcccatgtgcaaggagtcagatcacatccatatcattgccctggcccaggcactgtcggtaagcattcaggtggagtatatggatcggggggagggcggcactacaaacccccatatctttccagaaggcagtgagccaaaagtttatctgctgtaccgcccaggccactacgatattctgtataagtag

SEQ ID NO: 198308 - DNA, 843 bp, synthetic construct
  misc_feature 1..843: note = Description of Artificial Sequence: Synthetic coding sequence
  source 1..843: mol_type = other DNA
atggccgccgaggagccccagcagcagaagcaggagcccctgggcagcgatagtgagggcgtgaattgtctcgcctatgatgaagccattatggcacagcaggaccgaattcagcaagaagacatgaccgacccctgcctgttacagattgctgtgcagaatcccctggtcagtgagcgcttggaattatccgtcctatacaaggagtatgctgaggatgataacatttaccaacagaagatcaaggacctgcataagaaatatagttacattagaaaaactcgaccagatggcaactgcttctacagagccttcggctttagccatcttgaagcactactggacgattcaaaagagctgcagaggtttaaggccgtctccgctaagtccaaggaagatctagtgagccagggttttacagagtttaccatcgaggacttccataatacatttatggacctgattgagcaagtggagaagcaaactagcgttgctgacttactagctagtttcaatgaccagagcactagtgattatctagtcgtgtacctccggctcttgacgtcaggatatctgcagcgagagagtaaattttttgagcacttcattgaaggcgggcggacggtgaaagagttctgccagcaggaggtcgagccaatgtgcaaggagagtgaccatattcacattatcgctttggcccaggcactctcagtttcaatccaggtggagtacatggataggggtgagggggggactacaaatccacacattttccccgagggctctgagcccaaggtttacctgctgtatcgtccgggccactacgacatcctctataagtag

SEQ ID NO: 198309 - DNA, 705 bp, synthetic construct
  misc_feature 1..705: note = Description of Artificial Sequence: Synthetic coding sequence
  source 1..705: mol_type = other DNA
atgagcgagaccagcttcaacctgatcagcgagaagtgcgacatcttgagcatcctgcgggaccacccagaaaatcgaatctaccggaggaaaatagaagaactcagtaaacgtttcactgctatacgcaaaactaaaggcgacgggaactgcttttatagggcattaggttactcctacctggaatcccttttggggaagtctcgagagatcttcaagttcaaggagcgcgtattgcagaccccaaatgatctattggcagccggattcgaggaacataagttcagaaatttctttaacgctttctacagtgtcgttgagctggtggagaaggacggttccgtctcatcgctgctaaaggtgttcaatgatcaaagcgcaagtgaccacatcgtgcagttcctgcggcttctgaccagcgcgtttataaggaatagggccgactttttcagacatttcattgatgaggaaatggatattaaagatttctgtacccatgaggtggaaccaatggcgactgagtgtgatcacattcaaatcaccgcactgagccaagctctctcaatcgccttgcaggtggagtatgtagatgagatggataccgccctgaatcaccatgtctttccggaggcagcgaccccctctgtatacctgctctacaaaaccagtcactacaatatattgtacgctgcagataagcactag

SEQ ID NO: 198310 - DNA, 222 bp, synthetic construct
  misc_feature 1..222: note = Description of Artificial Sequence: Synthetic coding sequence
  source 1..222: mol_type = other DNA
atgagcgagaccagcttcaacctgatcagcgagaagtgcgacatcctgagcattctgcgcgatcatcccgaaaatcgcatctatcggcgcaaaatcgaggagctgagtaagaggttcacggcgatacggaagactaagggggatggaaattgcttttatagggctctggggtactcttacttggaatcactccttggaaaaagccgcgaaattttcaagtag

SEQ ID NO: 198311 - DNA, 753 bp, synthetic construct
  misc_feature 1..753: note = Description of Artificial Sequence: Synthetic coding sequence
  source 1..753: mol_type = other DNA
atggccgccctgagctgcctgctggacagcgtgcggcgggacatcaaaaaagtggaccgagaactgagacaattgaggtgcattgatgagttcagtactcggtgtctgtgtgacctgtatatgcacccgtactgctgttgcgacctccacccctacccatattgcctctgttactcgaaacggtctcgctcttgcggtctttgcgacttgtatccgtgttgcctctgtgattacaagttgtactgcctgcgtccgtcactccgctcactcgagaggaaggcaatcagagcaatcgaagacgagaaacgggagctggccaaactgagacgcacaacaaaccggatcctggctagctcttgctgttctagtaatattctgggttctgtcaacgtatgtggctttgagcctgatcaggtaaaagtgagagtgaaggacgggaaggtatgtgtttccgcggagagggaaaatcggtacgactgtttgggctccaagaagtactcttacatgaacatttgcaaggagtttagtcttccgccctgtgtggatgagaaagatgtgacatactcctacggtctcggcagctgcgtgaagatcgagtctccctgctacccctgtacatccccctgctcaccatgtagtccctgttctccatgtaatccctgctctccatgtaacccatgttctccttacgatccgtgcaacccttgttatccctgcggcagtcggttttcatgccggaagatgatcctttag

SEQ ID NO: 198312 - DNA, 2418 bp, synthetic construct
  misc_feature 1..2418: note = Description of Artificial Sequence: Synthetic coding sequence
  source 1..2418: mol_type = other DNA
atgaaggaccggagcagcaccccccccctgcacgtgcacgtggacgagaacacacccgtgcatgtgcacattaagaagctacccaagccgtccgccacaagcagccaaaaatctcacaagagagggatgaagggggacactgtaaacgtgcgtagatccgtgagggtgaaaaccaaaaacccgcctcactgtttagaaatcacccccccttcaagcgaaaaactcgtatcagtgatgagactgagcgacctgagtactgaggatgatgattctggtcactgcaagatgaaccgctatgacaaaaaaatcgacagcttgatgaacgcagtgggctgtctgaaaagcgaggtgaaaatgcagaaaggcgagcgccaaatggccaagagattcctcgaggagcggaaggaggagttggaagaagtggctcatgaactggcggaaactgaacacgaaaacacagtgctgcgccataatatcgagcgcatgaaggaggaaaaggactttacaatcctccagaaaaagcacctgcagcaggagaaggagtgcttgatgtccaaactggttgaagccgagatggatggtgccgccgctgcgaagcaggttatggctttgaaagacacgattggcaaactgaagactgagaaacagatgacctgcacggatatcaacacattgaccaggcagaaggagctgctgttacagaaactgtccactttcgaagagactaatcgcactctccgggacttactgcgtgagcagcactgcaaggaggatagcgaacggcttatggagcagcagggtgcactgctgaaacggctggccgaggctgatagcgagaaggcccggctgctgctgctcttgcaggataaggacaaagaagtggaggagcttttgcaagagattcagtgtgaaaaggcgcaggccaagacagctagtgagttgtccaagtccatggagagcatgcgcgggcatttacaggcacagctgagatctaaggaggccgagaacagcaggctgtgcatgcagatcaagaatctggaaagaagtgggaatcaacataaagcagaggttgaagcaataatggaacaactgaaagagctgaaacagaagggcgacagagacaaagagagcctcaaaaaggctattagagctcagaaagaacgagcagaaaaatccgaggaatacgcagagcagcttcatgttcagttggccgacaaagacctttatgtggctgaggccctgagcaccctggagtcttggcgatctaggtacaatcaagtcgtcaaagagaagggagatttagaactcgagataatcgttctgaacgatagagtgacggacttagtcaatcaacagcagaccctggaggagaagatgcgggaggacagagattccctcgtggagcgcctccaccgccagacggctgagtactcagcttttaagctggagaatgagcggctgaaggcctcatttgccccgatggaagacaagctgaaccaggcccatctggaagtgcagcagctcaaggccagcgtgaagaattacgagggaatgattgataactataagagtcaggtaatgaagacacgtttggaggcagatgaggtagcggctcagctggagagatgcgacaaagaaaacaaaatcctgaaagacgaaatgaacaaggaaatcgaagctgctagacggcagttccagtcccagctggctgacttacaacagctcccagacatcctgaagatcactgaggcaaaactggccgagtgtcaggatcagctccaagggtacgagagaaagaacatcgacctcactgcaattattagcgacttgaggtcgcgcatcgaacatcagggagataagctggagatggccagggagaaacaccaggcttcccagaaggagaacaaacaacttagcctcaaggtggacgagcttgaaagaaaactagaggccacgagtgcacaaaatattgagttcctacaagtgatcgcaaagcgggaggaggccattcatcagtcccagctgcgcctggaagaaaagaccagagagtgtggcactctggccaggcagctggaatctgctattgaggacgcccgtagacaggttgagcagaccaaggaacacgctttgtctaaagagagggctgcccagaacaagatcctggatctggagacccagttgtctaggaccaagaccgagttgtcgcagttgcggaggtctagggatgacgccgacagacgataccaaagccgcttgcaagatctgaaagataggttggagcagagcgaatctactaaccgttccatgcagaactatgtccagttcttaaaatcttcgtacgccaatgtttttggagatggtccttacagtacattcctgaccagctcacctatccggtcgcgaagtccaccagcctag

SEQ ID NO: 198313 - DNA, 2475 bp, synthetic construct
  misc_feature 1..2475: note = Description of Artificial Sequence: Synthetic coding sequence
  source 1..2475: mol_type = other DNA
atgaaggaccggagcagcaccccccccctgcacgtgcacgtggacgaaaacaccccggtgcacgtccacatcaagaagctccccaagcctagcgcgacgtcgtcccagaagtcccacaagcgggggatgaaaggtgacaccgttaatgttcggagatctgtgagggtcaaaaccaaggtgccctggatgcccccaggcaagtcaagcgcaagacccgtcgggtgcaaatgggaaaatcccccacactgtctggagatcacccctccttcatctgaaaagctggtgtcagtgatgagactgagcgatctcagcacagaggacgacgacagtggccattgtaagatgaacagatacgataagaagatcgactctctgatgaacgcagtggggtgtctcaagagtgaggtcaagatgcagaaaggtgaaaggcagatggccaagagatttctggaggagcgtaaagaggaactagaggaggtagcgcatgagctcgccgagactgagcacgagaacaccgtactccgccataatatcgagagaatgaaggaagagaaggactttaccatcctgcaaaagaagcatcttcagcaagagaaggagtgccttatgtcaaaattggtcgaagctgaaatggacggtgccgctgccgctaaacaggttatggccctgaaagatacaatcggtaaacttaagacggaaaagcaaatgacttgcactgatattaatactttgacgaggcagaaagagctgctgttgcagaaactgtctacatttgaggagactaaccgcactctaagagaccttctgcgggagcagcattgtaaggaagacagcgaacgcctgatggaacagcagggtgcactgctgaagaggctcgctgaggcagattctgaaaaggcccgtttgctcctgctgctgcaggacaaagataaggaggtggaagagctcctgcaggaaatacaatgcgagaaggcccaagctaaaacggcttctgaactctctaaatccatggagtctatgcgcggacatctccaagctcaactaagaagcaaggaagccgaaaatagccgtctgtgtatgcagatcaaaaatttagagagaagcggcaaccagcacaaggctgaagtagaagcgataatggagcagctcaaggagctgaagcaaaagggggatcgagacaaggaatcccttaaaaaagccatcagggcacaaaaagaacgtgccgaaaagagtgaagagtacgccgaacagctgcacgtacagctcgccgacaaggacctgtacgtggcggaagccctctcaacgctggagtcatggcgaagccgctataaccaggtggtgaaggagaagggggacctggaattagagataatcgtgctgaatgatagagtgaccgatcttgtcaaccaacagcaaaccttagaggagaagatgagggaggaccgggactcgctagttgaacgtctgcaccgccagactgctgagtactccgccttcaagttggaaaacgagcgactgaaagcgagttttgctccgatggaggacaagttgaaccaggcccatcttgaagtgcagcagctgaaggcctccgtcaagaactacgaaggcatgattgacaattacaaaagccaggtgatgaaaactcgtctcgaggcagatgaggtggcggcacaactggaacgctgcgataaagagaacaagatcctcaaggacgagatgaataaagagattgaagcggcccggaggcagtttcaatcccagctcgccgacctgcaacaactgcctgatattctcaagataacagaggcaaaactcgctgaatgccaggatcagctacaaggttatgagaggaagaacatcgacctaacagccattatctccgacttgagatcacggatcgagcaccagggagacaagctcgagatggcgcgtgagaagcatcaggccagtcagaaagaaaataagcagctctctttgaaggtggatgagctggagaggaagcttgaagccacttccgcacagaatattgaatttttacaggtcatcgctaagcgagaagaggcaatacatcagtcccaattgaggttagaggaaaaaactagggaatgtggaactctggcccgccaattggagtctgccattgaagacgctcggcggcaagtggaacagacgaaggagcatgctctgtctaaagaacgagccgctcagaacaaaatccttgatctggagactcagctgtctcgcactaaaacagaactttctcagttacgcaggtcccgggatgatgctgatcgacggtaccagagtagattacaggatttgaaggataggcttgaacagagcgagagcaccaatagaagcatgcagaattacgtccagttcctgaagtcctcctacgccaatgtctttggagacggcccctactccaccttcctgacctccagcccgatacggagtcgatctcccccagcatag

SEQ ID NO: 198314 - DNA, 1917 bp, synthetic construct
  misc_feature 1..1917: note = Description of Artificial Sequence: Synthetic coding sequence
  source 1..1917: mol_type = other DNA
atgagcgccagcagcagcggcggcagcccccggttccccagctgcggaaaaaacggcgtgacctctctcactcagaagaaggtacttagggccccttgcggcgcaccatccgtaaccgtcaccaaaagtcacaagcgtggtatgaaaggggatactgtcaatgtccgtaggtctgttagggtgaaaacaaagaaccctccccattgtttggaaattacccctccctctagtgagaagctggtaagcgttatgcgactctcagacctatccaccgaagatgatgatagcgggcactgtaaaatgaaccgatatgacaaaaagatcgatagcctgatgaacgctgttggatgtctaaagtcagaggttaagatgcagaagggcgaaaggcaaatggccaaacgcttcctggaggaaaggaaggaagaacttgaagaggttgcgcacgaactggccgaaaccgaacacgagaatacagtgctaaggcacaatatcgaacgaatgaaggaggaaaaagactttacgatcctgcagaagaagcaccttcagcaggaaaaggaatgcttaatgtctaagcttgtagaggcagagatggatggtgctgctgctgccaagcaggtgatggctctgaaagataccataggaaaactgaagacagagaagcagatgacctgcacagacatcaacacacttacaaggcagaaggagctccttttgcagaaattaagtacctttgaggaaaccaatcgtaccttgcgagatcttctgagagaacagcattgtaaggaggatagcgagcgcctgatggagcagcaaggagcactgctgaaaaggctagcagaggctgattccgagaaagccaggctgctgctcctactccaggataaagataaggaggtcgaagagctcctgcaggaaattcagtgcgagaaagcccaggcaaagactgccagtgagctcagtaaaagtatggagtccatgagagggcaccttcaggctcagctacgatccaaagaggcggaaaactcacggctatgtatgcaaatcaagaacctggaacgctctggaaatcagcacaaggccgaagtggaagctatcatggagcagctaaaagagctgaaacagaaaggcgacagggataaggaatccctgaagaaagccataagggcgcagaaggagcgagccgagaagtcagaggagtacgcggagcagctgcacgtccagttggctgataaagatttgtacgtggctgaggctctgagcaccctggagtcttggcggtccagatacaaccaggttgtcaaggagaagggagacctggagctggagatcatcgtcctcaatgacagagtgaccgacctggtcaatcagcaacagacactggaggaaaaaatgcgcgaagatcgagattctctcgtggagcgcctgcacagacagacagcggaatattctgcttttaagctcgagaacgagagactgaaagcttcttttgcccctatggaggacaagctcaatcaggctcacttagaggtccagcaactgaaggccagtgtgaagaactatgaaggcatgatcgacaactacaagtctcaggtgatgaaaacccgcttggaggcagacgaagtggccgctcaactcgaacggtgtgacaaagaaaataagatactgaaagatgaaatgaacaaagagatcgaggctgcacgtagacagtttcaatcacagttagccgacctgcagcagctccccgatatccttaagatcactgaagccaaactggctgagtgccaggaccagctccaggggtatgagcgaaagaacatagatctaactgccataatcagcgacctcaggtcaagggtgagagactggcagaagggttcccatgagctgacccgagctggcgccagaatcccgcggtag

SEQ ID NO: 198315 - DNA, 2490 bp, synthetic construct
  misc_feature 1..2490: note = Description of Artificial Sequence: Synthetic coding sequence
  source 1..2490: mol_type = other DNA
atgagcgccagcagcagcggcggcagcccccggttccccagctgcggcaaaaacggggtgacttcccttactcaaaagaaagtgcttagagccccctgcggcgccccatccgtgactgtgactaagtctcataaaaggggaatgaagggcgatacagttaacgtgaggcgcagtgtccgcgtgaagacaaaggtgccatggatgcctcctggaaaaagttcagctcggccagtcggctgtaagtgggagaatcccccacattgtctggagatcactccaccaagctctgagaaattggtttccgtcatgagactgagcgacctttctacagaggatgacgactccggtcactgcaagatgaataggtatgacaaaaaaatagactctcttatgaatgcagtaggctgtctgaagtctgaagttaagatgcagaaaggggaacggcagatggctaaaaggttcctcgaagagaggaaggaagaactggaggaggttgcccatgagctcgcagaaaccgaacacgaaaacaccgtgcttagacacaacatcgaaaggatgaaggaggagaaggacttcacgatccttcagaagaaacacctccagcaagaaaaggagtgcctgatgagcaaacttgtggaggctgagatggacggtgctgctgcagctaagcaggtaatggctctgaaagacacgattggaaagctcaaaacagaaaaacaaatgacctgcaccgacatcaacaccttgactcggcagaaagagttgctcctccaaaaactttctacttttgaagaaacgaataggacactcagggatctcttacgggaacagcactgcaaggaggattcggaaaggctgatggaacagcagggcgcattgctaaagaggttggccgaagcagattctgagaaagcccgcctccttctgctcctgcaggacaaagataaagaggtagaggagctcctgcaggaaatccagtgtgagaaggcacaggcaaagactgcctccgagctctccaagagcatggagtccatgaggggccatctgcaagcccagcttcggagcaaagaagctgagaactcccggctgtgcatgcagatcaagaacttggaaaggtccggcaatcagcataaggccgaagtggaggctattatggagcagcttaaggagctcaaacaaaagggagaccgtgacaaggaatctctgaagaaagccattcgtgcccagaaggagcgcgctgagaaaagcgaggaatatgccgagcagctccacgtccagttggctgataaagacctctacgtggctgaggccctttcaacccttgaatcctggaggtctcgctataaccaggtggtgaaggaaaagggggacttagagctggaaatcatagtcttgaacgacagggtgaccgacctggtcaatcagcagcaaaccctggaggaaaaaatgcgggaggaccgagacagcttggttgaacggcttcaccggcagaccgccgaatactcggctttcaagcttgagaatgaacgacttaaagcctctttcgcaccaatggaagataagttaaaccaagcgcatcttgaggtacagcaactgaaagcatccgtgaagaactatgaggggatgattgacaattacaagagccaggtaatgaagacccgccttgaggccgatgaggtcgcagcccagctcgaacggtgtgataaagagaacaagattttaaaggatgaaatgaataaggagatagaagcagctaggcggcagtttcaatcacagttggctgatttgcaacagctcccagatattctcaaaattactgaagctaaactcgccgaatgtcaggatcagcttcagggatatgagcggaagaatattgatctcactgccatcatatccgacctcaggagcaggattgagcatcagggagacaagctggagatggcccgagaaaagcatcaagctagtcaaaaggagaataagcagctttctctcaaagtggatgagctggagcggaagttggaagccaccagtgcacagaacatcgaatttcttcaggtaatcgcaaagagggaggaagccatccatcagagtcagctgcgactagaagaaaagacgcgggagtgcgggactctggcacggcagctggaaagcgctatcgaagatgctcggcgacaggtggagcagacaaaggaacacgctctaagcaaggagagagcagcccaaaacaagatcttggatttggagacacagctgtcccgcaccaaaacagagttatcccagctgcgtcggagccgggacgacgccgatagaaggtatcaaagcaggctgcaggatctgaaagaccgcttagaacagagtgaatcaactaatagatccatgcaaaattacgtgcagtttctaaaaagtagctacgccaacgtctttggggatggcccatatagtacatttctgacctcgtctcccatacgcagcaggtcaccccccgcctag

SEQ ID NO: 198316 - DNA, 2106 bp, synthetic construct
  misc_feature 1..2106: note = Description of Artificial Sequence: Synthetic coding sequence
  source 1..2106: mol_type = other DNA
atgggcgagctgcccaccggctgccggaagcggcggcggaagcgggggggcgccgcggcgagggcccgactgcatccacccagacggttgcacggtactacccttgccagcgatttcaatgacttcatacgccggaggttttgggcccagccttgtcggtcttggttcccgtcctgcggaaagaatggcgtcacatccctgactcagaagaaggtgctgagagcgccttgcggcgcccccagtgttacagtgaccaaatcacacaaacggggaatgaagggtgatacagtaaacgttaggaggtccgtccgggtgaaaaccaaggtcccctggatgccaccaggcaaatccagtgcacggcccgtgggatgcaagtgggaaaacccaccacactgcctggagattacaccaccatccagcgaaaagttggtatctgtgatgaggctgagcgacctctccaccgaggatgacgactccggccactgtaagatgaaccggtacgataagaaaatagatagcctgatgaatgccgttggctgcctgaagagcgaggttaagatgcaaaaaggggagcgccaaatggctaagcgctttctggaggagcggaaagaagaactggaagaagtggctcatgaacttgccgaaaccgagcatgagaataccgtgctgcgccataatatcgagagaatgaaagaggagaaggatttcacaatcctccagaagaagcacctgcagcaggagaaggagtgcctgatgtcgaagctggtggaggctgagatggatggtgcagctgctgctaaacaagtcatggctttaaaagatacaatagggaaactgaagaccgaaaagcagatgacctgtacggatataaatacgctgactcggcagaaagagctgctgctgcaaaagctgtctaccttcgaagagaccaaccggactctacgtgacctcctcagagagcaacattgcaaggaagacagtgagcggctcatggaacagcagggcgccttgttgaagcggttggcggaagcagactctgaaaaggcaagactccttcttttactgcaggataaggataaggaagtggaggagctcctgcaagagatccagtgcgagaaagcacaggcgaagaccgcaagcgagctgagcaagtctatggaatcaatgcgaggccatttgcaggcgcagttacgctccaaggaggccgaaaactcaaggctttgcatgcaaattaaaaatctggaacgtagcggcaaccaacacaaagcagaggtggaggccataatggagcagctaaaggaactgaagcagaaaggtgacagggacaaagagtctctgaagaaagcaattagagcccagaaggagcgagccgagaagagcgaagagtatgcagaacagctgcatgtgcaactggccgacaaggatctgtatgtcgcagaagctctgtccaccctggaaagctggcgaagccgctacaatcaggtagttaaggaaaagggcgatttagaacttgagatcattgtgctaaatgacagggtgaccgacctagtgaaccagcagcagacactggaggagaaaatgcgggaggatcgagactctctggttgagcgcctgcacagacaaacggccgaatatagcgcgtttaaattggaaaacgagcggttaaaggccagcttcgctccaatggaagataaattaaaccaggctcatttggaggtccagcagttgaaggcctccgtaaagaactacgagggcatgatcgacaattacaagtctcaggtgatgaagacgagacttgaggccgatgaggtggctgctcaactcgagagatgtgataaggagaataagattctgaaggatgagatgaataaagaaatcgaagccgcccggaggcagtttcaaagccagctcgctgatctccagcagctgccagacattctgaagatcacagaggccaagctggccgagtgccaagatcagctgcagggatatgaacgcaaaaatattgatcttactgctattatcagcgatctgcgtagtcgcgtgcgcgactggcaaaagggcagccacgagctcactcgcgcgggcgcccgcatacccagatag

SEQ ID NO: 198317 - DNA, 1974 bp, synthetic construct
  misc_feature 1..1974: note = Description of Artificial Sequence: Synthetic coding sequence
  source 1..1974: mol_type = other DNA
atggccgaccagcagggcccccaccagaaccggttccccagctgcgggaaaaacggcgtaacatccctgacccagaagaaagtgctgcgggcaccgtgcggagcgccctccgtaactgtgaccaaaagccacaagcgggggatgaagggagataccgtcaacgttcgtcggtcagtccgcgtgaaaacgaaagtgccttggatgccccctggaaagtcctccgcccgccctgtcgggtgtaagtgggaaaatcctccccattgcctggagattactcctccgagctcagagaaacttgtctcagtgatgaggctctcggacctctctacggaagatgatgactcgggacattgcaagatgaacaggtacgacaaaaaaatagacagtctaatgaacgccgtgggttgcctgaagagtgaggtcaaaatgcagaaaggcgagagacaaatggccaagaggttcctcgaggaaagaaaagaagagctggaggaggtcgcgcacgagctggccgagactgagcacgaaaacacagtcctgagacacaacatagaaaggatgaaggaggagaaggactttacaattctacagaagaagcatttgcaacaggaaaaagagtgtttaatgtcaaagctggtggaggcagaaatggacggtgcagccgccgcaaaacaggttatggccttgaaagataccattgggaagctaaagactgagaagcagatgacatgcactgatatcaacaccctaacaagacagaaggagctgctgcttcagaagcttagtacctttgaggaaaccaaccgcaccctcagggacctgctgcgggagcagcactgcaaagaggacagcgaacggctgatggaacagcagggcgcgcttcttaagcgcctggccgaggcagactctgagaaggcgcgtctgctccttcttctgcaggataaagataaagaagttgaagaactactgcaggaaatacagtgcgagaaggctcaggctaaaacagcctccgaacttagcaagtcaatggagtccatgcggggccatctgcaggcccagttgcgcagcaaggaagctgagaacagtcgattgtgtatgcagattaagaatctggaacgcagcggcaaccagcataaagcggaagtggaggctattatggaacagttgaaggagctcaagcagaagggggatagggacaaagagtctctgaagaaagccatccgagcccagaaggagcgcgctgagaagagcgaggaatacgcagaacagctccacgtgcagttggcagacaaagacctgtacgtagccgaggctctctctaccctggaatcttggaggagccgttacaaccaggtcgtcaaagagaagggcgatctcgaactggaaattatcgtgctcaacgatagggtgacagatctggtcaaccaacagcaaacactggaagaaaaaatgcgggaggatagggacagcctggtggagcgccttcatagacagacggccgagtattctgcctttaagctcgagaacgaaagattaaaggcgtcctttgccccgatggaggataagttgaatcaggcacacttagaagtgcagcagctaaaagcctccgtgaaaaactacgagggaatgattgataactacaagtcccaggtcatgaagacacgactcgaggctgacgaggtcgcagctcagctggaacgctgtgataaggagaacaaaatactcaaagacgagatgaacaaagagattgaagctgctagaagacagttccaatcccagcttgccgatctgcagcagctgcccgacatcctcaagatcaccgaagccaaactcgccgagtgccaggatcaacttcagggatacgaacgaaaaaatatcgatctgacagctattatcagcgacttacgcagtcgggtgagagattggcagaagggcagccatgaactgaccagagcaggcgctcggatccctcgctag

SEQ ID NO: 198318 - DNA, 570 bp, synthetic construct
  misc_feature 1..570: note = Description of Artificial Sequence: Synthetic coding sequence
  source 1..570: mol_type = other DNA
atgaaggaccggagcagcaccccccccctgcacgtgcacgtggacgaaaatacacctgtccacgtccatatcaaaaagctgccgaaacccagtgccacctcttcacagaagagtcataagagagggatgaaaggtgacacagtgaacgtgagacgcagcgtaagggtgaaaacaaaggtgaagatgcaaaagggcgaacgccagatggcaaagagattcctcgaggagcggaaggaggaactggaggaggtcgcacatgagttggctgagacagaacatgaaaacacagtgctccgtcacaacattgaaagaatgaaagaggagaaggactttaccattctgcagaagaagcatctgcagcaggagaaggagtgtctgatgtccaaacttgtagaggctgagatggatggggcagccgcagcgaagcaagtgatggctctgaaagacaccatcggaaaactgaaaacggaaaagcagatgacctgcactgatatcaacactctgaccaggcaaaaagaactgctgctgcagaaactgtccacatttgaggagacgaatcgaaccctgtag

SEQ ID NO: 198319 - DNA, 618 bp, synthetic construct
  misc_feature 1..618: note = Description of Artificial Sequence: Synthetic coding sequence
  source 1..618: mol_type = other DNA
atgagcgccagcagcagcggcggcagcccccggttccccagctgcggaaaaaacggagtcacctccctcacacagaagaaagttctacgcgctccatgcggagctccctccgtgacggtcacgaaatcacataagcgcggtatgaagggcgacactgtgaatgtgaggcgttctgtacgcgtcaagacaaaggtcaagatgcagaagggcgaacggcaaatggcaaaacggttcctggaagagagaaaggaggaattggaggaggtcgcccacgagctggctgaaacagaacacgagaacacagtgttgagacataacatcgaaagaatgaaagaggagaaagacttcactatccttcagaagaagcacttgcagcaagagaaagagtgtctgatgtcaaagctggtggaagcggaaatggacggggcagcggctgctaaacaggtcatggctcttaaagacaccataggcaagctcaaaaccgagaaacagatgacatgcactgacatcaataccctgactagacagaaggaactgctactccagaagctcagcactttcgaagagaccaatagaacattgagagacctgctgcgtgaacagcactgtaaagaatag

SEQ ID NO: 198320 - DNA, 543 bp, synthetic construct
  misc_feature 1..543: note = Description of Artificial Sequence: Synthetic coding sequence
  source 1..543: mol_type = other DNA
atgagcgccagcagcagcggcggcagcccccggttccccagctgcggcaaaaacggagtgacctcactcacccaaaaaaaggtgttgagagcaccatgcggcgcgccaagcgtgaccgtcaccaaaagccacaagagggggatgaagggcgacacggtcaacgtgcgaagaagtgtaagagtgaagacgaaggttccctggatgccgccaggcaagagcagtgcccggcccgtgggttgcaagtgggagaatcctcctcattgtctggagataaccccaccctcctccgaaaaactggtgagtgtaatgagactgtcagacctgtctactgaagatgacgactcaggccactgtaagatgaacagatatgacaagaagatcgatagtctcatgaacgctgtgggttgtttgaaaagcgaggtgaaaatgcagaaaggagagaggcagatggccaaacgctttctggaagaacgcaaagaggagctggaagaggtggcgcatgagctcgcggagaccgaacatgaaaataccgtgctgagatag

SEQ ID NO: 198321 - DNA, 648 bp, synthetic construct
  misc_feature 1..648: note = Description of Artificial Sequence: Synthetic coding sequence
  source 1..648: mol_type = other DNA
atgaaggaccggagcagcaccccccccctgcacgtgcacgtggacgaaaacactccagtccacgtccacattaaaaagcttcctaaaccctctgcaactagctcccaaaagtcacataagcggggcatgaaaggggatacggtgaacgtgcgtcggtcggttagggtcaagactaagaacccccctcattgccttgaaatcactccgccgtcctcagaaaaactggtcagtgtgatgcgactgtcagatcttagtacagaggacgacgactccggccattgtaagatgaatcgatacgataaaaagattgatagcctgatgaatgccgtgggctgcttgaagtccgaggtgaagatgcaaaagggagaacggcagatggcaaaacgcttcctggaagaaagaaaagaagagctggaagaggttgcacacgagttggcagaaacagagcacgagaacactgtgctgcggcacaacattgaacgcatgaaagaggaaaaagatttcacaatattacagaaaaagcacctgcagcaggaaaaggagtgtctgatgtccaagttggtcgaggcggagatggatggagcagcagctgccaaacaggttatggcattgaaagacaccatagggaagcttaaaaccgttggatag

SEQ ID NO: 198322 - DNA, 471 bp, synthetic construct
  misc_feature 1..471: note = Description of Artificial Sequence: Synthetic coding sequence
  source 1..471: mol_type = other DNA
atgagcgccagcagcagcggcggcagcccccggttccccagctgcggtaagaatggtgtgactagtctcacccagaaaaaggttttgagggctccgtgtggtgcccccagcgtcaccgtcaccaagtctcacaaaagggggatgaaaggcgacacagtgaatgtgcggaggagcgtccgcgttaagaccaagaacccacctcactgtctggaaatcaccccccctagtagcgagaagcttgtgtccgtgatgcggcttagcgatttgtcgaccgaagacgatgatagtggccactgcaagatgaacagatacgataaaaagatcgactctctcatgaacgccgtcggttgtctgaagtcggaggtcaaaatgcagaagggggaacggcagatggcaaagagattcctagaggagcgcaaggaagaactagaggaggtggcgcatgaactggcggagaccgaacacgagtag

SEQ ID NO: 198323 - DNA, 1731 bp, synthetic construct
  misc_feature 1..1731: note = Description of Artificial Sequence: Synthetic coding sequence
  source 1..1731: mol_type = other DNA
atgaaggaccggagcagcaccccccccctgcacgtgcacgtggacgaaaacacccccgtacatgtccacataaagaagctgcccaaaccatctgccactagctctcagaagtctcacaaacggggcatgaaaggggatactgtgaatgtgcggagatcagtgcgtgtgaaaactaaagtgaaaatgcagaagggtgaaaggcaaatggcaaagcgcttccttgaagaaagaaaggaagaactggaggaagtggcccacgagttagctgaaacggagcacgagaatacggtgctgagacacaatatcgagcgtatgaaggaagagaaagactttaccatattgcagaagaaacatttgcaacaagagaaggagtgcctgatgtccaaactggtggaggctgaaatggatggcgctgctgctgccaagcaagtaatggctctgaaggacacaataggcaagctgaaaaccgagaaacagatgacgtgtacagacatcaacactctaaccaggcagaaagagttgctgcttcaaaaactgagtacattcgaagaaactaatagaaccctacgggatcttcttagggagcagcattgcaaggaagactccgaaagactaatggagcaacagggagcgctgcttaaaagattggctgaagcggatagcgaaaaagccaggctactcctgctcctccaagataaggataaagaggtcgaagaacttcttcaggaaatccaatgtgaaaaggcccaagccaagacagcgagcgagctctcaaaatcaatggaatccatgagagggcacctccaagcacaactgcgctccaaggaggcggagaactcccgcctgtgcatgcaaatcaaaaacctggaaagaagcggcaaccagcacaaagcagaggttgaggctattatggaacaactcaaagagctgaaacagaaaggtgaccgtgataaagaatctctcaagaaggcaatccgggctcagaaggagcgagccgagaagagcgaggagtatgccgagcagctgcacgtgcagctggccgacaaagatctgtacgttgctgaagctctgtcaactttggaatcatggcggagcaggtacaatcaggtggtgaaggagaagggcgacctcgagttggaaattatcgtgctgaatgatcgcgtgactgatctagtcaatcagcagcagacccttgaagaaaaaatgcgagaggatagagactccctggtggaacgactgcatcgccagaccgcggaatacagcgcctttaaactggagaacgagagactgaaagcatcctttgctcccatggaagataagttgaaccaagcccatctggaagtgcagcagttgaaggcctccgtgaaaaactatgaagggatgatcgacaactataagagccaggtgatgaagaccaggctggaggcagacgaggtagcagcccagttggaaaggtgtgataaggaaaacaagattctcaaggacgaaatgaataaagaaatcgaagctgcccgccggcagttccagtctcagcttgcagacctgcagcagctacctgacatcctaaagatcaccgaagccaagctcgccgagtgccaggaccagctgcaaggctacgaacgaaaaaatatagacctgacagccattatcagcgatttaagatcccgagtcagagactggcaaaagggcagccacgagctgactcgcgcaggcgcccgcatcccacgttag

SEQ ID NO: 198324 - DNA, 444 bp, synthetic construct
  misc_feature 1..444: note = Description of Artificial Sequence: Synthetic coding sequence
  source 1..444: mol_type = other DNA
atgaaggaccggagcagcaccccccccctgcacgtgcacgtggacgagaatacgcccgtccacgtccatatcaaaaagcttcctaagccatcggcaacgtctagtcaaaagtcccataagcggggcatgaaaggggataccgtcaacgttcgacgtagtgtacgggtcaagaccaaggttccctggatgccccccggaaagagtagcgcacggccagtggggtgtaaatgggagacttccgaagagacaccaacaacaggtgagggagtgccgcacgtgcaggccggcggaggtggtaacggatggggctgtgggtgtcaagctgggcacggactggagggctaccatcgggaagctgaaaaccgtgagacaaatgatttacacggacaccagcaccccgacaaggcggaagggacatctcctgctgaggccgaacacatttag

SEQ ID NO: 198325 - DNA, 1917 bp, synthetic construct
  misc_feature 1..1917: note = Description of Artificial Sequence: Synthetic coding sequence
  source 1..1917: mol_type = other DNA
atgggccggaaccggtacccccccgcctgctggttccccagctgcggcaagaacggcgtgacttctctcacccagaagaaggtgctgagggctccatgcggcgccccatcagtgacggtgacaaaaagccacaaaaggggcatgaaaggtgatacagtaaacgttcggaggtccgtgagggtgaaaactaaaaaccccccccattgcctcgaaatcacccctccgtccagcgaaaagctggtcagtgtcatgagactcagcgacttgagcacagaagacgacgacagtggtcattgtaagatgaaccggtacgacaagaaaatcgactcactgatgaacgccgtagggtgcctgaagtcagaagttaaaatgcagaagggtgagcggcaaatggcaaaacgattcttggaggagcgcaaagaagagttggaggaagtcgcgcacgaactggcagagaccgagcacgagaataccgtcctccggcacaacattgagcggatgaaggaggagaaagattttactattctccagaaaaagcacctgcagcaggagaaagagtgcctgatgagcaaactcgtggaggccgagatggacggagcagcagcagctaaacaggtgatggctctgaaggacaccataggcaaattgaaaacagagaaacagatgacatgtacagacatcaacacgttaactcggcagaaagagctgttactccagaaactgtctacatttgaagagactaatcgcaccctgcgcgacctcctaagagaacagcactgcaaagaagattcagagcgcttaatggaacaacaaggtgctctgttgaagagattggccgaggcagactccgaaaaggctagacttttgctattgctacaggacaaggacaaggaggttgaagaactcctgcaggagattcagtgcgaaaaggcacaggctaagacagccagcgagctatccaagtctatggaatcaatgaggggtcacttgcaggcacagctgaggtccaaagaggcagagaatagcagactgtgcatgcagattaagaatctggagaggtccgggaaccaacacaaagctgaggtggaagctattatggagcagctcaaggaactcaaacagaaaggtgatcgcgataaagaatcacttaagaaagcaattagggcccagaaggaaagggccgaaaagagtgaagagtacgccgaacagctgcatgtgcaactggccgataaggatctgtatgttgccgaagctttgtcgacacttgaaagctggcgatctcgctataatcaggtcgtcaaagaaaaaggcgacctggaattggagatcatcgtgttaaacgatcgggtgaccgaccttgtgaatcagcagcagacattagaggaaaaaatgcgagaagatcgcgattctctggtggaaaggcttcacagacagacagcggagtactccgcctttaagctggaaaatgagcggcttaaagcgtctttcgcccccatggaggataagttaaatcaggcccaccttgaagtgcagcagctgaaagcatctgttaaaaattacgagggcatgatagacaactacaaatcccaggtaatgaagacccgcctggaggccgacgaggttgcagcccagttggaacggtgcgacaaagaaaacaaaatcctcaaggacgagatgaacaaggagatcgaagccgcaaggcgacagttccaaagccagcttgccgacctgcagcagttgcccgacatcttaaagattaccgaggccaaactggcagagtgtcaggatcagttgcagggttacgaacgaaagaacatcgatctcacggctattatttccgatctcagatctagagttagggattggcaaaaaggatctcatgaattaacccgcgcaggggcgagaatcccgcgctag

SEQ ID NO: 198326 - DNA, 765 bp, synthetic construct
  misc_feature 1..765: note = Description of Artificial Sequence: Synthetic coding sequence
  source 1..765: mol_type = other DNA
atgaccgaggaggtgtggatgggcacctggcggccccaccggccccgaggacctattatggctctttatagcagccctggaccgaagtacctgataccgcctacgacaggctttatgaaacacacaccaacaaagctcagagcaccagcatactctttccgtggcgctcctatgctgctggctgaaaactgctcgcccggaccacggtacaacgtgaaccctaaaatcctgagaacaggaaaggacttagggcctgcctactcaatactcggcaggtatcagacgaaaaccatgctcacccccggtccaggtgactactttcctgagaaatcaacgaagtacgtgtttgactcagccccgtcccactcaatctcagccaggaccaaggccttccgcgtggacagcaccccaggccctgctgcttacatgttgccgatggttatgggccccaacaccgtggggaaggcttcccagccctcttttagcattaagggacgtagtaaattggggggcttcagcgacgatttgcacaagacccccgggccagcagcgtaccgtcaaaccgacgttcgggtcacaaagtttaaagctcctcagtacacaatggctgccagggtggaacctccaggcgataagaccctgaaaccaggtcctggggcccacagtcctgagaaggttacactgacaaaaccttgcgctccggtagtcacttttggcataaaacatagcgattacatgactcccctacttgtggatgtagaatag

SEQ ID NO: 198327 - DNA, 417 bp, synthetic construct
  misc_feature 1..417: note = Description of Artificial Sequence: Synthetic coding sequence
  source 1..417: mol_type = other DNA
atgaccgaggaggtgtggatgggcacctggcggccccaccggcccaggggaccgattatggccctgtatagctccccagggcccaaatacctcattcctccgacaaccggatttatgaagcatacgcccacaaaactcagagcccctgcatacagcttcagaggcgcacctatgctcttggccgagaattgcagccccggaccgagatacaacgtgaaccctaagatcctgcgtacagggaaagacctcggccccgcctattcaatcctgggccgctaccaaacgaagacaatgctgacaccaggtcccgcactgaagtccgccttcccttcatggaccccacctgacccaacttggagtccccccgtgttagaaccaagaggtcccacccctagaatgctgggatcacctccctag

SEQ ID NO: 198328 - DNA, 375 bp, synthetic construct
  misc_feature 1..375: note = Description of Artificial Sequence: Synthetic coding sequence
  source 1..375: mol_type = other DNA
atgaccgaggaggtgtggatgggcacctggcggccccaccggccccggggcccaatcatggctctgtactctagcccaggcccaaagtacttgatacccccaacgacaggcttcatgaagcataccccaacaaaactccgtgcacccgcttactcgttccgcggcgctcccatgctgctggcagagaactgctcaccccctaacaccgtcggcaaggcaagtcaaccatccttctctataaagggacggagcaagctgggcggatttagtgacgacttgcacaaagtgacactcaccaagccttgtgcacctgttgttacttttggtattaaacattctgactatatgacccccttactggtggatgtggagtag

SEQ ID NO: 198329 - DNA, 774 bp, synthetic construct
  misc_feature 1..774: note = Description of Artificial Sequence: Synthetic coding sequence
  source 1..774: mol_type = other DNA
atggacgccgagtacagcggcaacgagttcccccggagcgagggcgagcgcgaccagcatcaacggcccggaaaggagagaaagagcggcgaggccggctggggaaccggcgagttggggcaggatggacgccttctctcttctacactgtcactctctagcaatcggtcactgggtcagcgacagaattcccctctgccctttcagtggcgcatcacccatagctttcggtggatggctcaggtgctggctagcgagctttcattagtggctttcattctgctgctggtcgttgcgttctcaaaaaagtggttagacctctccagatctctgttctatcagaggtggcctgtcgacgtatcaaatcgcattcatacgtcagcccacgtgatgtcaatgggccttttgcacttctacaagtcccgctcatgcagcgatttggaaaatggcaaggtcaccttcatattctcaaccctgatgctgtttccgataaacatctggatatttgagttggaaagaaatgtgtcaattccaatcgggtggagctacttcatcggatggctggtcctgattctgtactttacttgcgctattttatgttacttcaaccataaatctttctggagcctcatcctgagccacccttccggggccgtctcctgtagttcctccttcggcagtgtcgaggaatctcctcgagctcagactatcacagacacacccatcactcaggagggcgttctggatccagaacagaaggacactcacgtttag

SEQ ID NO: 198330 - DNA, 1488 bp, synthetic construct
  misc_feature 1..1488: note = Description of Artificial Sequence: Synthetic coding sequence
  source 1..1488: mol_type = other DNA
atggtgacctggctgtaccggttcctgcccaccagcaacatggccgccaaacttagatctttgctgcccccagacttgaggctccagttttggctacacgcccgcctccagaagtgtttcctgtcccggggctgcgggagctactgcgccggtgccaaggcttcccccctccccgggaaaatggctatgggcctgatgtgtggccgccgagagctcctgcgactgctacagtcaggcaggcgcgtccattctgtagctggtccttcccagtggttgggcaagcccttgactacaagactgctctttcctgccgcaccttgttgttgtagacctcactatctgtttctggcagcttccgggcctagaagcctgtctacctctgcaattagcttcgccgaggtgcaagtacaggcgccgcctgtggtggccgccacacccagtccgacagccgtcccagaggttgcctctggggagacagccgatgtggtgcagaccgctgctgaacagagctttgctgaactgggactgggctcctacactcctgttggcctgatacagaacctgctcgagtttatgcatgtagacctggggttaccatggtggggggcgattgctgcatgcacagtttttgctagatgcctgatcttccccctaatcgtcacaggacaaagggaggcagcacggatccataatcaccttcccgagattcaaaagttctctagccgaatccgtgaagcgaaattagcaggcgaccacattgaatactacaaggcctcttcggaaatggccctctaccaaaagaagcacggcattaagctatacaagcctttgatcttaccagttactcaggctcctatctttattagtttcttcatcgccctcagggagatggctaacctgccagtgcccagtcttcagactggtggattatggtggttccaggaccttactgtaagtgacccaatatatatcttgcccctcgcggtgacagcaactatgtgggccgtgcttgagttgggtgctgagaccggtgtgcaatcctccgatctccagtggatgcggaatgttattagaatgatgcctctgattaccctccccatcacaatgcacttcccaaccgcagtttttatgtattggttaagttctaacctgttctccttagttcaggtgtcatgcttacggatacccgccgtgcggactgtactgaaaatcccacagagagtggtacatgatttggataagctgcctcctcgcgagggatttctggaatccttcaagaaaggctggaagaatgccgagatgacccggcagctacgggaaagagaacagagaatgcgaaatcagttagagctagctgcccgcggaccactgcgtcagaccttcacccacaatccactgttgcagcctgggaaggacaaccctccaaatataccctcctctagttcgaagcccaaaagcaaatacccctggcacgatacgcttggctag

SEQ ID NO: 198331 - DNA, 1260 bp, synthetic construct
  misc_feature 1..1260: note = Description of Artificial Sequence: Synthetic coding sequence
  source 1..1260: mol_type = other DNA
atgcggggcacccaggtgcacagcgtggccggccccagccagtggcttggaaagcctcttactactaggttgttattccccgccgccccgtgttgctgccggcctcattatctcttcctggccgccagtggcccaagaagcctttctacctccgcaataagtttcgcagaggtgcaggtccaggcgccaccagtggtcgctgcaaccccttcccccacagctgttcctgaagtggcctctggagagacagccgacgttgtacaaactgcagcagagcagtctttcgccgagctgggtcttgggtcctatactccagttggactcattcagaatctgttggagttcatgcacgttgacctgggacttccatggtggggggccattgccgcatgcaccgtttttgccaggtgtctgatctttccactgatagtaacagggcagagggaagcagcccgaattcataaccaccttcctgagatccaaaagttttcttctaggattcgagaggcgaaacttgcaggggaccacatagaatactacaaggcttcaagcgagatggcgctatatcagaagaagcatggtatcaagctgtacaagcccctgatcttacctgtgactcaggccccaatctttatttccttttttattgctctgagggaaatggcaaatttgcccgtccccagcttgcaaacgggaggcctctggtggtttcaagacctgactgtcagcgatcctatttacatcctgcctctggctgttaccgctaccatgtgggccgtgctggagctgggcgcggaaaccggagtgcagtcctcggacttacaatggatgcggaatgtgatcagaatgatgcccctgattactctgcctattaccatgcactttcccacggccgtgtttatgtattggctgtccagcaatctttttagtttggtgcaggtttcctgtttgcggattccagcagtgcgcacagtcctcaagatcccgcagcgcgtcgttcatgacttggacaagctgcccccccgcgagggattcctggagagtttcaagaagggttggaagaatgctgagatgacccgacagcttcgtgagcgcgagcagagaatgaggaaccagcttgagttggctgcgagaggtcctctgagacagaccttcacgcacaaccctcttctccagccagggaaggacaaccccccgaacataccctcttccagttcaaagcccaaatccaagtatccgtggcacgataccctgggctag

SEQ ID NO: 198332 - DNA, 732 bp, synthetic construct
  misc_feature 1..732: note = Description of Artificial Sequence: Synthetic coding sequence
  source 1..732: mol_type = other DNA
atgagccggctgtggtacggcaagaagggccggcggcaccagcccatcaaccacaaatacacactcgtcgtttccgtggccgagtaccaccgacgaattgatgcactcaacacagaagaactgcggacgctctgtcgcagactgcagatcaccacacgggaggacatcaattccaagcaggtggccacggtgaaggcggaccttgagagtgagagctttagacctaacctcagtgatccttccgagttgctcctgccagaccagattgagaagctgacgaagcatctacccccacgcaccatcggttatccttggacattagtttatgggacaggcaagcatgggacatcacttaaaacactgtataggaccatgactggactcgacacgccagtgctcatggtcatcaaggactccgatgggcaggttttcggagctctggcttcagagccccttaaagttagtgatgggttttacggcaccggggaaacttttgtgtttactttttgccccgagttcgaagtgttcaagtggacaggagataacatgttcttcatcaaaggtgacatggactccttggcctttgggggaggaggcggagaattcgcactctggctggatggagacctgtatcatggccgctctcattcttgcaaaactttcgggaaccggactctctccaagaaggaggatttctttatacaagatatcgaaatttgggcttttgagtag

SEQ ID NO: 198333 - DNA, 2520 bp, synthetic construct
  misc_feature 1..2520: note = Description of Artificial Sequence: Synthetic coding sequence
  source 1..2520: mol_type = other DNA
atggactacctgaccaccttcaccgagaagagcggccggctgctgcgggggacggccaatcgcttacttggattcggtggaggtggggaagcccggcaggtgcgctttgaagactacctccgagagcctgcacagggtgatttagggtgcggctccccaccccaccggccacctgcccccagttcgccggaaggtccagataccggccagaagaaaacattggataaaaaagacggacgacgcatgagctttcagaagcccaagggcactatcgagtacaccgtcgagtctagggactcactaaatagcattgcactgaaattcgatacaacacctaatgagcttgtccagctcaacaaactgttttctagggctgtggttacagggcaggtcctctacgtgcccgacccagaatatgtgtcctcggtagaatcttccccctcgctcagcccagtgtcccctctgtctcccaccagcagcgaagccgaatttgacaaaactactaaccccgacgtgcaccccactgaggccaccccctcatccacttttaccgggattcggcctgcccgggtggtatcctctacaagtgaagaggaggaagcatttaccgagaagtttctcaaaatcaattgtaagtacattacgtctggcaagggaacagtgtccggagtcctgttagttactcccaacaatataatgtttgatccccacaagaacgacccattagtacaggagaacggatgtgaagagtatgggatcatgtgtcccatggaagaggtgatgtcagccgctatgtacaaggagattctggatagcaaaatcaaggaatccttaccgatcgatatcgaccagctgagcggaagagacttttgccacagtaaaaagatgacaggctctaacacagaagagatagactcccgcattcgcgacgctgggaacgatagtgcctctaccgcacccaggagtacggaggagtccctgagtgaggatgtgtttacagaatcagaactctctcccatacgcgaagagctggtatccagtgatgagttgaggcaagataaatcttcgggcgctagctcggaatccgtgcaaaccgtcaatcaggccgaagtggagtctttgaccgtgaagtcagaaagcactggcacacctggccacctgcgcagcgatacagagcactccaccaacgaggtcgggacgctgtgccacaagactgatttgaacaacctggaaatggctataaaggaagaccagattgccgataacttccagggcattagtggacctaaggaagacagcactagcattaagggtaatagcgatcaggactccttcctgcacgagaactctctgcatcaggaggaatcccagaaagagaacatgccttgcggcgaaaccgctgaatttaaacagaaacagtctgtgaataaaggaaagcagggaaaagagcagaatcaagactctcagactgaagcagaggagttacggaaactatggaagacacataccatgcagcagacgaaacagcaacgagaaaacattcaacaggtatctcaaaaggaggcgaaacacaaaattacatccgccgacggacatatcgaatcatctgcgcttttgaaagagaaacaacgccatcggctgcataaattcttgtgtctgagggtgggtaaaccgatgcgaaagaccttcgtttcccaggcttccgccacgatgcagcagtacgcacagcgtgacaaaaaacacgaatattggttcgccgttccccaggaacgtaccgaccatctatacgcattttttattcagtggagtcccgagatatatgccgaggatactggggaatacactcgcgagcccggtttcattgtggtcaaaaagattgaagaaagcgagactatagaggactctagcaaccaggcggccgcccgggagtgggaaatcacgactcgcgaagacatcaacagcaagcaagtggccactgttaaggcagatttagaaagtgaatctttccgacctaatttgtccgatccgtccgagctcctgctgcctgaccagattgagaagttaacaaagcatctgcccccacggaccatcggctatccctggacactggtgtacggaaccggaaaacacggcaccagcctcaagactctgtaccgcacaatgacagggcttgataccccagtactcatggtgataaaagactcagatgggcaggtgtttggggctttggcaagcgagccccttaaagtgtctgatggattctatggcaccggggaaacatttgtgtttaccttttgtcccgaatttgaggtattcaagtggactggggataacatgttcttcattaagggcgacatggacagcctggcatttggaggcggcggcggggaatttgccctgtggctggacggggacctgtatcatggcaggtctcatagttgtaagacctttggcaatcggactcttagtaagaaagaagacttctttatccaggatatcgagatatgggcatttgagtag

SEQ ID NO: 198334 - DNA, 2625 bp, synthetic construct
  misc_feature 1..2625: note = Description of Artificial Sequence: Synthetic coding sequence
  source 1..2625: mol_type = other DNA
atgaccaaggacaagaacagccccggcctgaagaagaagagccagagtgtggatattaatgctccggggttcaatccccttgctggtgctggaaagcagacgcctcaggcctcgaaaccacctgcacctaaaacgcccattatagaggaagaacagaacaacgcagctaatactcagaagcatcccagcagacgttccgaactcaaacggttttataccatagacaccggtcagaaaaagacactggataagaaggacggacgccgtatgagctttcagaagcctaaaggcacaatcgagtacaccgtagagtctcgtgattcgctgaactcaatcgccctgaagtttgacactacccctaatgaactagtgcagttgaataagctattcagccgtgctgtggtgacgggccaggtactttatgtgcctgacccagaatacgtctcctccgtggagagctctccatctctctcacccgtcagtcctttgtcccctactagtagcgaggctgagttcgacaagactaccaatccagacgtccatcctaccgaagcaaccccatcgtccaccttcactggcatccgacccgcaagagtcgtgtcgagtacaagcgaggaggaagaggcattcactgagaaatttctgaagattaactgcaaatacatcacctcaggcaaaggcactgtgagcggggttctgctggttacacccaataacatcatgtttgaccctcacaagaatgaccctctggtccaggaaaacggttgtgaggagtatggcataatgtgcccgatggaggaggtgatgagcgcagcgatgtataaagagatcctggatagtaaaatcaaagaatccctccctatcgatattgaccaactctctggtagggatttttgccactccaagaagatgaccggttcaaataccgaggagatcgacagtagaatcagagacgcaggaaacgacagtgcatcaacagcgccccggagcacagaggaaagcctctctgaggacgtgttcactgaatctgagctgtccccgatcagagaagagctggttagcagtgacgaactacgacaagataagtcatcaggggctagcagcgagtcagtgcaaactgtgaaccaggccgaggtggagagcctcactgtgaagtctgaaagcaccggaacaccagggcatttgagatccgatactgagcatagtaccaacgaggtggggaccctatgccacaagaccgacctgaataacctggagatggcaattaaagaggaccaaattgctgacaacttccagggcattagtggaccaaaggaggacagcacaagcatcaaagggaacagcgatcaggattctttcctacatgagaattccctgcaccaggaagaaagccagaaagaaaacatgccatgcggagagacagctgaattcaagcaaaagcagagtgtgaacaaaggcaaacaagggaaagagcagaatcaagacagtcagaccgaggccgaagagctgcggaagttgtggaaaacacacactatgcagcagaccaaacagcagcgcgagaacatccagcaggtgagccagaaggaagctaagcataagataacgagcgccgacggacacatcgagagctccgctttgttgaaggagaaacagcgacatagattgcataaattcctctgcctcagagttggcaaacctatgaggaaaaccttcgtcagtcaagcttccgcaaccatgcagcaatacgcccagcgagacaaaaagcatgagtattggtttgcagtgcctcaggagcggactgaccacttatacgcatttttcatacagtggagtcctgaaatctatgccgaggacactggagaatacacccgggagccgggatttatcgtggttaaaaagattgaggaaagtgaaactattgaagactctagcaatcaggctgctgccagggagtgggaagtggtatctgtcgcggagtaccatcgccggattgacgccctgaacactgaagagctgcgaactctctgccgacgactccagattaccacacgtgaagatattaattcaaagcaggtggcgaccgtcaaggccgatctcgagtcagaaagtttcaggccaaacctgtctgacccctcagagcttctgctgcccgatcagattgagaaactaacaaagcatctgccccccaggaccataggttacccatggaccttggtctacggtaccgggaagcatggtacctctctcaagactctatacaggacaatgaccgggttagatacccctgtactgatggttattaaagacagcgatgggcaggtattcggcgcactggcttccgagcccctgaaggtgagtgatgggttttatggaactggcgaaacgtttgtgtttaccttctgccccgagttcgaggtgtttaaatggaccggcgacaacatgttttttataaaaggtgatatggactctctcgccttcggaggtggggggggtgagtttgcgctgtggttagacggtgacctgtaccatgggaggagtcactcctgcaaaacattcggtaatagaaccctcagcaagaaggaggatttctttatacaggacatcgaaatctgggcatttgagtag

SEQ ID NO: 198335 - DNA, 2541 bp, synthetic construct
  misc_feature 1..2541: note = Description of Artificial Sequence: Synthetic coding sequence
  source 1..2541: mol_type = other DNA
atgagcgtgagcaacctgagctggctgaagaagaagagccagagcgttgacattaatgcaccggggttcaaccccctggcgggggctggcaaacagactccccaggcatccaagccccctgctcccaagacgcccatcattgaggaagaacagaacaacgccgccaacacccagaagcaccccagccgccgctcagaactgaagcgcttctacactatcgacaccggccaaaaaaagacgctcgataagaaggatggaaggagaatgagcttccaaaagcccaagggcacaattgagtacacggtggagagtagggacagtctcaacagcatcgcgttgaaattcgatacaacccctaacgaactggttcaactcaataaattattctcacgagctgttgtgaccggccaagtgctgtatgtgcccgatcctgagtacgtttcgtccgtggaaagcagtccgagcctgagtcctgtgagtccccttagtccaacatctagtgaagctgaattcgataagactaccaacccggacgtgcaccctaccgaggccacaccatcttctacctttacaggcatcagaccggccagggtggtgagctctaccagcgaggaggaagaggcgtttaccgagaagtttctgaagatcaactgtaagtatattacttctggcaaagggacagtgtccggagttcttctggtgacacccaataatatcatgttcgaccctcacaagaacgatcccctggtacaggagaacggctgtgaggagtacgggattatgtgtcctatggaggaagttatgagcgctgctatgtacaaggagattctggattccaaaatcaaagaaagtctgcctatcgacatcgatcagttgtctggtcgggacttctgtcacagcaaaaagatgaccggcagtaatactgaggagatcgactccaggattcgcgacgctggtaacgattccgccagcaccgctccacggtcaaccgaggagtccctctctgaggatgtgttcacagaaagtgagctgagccccattcgcgaggagttggtctcaagcgacgagctgcggcaagacaagagctcgggagcaagttcagaaagtgtgcaaaccgtcaatcaggctgaagtggagagcttaacagtaaaaagtgagtcgactggcacccccgggcacctgcgaagcgacaccgagcacagtaccaatgaggtgggcacattgtgccacaagaccgatctgaacaaccttgagatggctattaaagaagatcagattgccgataattttcagggcatctctgggcctaaggaagacagcacatctatcaagggcaactctgaccaggactccttcttgcacgagaactccttgcaccaggaagaaagccagaaggagaatatgccctgcggggagacggcagagtttaagcaaaaacagagcgtcaataagggtaaacaaggcaaggagcagaatcaggacagtcagacagaagcagaagagttgagaaagctgtggaaaactcatacaatgcagcagactaagcagcagcgcgagaacatccagcaggtctcccaaaaagaggccaaacataaaattacgtctgccgacggacatatcgaaagcagcgccctgttgaaagagaagcagcgtcatcggctgcacaagttcttgtgcttgagagtgggtaagcctatgcggaagacttttgtgagccaggcgtcagcaacaatgcagcaatacgcgcagagggataagaagcatgagtactggttcgcagtacctcaggagcggactgaccatctgtatgctttctttattcagtggtctcccgagatttacgctgaggatacaggagaatatactcgcgagcccggatttatcgtggtgaagaagatagaggaatcagaaacaatcgaagattcttcgaatcaggccgcagcccgagaatgggaaatcactactcgggaggatattaactctaaacaagttgccacagtgaaagccgacttagagtccgaaagcttccgccccaacttgtccgacccctcagaactcctgctcccagaccagatcgaaaagttgacaaaacatctgccacctcgcactattggatacccctggacccttgtgtacggcactggcaagcacggcacttctttgaaaactctttatagaaccatgactggcctagatacaccagttctcatggtgattaaagacagcgacggacaggtgtttggggcccttgcctcggagcccttaaaagtcagtgatggtttctacgggactggggaaaccttcgtattcacattctgcccagagtttgaggtgtttaaatggaccggggataatatgttcttcataaagggagacatggactccttggcgtttggaggaggcgggggcgaattcgctctgtggctggatggagacctctatcacggcaggtctcattcctgtaaaacattcggaaatagaaccctttctaaaaaagaggacttcttcatccaggatatagagatctgggcctttgaatag

SEQ ID NO: 198336 - DNA, 651 bp, synthetic construct
  misc_feature 1..651: note = Description of Artificial Sequence: Synthetic coding sequence
  source 1..651: mol_type = other DNA
atgagccggctgtggtacggcaagaagggccggcggcaccagcccattaaccataagtacacactgattaccactagagaggacattaattcaaagcaggtggccaccgtcaaagctgatctggagtcagagagtttccggccaaatctatctgacccttctgagctgctcctgcctgaccaaatagagaaacttaccaaacatctcccccccaggactatcgggtacccttggactctggtttatggcaccggtaaacacggtacgtcgttaaagaccttatatcgcacaatgacgggactggacacccctgttttaatggttatcaaagactccgacggccaagtattcggagccctcgccagtgaacccttgaaggtgagtgacggtttctatggtacaggtgaaacattcgtctttacattttgccccgaattcgaagttttcaaatggacgggagataatatgttcttcattaagggtgacatggattctctggcgttcgggggaggaggaggagagtttgctctatggttggatggagacttgtatcatgggagaagccactcttgtaaaacctttggcaatcgcaccctgtccaagaaagaggatttctttatccaggatatcgaaatatgggcatttgaatag

SEQ ID NO: 198337 - DNA, 885 bp, synthetic construct
  misc_feature 1..885: note = Description of Artificial Sequence: Synthetic coding sequence
  source 1..885: mol_type = other DNA
atgcagcagaccaagcagcagcgggagaacatccagcaggtgagccagaaggaggccaagcacaaaatcaccagtgctgatggccacatcgaaagtagtgccctactgaaggagaagcagcgccacaggctgcataagttcttgtgcttacgagtgggcaagccaatgagaaagaccttcgtttctcaagcttcagccactatgcagcaatacgcccagcgtgacaagaagcacgaatactggttcgccgtgccgcaagaaaggacagaccacctgtatgccttctttatccagtggtcaccggagatttacgctgaagataccggcgagtacacacgggaaccgggcttcatagtcgtgaaaaagattgaggaaagcgagactattgaagactcaagtaaccaggctgctgctcgggaatgggagctgacaaaacatctcccacctcggactatcggctatccttggactctggtctacggcaccgggaagcacggaaccagccttaagacactttatcgtacgatgaccggactggacacccctgtactgatggtgattaaggattctgatggacaagtctttggcgccctcgcaagcgaaccactgaaagtctccgacgggttctatgggacgggcgaaactttcgtgttcacattttgccctgaatttgaggtctttaagtggactggggacaacatgttttttataaaaggtgatatggactcgttggcctttggtggcggtggaggtgaatttgctctttggctggacggagatctttaccacgggagaagtcacagttgcaagacctttggcaaccggactctatccaagaaggaggatttcttcatacaggatattgaaatttgggcgtttgaatag

SEQ ID NO: 198338 - DNA, 1512 bp, synthetic construct
  misc_feature 1..1512: note = Description of Artificial Sequence: Synthetic coding sequence
  source 1..1512: mol_type = other DNA
atgttctgccagcggaaggacaccggccagaagaagaccctggacaaaaaagacggcagaaggatgtcctttcaaaagccaaaaggaacaatagaatataccgttgaatcccgcgattctctaaatagcatagctctgaaattcgacaccacacctaacgagctggtccagctgaacaagctttttagccgcgccgttgtgacaggtcaagttctttacgtacccgaccctgagtatgtctcaagtgtagagtcaagtccatcactcagccctgtttctcctttgtctccaaccagttctgaggccgaattcgacaaaacaaccaacccagatgtgcacccaaccgaagcaacgcccagctccacctttactggaattagacccgcccgcgtcgtctcgtcaaccagtgaggaagaggaagcattcactgaaaagtttctgaaaattaattgcaagtatataacaagcggcaaaggcactgttagcggtgtgctgctggttacacccaacaacatcatgtttgatcctcacaaaaacgaccccttggtgcaggaaaatggatgtgaagagtacggtatcatgtgtcccatggaagaggtaatgagcgcagccatgtataaggagattctagattctaaaattaaggagagcctccccatcgacattgaccagttgtcagggcgagatttttgtcatagcaagaagatgactggcagcaacacagaggagatcgacagtaggatccgtgacgcgggcaacgactctgccagcacagctccaaggtccacggaggaaagcttatcagaagacgtctttactgagtcggagctaagccccatccgggaggagctcgtatccagcgacgagttgcgccaggacaaatcttcgggcgcatcctcggagtccgtgcagactgtcaaccaggctgaagtggaatccctgacggttaaatctgagagtacgggcactcctggccatctccggtctgatacggagcacagcaccaacgaagtcggcacactctgccacaagaccgacctgaataatctagagatggcaatcaaagaggatcagatagcagataatttccaaggaatctccgggcccaaagaggacagcacctctatcaaggggaactccgaccaggattctttcctacacgaaaactctctgcaccaagaagagtcacagaaggaaaacatgccttgcggcgagactgccgaatttaaacagaaacagagtgtgaataaaggcaagcagggcaaggaacagaatcaggactcacagaccgaagccgaggagttgaggaagctgtggaaaacacatacaatgcagcagaccaaacagcagcgagagaacatccaacaggtgtcccaaaaggaggcaaaacataagatcaccagcgctgacggccacatagagtccaaatgctaccgtgtcaatgaggtgagctcatccaattgcatggtatccccatcatttctcacagacagcaaggcagccgtcccgtag

SEQ ID NO: 198339 - DNA, 2622 bp, synthetic construct
  misc_feature 1..2622: note = Description of Artificial Sequence: Synthetic coding sequence
  source 1..2622: mol_type = other DNA
atgagcgtgagcaacctgagctggctgaagaagaagagccagagcgtggatatcaacgcgccaggctttaaccctttagcgggagcggggaaacagacaccgcaggcgagtaagcctcctgcgcctaaaactcccataattgaagaagaacaaaataacgccgctaacacacagaaacacccatcacggaggagtgagcttaaaagattttacaccattgataccggccagaagaagacgttggacaaaaaggatggacgtcggatgagttttcagaagcccaaaggcaccatcgaatacactgttgaatcacgcgattcattgaactcgatcgccctcaaatttgatacaacgccaaatgagctggtgcaactgaacaaactcttcagccgcgctgtggtgaccggtcaggtgttatacgtgcccgatcctgagtacgtgtcatcagtggagagcagcccttcactgtcacctgtgtctccgcttagcccgacctccagcgaagccgagttcgacaagaccaccaaccccgacgttcatcctacagaagccactccctccagcacattcaccggcattcgcccagccagagtggtctccagtacctctgaggaagaagaagctttcacagaaaaattcctgaagatcaactgtaagtatataacgtctggaaaagggacggtgtcaggggtcctcctcgtgacccccaacaacattatgttcgacccccacaaaaacgatccactggttcaagagaacggatgtgaagagtatggaatcatgtgtcccatggaggaggtcatgtccgccgccatgtataaggaaatcttggactccaagattaaagaatcccttccaattgacatcgatcagttgtccgggcgggacttctgtcactcaaagaaaatgactgggagcaatacggaagagatcgatagtaggatccgggatgctggcaacgatagtgccagcacagctccgcgcagtactgaagaaagcctgtctgaagacgttttcaccgagagtgagctgtcccctattagagaggaattggtctcttcagacgagcttcggcaagacaagagcagcggcgcctcaagtgaatccgtccagacagtaaatcaggccgaggtggaatctttaacagtgaaatcggaaagcaccggtacaccaggccatctgagaagcgatactgaacactcaacaaatgaagttggcacactgtgccacaaaacagatctgaacaaccttgaaatggcaattaaggaagatcagatcgccgacaatttccagggcatcagcggccctaaagaggactctactagtattaaaggaaatagcgatcaggattcgttcttgcacgaaaacagtctccatcaggaagaaagccagaaggaaaacatgccatgcggagaaactgcagagtttaagcagaagcagtccgttaacaagggcaaacagggcaaagaacagaaccaagactctcaaaccgaagctgaagagctgagaaagctgtggaaaacgcacactatgcagcaaacaaaacagcaaagggagaacatccagcaggtcagtcagaaagaggctaagcacaagattactagcgccgatggacacatcgagtcctctgccttgctgaaagaaaaacagagacacaggctgcacaagttcctatgccttagagtgggcaaacctatgaggaaaacgttcgtctcgcaggcatcagccaccatgcagcagtacgcacagcgggacaagaaacacgaatattggtttgccgtgccgcaggaaaggacggatcacctgtatgccttctttatacagtggtcaccggaaatttacgctgaagatacgggtgaatatacacgtgagccagggtttattgttgtcaaaaaaatcgaagagagcgaaaccatagaggactcatccaatcaggccgcagctagggaatgggaagtcgtgtctgtggccgagtaccaccggaggattgacgccctgaatacggaagagttgcgcactctttgccgccggctgcagattactactagagaggacatcaattccaaacaggttgccaccgtgaaagctgatttggaatccgagagttttcgccctaacctgtccgatcctagcgagttgctgctacccgaccaaattgagaaactgaccaaacacctgcctccacgtactattggttatccctggaccctggtgtatggcacaggtaaacatgggacaagtttgaaaacactctaccgcaccatgacaggattggacacacccgtcttgatggtgattaaagattctgacggccaggtctttggtgcgcttgcatcagagccactaaaggtgagtgacggcttctacgggaccggggaaacatttgtcttcacgttctgccctgagttcgaagtctttaaatggactggcgacaatatgtttttcatcaaaggggatatggacagtttagctttcggcggtggcgggggagagtttgcactgtggctagacggtgacctgtaccacggcagatcccattcatgtaagacctttggcaatcgcacactgagtaagaaggaagatttttttatccaggacatcgaaatatgggccttcgaatag

SEQ ID NO: 198340 - DNA, 2541 bp, synthetic construct
  misc_feature 1..2541: note = Description of Artificial Sequence: Synthetic coding sequence
  source 1..2541: mol_type = other DNA
atgagcgtgagcaacctgagctggctgaagaagaagagccagagcgtcgatataaacgcccctggattcaatcctctggctggcgccggcaagcagacaccgcaggccagtaaacctccagctccaaaaactccaataattgaagaagagcaaaacaacgcagcaaacacacaaaagcatccctccaggcggagtgagctgaagagattttacacaatagataccggccagaagaaaacattagacaaaaaagacggtaggcgtatgagtttccagaaacctaaaggaaccattgagtataccgtcgagtccagagacagcctcaatagtatagctttgaaattcgataccacacctaacgaactggttcaactgaacaagctctttagtagggctgtggtaactggtcaggttctttatgtccccgatcccgaatatgtaagctcagtcgaaagttccccttcgctctcaccggtctcacccctgagccctacaagcagcgaggctgaattcgacaaaactacaaatcctgatgtccaccccacagaagcgaccccgtcctccacttttactggaatcagacccgcgcgcgtcgtcagctcgacgagcgaggaagaggaggccttcaccgaaaaatttctgaaaataaactgtaagtatattacatcgggcaagggcaccgtgagcggagtgctgttggttacaccaaacaatataatgtttgatcctcataaaaacgatcccttagttcaggaaaacgggtgtgaggagtacgggataatgtgcccaatggaggaagttatgtccgcggcaatgtacaaggagattctggatagtaagatcaaggagtctctcccgatcgatatagatcaactgagtgggcgcgacttttgccatagtaagaagatgacgggttctaacacagaggagatcgacagccgtattcgcgacgcggggaacgattccgcgagcacagctcctcggagcacggaggaatctctcagcgaagatgtgttcacagaatcagagttatccccaattagagaggaactcgtatcctctgacgagcttagacaagataagtcatcaggcgcttctagtgagtctgtccagaccgtcaatcaggctgaggtggagtccctgacggtgaaatctgaaagcaccggcacacccgggcaccttaggtcagatactgagcacagcactaacgaggtaggcaccttgtgccacaaaaccgatctcaataacctggagatggcaataaaagaagatcagattgctgacaactttcagggtataagcggacccaaggaggacagtacctctatcaagggaaattccgatcaggactcgttcctgcacgaaaattctcttcatcaggaggaatcccagaaggaaaatatgccatgtggggaaaccgcagaattcaaacagaaacagtctgtcaacaagggtaaacagggaaaagagcagaatcaggactcacaaaccgaggctgaagagttgaggaagctgtggaagacacacacaatgcagcaaaccaagcaacagagagaaaatattcagcaggtgagtcagaaagaggccaagcacaagattactagcgctgacggtcacatcgagtccagtgcacttctaaaggaaaagcagcggcaccgattgcacaaatttctatgtctacgagtgggaaagcctatgaggaaaacattcgtgtctcaggccagtgcaaccatgcagcagtatgcccagcgggacaagaaacacgaatactggtttgctgttcctcaagaaagaactgatcatttatatgcgttcttcattcagtggagtccagagatctatgctgaagataccggggaatatactcgcgaaccaggcttcattgtcgtgaaaaaaattgaggaatccgagaccattgaagatagttcgaaccaggctgctgcccgcgagtgggagatcaccactagagaggatatcaattccaagcaggtggcgacagtgaaggctgaccttgagtccgagtccttcagacctaatttgtcagatccttctgagctgctgcttcccgatcaaattgagaagttgacaaagcacctccctccccgtaccatcggctacccctggacgttggtctatgggactggaaagcatggcaccagtttgaaaactctgtataggacgatgaccggactcgacaccccagtcctaatggtgattaaagactcggacgggcaggtcttcggtgccctcgcctcagagcccctcaaagtgtcagacggattctacgggaccggcgagactttcgtgtttacattttgtccagaattcgaagtattcaaatggaccggcgacaatatgtttttcatcaaaggcgacatggattccttggcttttggtggcggaggcggcgaatttgccctgtggctcgatggggatctgtatcacggtcggtctcattcatgcaagactttcgggaaccgaactctgtccaaaaaggaggatttttttatccaggacatcgagatctgggccttcgaatag

SEQ ID NO: 198341 - DNA, 822 bp, synthetic construct
  misc_feature 1..822: note = Description of Artificial Sequence: Synthetic coding sequence
  source 1..822: mol_type = other DNA
atgaccttcgacgacctgaagatccagaccgtgaaggaccagcccgacgagaagtccaacgggaaaaaagctaagggcttacaattcctgtacagcccctggtggtgcctggccgccgccacactgggagtgctttgccttggcctggtggtgactattatggtcctcggaatgcaattgtcccaggttagtgacctactgacccaggaacaggccaacctgacacaccagaagaagaagttggagggtcagataagtgccaggcaacaggcggaagaagcctcccaggagagcgagaacgagctgaaggaaatgattgagactttggcacggaagctcaatgagaaaagcaaagagcagatggagttacatcatcaaaacttgaatctgcaagaaactctaaaacgagtggccaattgcagcgcgccgtgtccccaggattggatctggcacggagaaaattgctaccttttctctagcggttcattcaattgggaaaagtctcaggagaaatgcctgagtcttgacgccaagctactgaaaatcaacagtacggccgatctggattttattcagcaagctatttcttacagctcctttccattttggatggggctttcacgtcgaaaccccagctacccgtggttgtgggaggacggcagcccgctcatgccccatctctttagagtgcgtggagccgtttctcagacctatccttctggaacttgcgcatacatccaaaggggggcagtctatgctgagaattgcatcctggcagctttctcaatctgtcagaaaaaagccaacctgagggcccagtag

SEQ ID NO: 198342 - DNA, 546 bp, synthetic construct
  misc_feature 1..546: note = Description of Artificial Sequence: Synthetic coding sequence
  source 1..546: mol_type = other DNA
atgaccttcgacgacctgaagatccagaccgtgaaggaccagcccgatgagaaatccaacgggaaaaaagccaaggggctccagtttctatactcgccctggtggtgcctggccgctgctaccctgggggtcctgtgcctcggattggtggttacaatcatggtccttggcatgcagcttagccaagtgtctgacctcttgacgcaggagcaggccaacttaacacaccaaaaaaaaaaactggaaggccaaattagcgccagacagcaggccgaagaggcctctcaggagtctgaaaatgagctgaaggagatgatcgagactctggcacgaaagctaaacgaaaagtccaaggagcaaatggaactgcatcaccagaacctgaatcttcaggagacacttaaaagggtggcgaactgcagtggacttcatcccgcctccaacttcctgtttcagttcagcattcttgacggcgcggtaagcgaagagccccaactcccgatggcacttggaggccgcttctcatttgatgcacctctgatctag

SEQ ID NO: 198343 - DNA, 570 bp, synthetic construct
  misc_feature 1..570: note = Description of Artificial Sequence: Synthetic coding sequence
  source 1..570: mol_type = other DNA
atgaccttcgacgacctgaagatccagaccgtgaaggaccagcccgacgaaaaatccaacggtaagaaggctaaggggctgcagtttctgtactccccatggtggtgtctggcagccgctaccctaggagttctgtgtcttggactggtagtaacgattatggttctgggcatgcagcttagtcaggtgtctgatctactgacccaggagcaggcgaatctgacccaccaaaaaaagaaattggaggggcagatctctgcccggcagcaggccgaggaagcatcacaggagtctgagaacgagctgaaggaaatgatcgagactctggctcggaagctcaatgagaagagcaaggagcagatggagctgcatcaccaaaatcttaacctgcaagaaactctcaagcgggtcgccaactgttctgcaccatgcccacaggactggatttggcatggggaaaattgctacttattttcatcaggctcatttaattgggaaaaatcacaggagaaatgtctcagtctcgatgcaaagctgttaaaaattaacagcacagccgacctgatctag

SEQ ID NO: 198344 - DNA, 1623 bp, synthetic construct
  misc_feature 1..1623: note = Description of Artificial Sequence: Synthetic coding sequence
  source 1..1623: mol_type = other DNA
atgcagcaggtgctggagaacctgaccgagctgcccagcagcaccggcgccgaagagatcgatctgattttccttaagggaattatggaaaatcccatcgtcaaatctttagcaaaggcacatgagagattggaagactctaagctggaagcagtcagcgacaacaatttagaactagtcaacgaaatccttgaggacattaccccacttatcaacgtggacgaaaatgtcgccgaacttgtcggcattctaaaggaaccccatttccagtcattgctggaagcacacgacatcgtagccagtaagtgctacgattcaccaccctcctcaccagagatgaataactcctcaatcaataaccagctgctaccagtcgacgctatcaggatcctgggaattcataagagggcaggcgaaccattaggagttacctttcgggtagaaaacaacgacttggtcattgctcggatcctgcacggcggtatgattgacaggcagggactcctacatgtgggagacatcataaaagaggttaacggacacgaagttggcaacaaccccaaggagctccaggagctgttgaaaaacatttccggttcagtaaccctaaaaatcctccctagttaccgagacacgatcaccccccagcaagtgtttgtgaaatgccacttcgattataatccatataacgataatctcatcccttgtaaggaggcaggtttgaagttttcgaagggggaaattctccagatcgttaatagggaggatccaaactggtggcaggccagtcacgtgaaagagggtggcagcgctggtctgatcccctctcagttcctcgaagagaagcgaaaagcttttgttagacgtgattgggataactctggaccgttttgcgggactatctcctcaaaaaagaagaaaaagatgatgtatttgaccacccgcaatgcagaattcgatcggcacgaaatacagatatatgaggaggtcgccaaaatgcctccttttcagagaaaaaccctcgtcctgataggggcccaaggcgtggggcgaagaagccttaaaaaccgctttatcgtccttaatcctacaaggtttggcacgacagtgccctttacatctagaaaacccagagaagatgaaaaagatgggcaggcctacaagtttgtgtctcgctctgaaatggaagccgacattaaggcaggcaagtaccttgagcatggggagtatgaaggaaatctgtacgggacaaagattgactccatacttgaggtggtacaaacaggccgcacctgtatactggacgtcaatcctcaagccctaaaagtcctgcgcacttccgagtttatgccctacgtcgtatttatagccgctcccgagttggagaccctccgggcgatgcacaaggcagtcgtggatgccggcatcaccacgaaactgctcacagactcagacctgaagaagactgtggatgagtcagcacggattcaaagagcctataaccattactttgatctgataatcatcaatgataatctggacaaggcatttgagaagctgcagaccgctattgaaaaactgagaatggaaccccagtgggtgcccatcagctgggtctactag

SEQ ID NO: 198345 - DNA, 636 bp, synthetic construct
  misc_feature 1..636: note = Description of Artificial Sequence: Synthetic coding sequence
  source 1..636: mol_type = other DNA
atgttccacctgcggacctgcgccgccaagctgcggcccctgaccgccagccagactgtgaaaacattttcgcagaaccgccccgccgcggcgaggacattccagcaaattcgttgctacagtgctcctgtggcagccgaaccattcctgagtggaacctctagcaattatgtcgaagagatgtactgtgcttggctcgaaaatcctaagtccgtccataagagttgggacatcttctttcgcaatacaaatgccggagctcccccaggaaccgcttaccagtctccattacccctctctcgaggaagcctggcagcagtagctcacgcacaatctctggtagaagcacaaccaaacgtcgataagctggtggaggatcacttagccgtacagtctctgatcagagcttaccagattagaggtcaccatgtagcccaactcgatccactgggcatactcgacgccgatttggacagcagtgtgccggccgacataatctcatcaacggacaaactgggcttctatggactcgacgagtccgatcttgataaagtctttcacctgccgaccacgaccttcattgggggacaagaaagtgccctaccccttcgggagattattcgccgtctggaatag

SEQ ID NO: 198346 - DNA, 1284 bp, synthetic construct
  misc_feature 1..1284: note = Description of Artificial Sequence: Synthetic coding sequence
  source 1..1284: mol_type = other DNA
atgttccacctgcggacctgcgccgccaagctgcggcccctgaccgccagccagacagtgaaaacattctcccaaaaccgacccgcagcagctcgcacatttcaacagataagatgttatagtgctcccgtggccgcggaacccttcctcagtgggacttccagtaactatgtcgaggagatgtattgcgcctggctagagaaccccaagtcagtgcacaagagttgggatatcttttttcggaacaccaacgcgggggctccacccggtactgcgtaccagagccctcttcccctgtcccggggtagccttgctgcagttgcccacgcacagagccttgtagaagcacagcctaatgttgataagctggtcgaagaccacctggcagtgcaatctctaattagggcttatcaaatcaggggccaccatgtagcccagctagatccactgggaattttggacgctgaccttgacagttcagttcctgcagatattatttcctctaccgacaagctgggattctatggactggatgagtccgatctagacaaggtcttccacttacctacaacgacattcataggtggacaggagtccgctctcccactccgcgaaatcattcgaaggttggagatggcttactgtcaacacatcggagttgaatttatgttcattaatgacctggaacaatgccagtggattagacagaaattcgagacccctggtatcatgcagttcacaaacgaagagaagaggactctgctggccaggctcgtcaggagcacccggttcgaggaattcctacagaggaaatggtcatccgaaaagagatttgggctggaaggatgcgaggtcttgattccggcactgaagaccattattgataaaagttcagagaacggggtggactatgtgatcatggggatgcctcacagggggaggctcaacgtgctagctaatgtgatcaggaaggagctggaacagattttctgccagtttgatagcaaactggaggccgccgacgaagggtccggggatgttaagtaccatttggggatgtatcatcgaaggattaacagggtaactgatcgaaatattactctatcactggtggccaatccatcccacctcgaagccgccgaccccgtggtcatgggaaaaacgaaggccgaacaattttactgtggggacactgaaggaaagaaagtccgtccccgcgagcgtagggccagacagattgtcaaggccccctgctccagcatggaatttcgctcccccacctag

SEQ ID NO: 198347 - DNA, 2925 bp, synthetic construct
  misc_feature 1..2925: note = Description of Artificial Sequence: Synthetic coding sequence
  source 1..2925: mol_type = other DNA
atgtactgcgcctggctggagaaccccaagagcgtgcacaagagctgggacatcttctttagaaacacaaatgcgggggccccacctggcaccgcctaccaatctccactgcctctgtctcgcggttcgctcgcagcagtagcccacgcccagagtctagtggaggcacagcctaatgtggacaagcttgtcgaggatcaccttgcggtgcagagtcttattcgggcctaccaagtcagaggacaccatatagcaaaattggatcctctcggaataagctgcgtgaatttcgatgacgctcccgtgacggttagcagtaacgtagatttggccgtatttaaggagaggcttcgtatgctcaccgtaggaggattctatggcctggacgagtcagatctcgacaaggtgttccaccttcctacgacaacttttataggagggcaggagtctgctctgcctctacgagaaatcatccggcgcttggagatggcctactgtcagcacatcggggtcgagttcatgttcatcaatgacctggagcagtgtcagtggataaggcaaaaattcgagacaccaggtattatgcaattcacaaacgaagaaaagcgaaccctcttggccaggctggtgcgctctacacgttttgaagagtttttgcagcgaaagtggtcttccgaaaaacgatttgggctggagggttgcgaagtgcttatccccgctctcaagaccattattgacaaatcctccgagaatggcgtggactatgttattatggggatgcctcacaggggaaggttgaatgtgctagccaatgtgatcagaaaggagctcgagcagatattctgccagttcgactccaagcttgaggccgcagatgaggggtccggggatgtcaagtatcacctgggcatgtaccaccgccgcataaacagggtgacagacaggaatattaccctctctctggtcgccaacccatcacatttggaggctgcagatcccgtcgtgatgggtaagacaaaggccgaacagttttattgcggcgataccgaaggcaaaaaagtgatgagcatcctcctgcacggggatgccgcgttcgctggtcaaggaatagtttacgaaacattccatctgtcagatctgccatcttacacaactcatggcacggtgcacgtggtggtgaataaccaaatcggcttcacgactgatccaaggatggctcgctccagtccctatccaactgacgtcgcacgggtcgtgaacgcaccaatcttccatgtgaattcagacgaccccgaggccgtgatgtacgtctgcaaggtggcagctgaatggcgttcaaccttccacaaggacgttgtggtcgacttagtgtgctacaggaggaacggacataacgagatggacgaacccatgttcacacagcctctgatgtataagcagatacgaaaacagaaacccgtgttgcagaaatacgcggaactactggtgtcacaaggtgtggtcaaccagcctgaatatgaagaagagatcagcaagtacgacaagatctgtgaggaggcatttgcccgctctaaggacgaaaagatactgcatatcaaacactggctcgattccccgtggccggggttttttacacttgacggacagcccagatctatgtcctgcccctcaaccggacttacagaggacatcctaacccacatcggtaacgtagcttcttcagtgcccgtcgagaactttaccatccacggaggcctgagccgcatcctcaagacccgcggcgagatggtcaagaaccgtaccgtcgactgggcactggcagagtatatggcattcggctcactgctgaaggagggtatacacattcgcctgagcggccaggatgtggaaaggggtactttcagccacaggcatcacgtgctccacgaccaaaatgtagacaaacgaacttgtataccaatgaaccacctctggccgaatcaggccccttatacggtctgtaatagtagtctgtccgaatacggagtgcttggctttgagctgggattcgcaatggcgtctccgaacgctctcgtgctttgggaggctcagtttggagactttcacaacaccgcacagtgcataatcgaccagttcatttgccccggccaggccaagtgggtgaggcagaacggaattgtactgctccttccccatggaatggagggcatgggcccggaacattcctctgcccgacctgagagatttctgcagatgtgcaacgacgaccctgacgtgctgccagatctgaaggaggcgaacttcgacatcaaccagttgtatgactgcaattgggttgtggtaaactgctccactccaggaaacttctttcatgtcctgagacgccagatccttttgccctttcgcaaaccccttataatcttcacacctaagagtcttctgagacaccccgaggcacggagttcattcgatgagatgctacctggaacacacttccagagagtaatacctgaagacggccctgcggcccagaatcctgagaacgttaaacggcttctattctgtactggaaaagtgtattatgacctcactcgagaacggaaggctcgcgacatggtggggcaggtcgcaattacaagaatagagcaacttagcccttttccctttgacttgcttcttaaggaagtgcagaagtaccctaacgccgagctagcttggtgccaggaagagcacaagaaccagggttattatgattacgtcaaacctcgactaagaacgaccatcagcagggccaaaccggtttggtatgcaggtagggatcccgctgcagctccggccaccggaaataagaaaactcatctgacggaactgcagaggttactagacactgcgtttgacctcgacgtatttaagaactttagctag

SEQ ID NO: 198348 - DNA, 3060 bp, synthetic construct
  misc_feature 1..3060: note = Description of Artificial Sequence: Synthetic coding sequence
  source 1..3060: mol_type = other DNA
atgttccacctgcggacctgcgccgccaagctgcggcccctgaccgcctcccagacagtcaaaacgttttcccaaaatagacctgctgcagccaggacattccagcaaatccgttgttactccgctccagtggcagcagagccctttttgtccggtacttccagcaactatgtcgaagaaatgtactgcgcctggctcgaaaaccctaaatcagtgcacaagagctgggacatctttttcaggaacacgaacgccggggccccccccggaacagcataccagtcccccctgcctctgagcagagggtccctggccgcagttgcccatgcccagtctttggtggaggcacagcccaatgtggataagctcgttgaggaccacctagcagtgcagtcacttattagagcttatcaggtgaggggccaccacatcgctaagctagaccctctgggtattagctgcgtgaacttcgacgacgcccccgtgaccgtgtctagtaacgtgggattttacggattggatgaatctgacctcgataaagtgtttcatctgcccacgaccactttcatcggggggcaggagagtgccctcccactgcgggagataataaggcgactcgaaatggcttactgtcaacacattggagtggaattcatgtttataaacgatttagagcagtgtcaatggatacgccaaaagttcgaaacccccggaattatgcaatttacaaatgaagagaaaaggaccctgctagcccggctggtcagaagtacacgattcgaggagttcctgcagcggaagtggtcatctgaaaaaaggttcgggttggagggttgcgaagtgctcatccccgcactaaagactatcatcgacaaatccagtgagaatggtgtagattatgtgattatgggaatgccacacagagggaggttaaatgttctggccaatgtgatccgcaaagagttggaacaaatcttttgtcagttcgattcaaaactggaggccgcagatgaaggctccggtgatgttaaatatcaccttgggatgtatcacagaaggataaatcgggttaccgacaggaacattacgctctccctcgtcgcgaaccctagccatctcgaggccgctgatccagtggtcatgggaaagacgaaggcagagcagttctactgcggggatactgaaggtaagaaagtgatgtccatcctgctgcatggggacgcagcctttgccggacaggggatcgtgtacgaaacatttcatttgtctgacctccctagttatacgacccacggcactgtccacgtcgtcgtgaacaaccagatagggttcactaccgacccgagaatggccagatcttccccgtatcctacggacgtcgcccgcgtggtcaatgcacctatctttcacgtcaattccgatgatcccgaggctgtgatgtacgtttgcaaagtggctgcagaatggcgatccacttttcataaagacgtcgtggttgatttagtgtgttacagacgcaatggacacaacgagatggacgaacccatgtttacacagccactgatgtacaaacaaataagaaagcagaaacctgtgcttcagaaatacgccgagctgttggtgtctcaaggtgtcgtaaatcagccagagtacgaggaggagatctctaagtacgacaaaatttgcgaggaagcttttgcaagatctaaggatgaaaagatcctgcatatcaaacactggttggactccccgtggcctgggttcttcaccctggatggccagccccgatctatgtcctgcccatcaacggggttgacagaagatatcctgacgcacattgggaatgttgcgtctagcgtgcccgtggagaattttacaatacacggcggtctgagccgcattttgaagactaggggtgagatggtaaagaataggactgtggattgggctttggccgagtacatggcctttggctcgctcctcaaggaggggatacatattcgcctttccggccaagatgttgagagaggtactttttcccacagacatcatgtactgcatgaccagaatgtggacaaaaggacatgtatcccgatgaaccatttgtggcccaaccaagccccctacaccgtatgtaactcttcactgtccgaatacggtgtgctgggattcgaactcgggttcgcgatggcgtcaccgaatgctctcgttctgtgggaagctcagtttggtgatttccacaacaccgcgcagtgcatcattgaccagttcatttgccctggtcaggctaaatgggtacggcagaatggtatagtgctgctcctcccacatggaatggagggcatgggccccgagcactctagtgcccgcccagaaagattcttacagatgtgcaatgacgaccccgatgtgctaccagacctgaaagaggcgaactttgacatcaatcagctgtacgattgtaattgggtagtggtcaactgctcaactccggggaatttcttccacgtcctgcgacgccagattctgctgcctttccgtaagccactcatcatcttcaccccaaagtctttacttcgccacccagaagccaggtcttctttcgacgagatgctcccaggaacgcatttccaacgcgtaatccctgaggacggccctgcagcccagaaccccgagaatgtgaaacggctgctcttctgcaccgggaaagtgtactatgacctgaccagggagaggaaggcgcgagacatggtcggacaggtcgcgattaccaggatcgagcagctctcaccttttcccttcgacctgctgctcaaggaggttcagaagtacccgaacgccgaattggcctggtgtcaagaggaacacaagaaccagggctattatgactatgtcaaacccaggctcagaactacaatctcccgtgctaagcctgtgtggtacgcaggccgcgacccggctgccgctcccgctactggaaacaagaaaactcacctaactgaattacagagactcctggatacagcgtttgatttggacgtgtttaagaacttctcttag

SEQ ID NO: 198349 - DNA, 2424 bp, synthetic construct
  misc_feature 1..2424: note = Description of Artificial Sequence: Synthetic coding sequence
  source 1..2424: mol_type = other DNA
atggccgccaccgagctgcggggcgtggtgggccccggccccgccgctatcgcagctctgggaggtgggggggccgggccacctgtcgtaggaggcgggggtggtagaggcgacgccggcccaggtagtggtgcagcctcaggaacggtggtggcagccgccgctggagggcccggacccggggccggcggagtggccgcagccggaccggctccggctcccccaacgggcggttctgggggctccggtgccggaggatcagggtccgcccgcgagggatggttattcaagtggacgaactacattaaaggatatcagcggagatggtttgtgctgtctaatggcctgctgagctactacaggtcaaaagctgagatgcgacatacctgtaggggaaccatcaacctggctactgccaatattacagtcgaggactcctgtaattttattataagcaacggtggggcccagacttaccatttgaaggctagctctgaggtcgaacggcaacgctgggtgacagcactggaacttgcgaaggctaaagcggtaaaaatgctagccgaatctgatgagagtggggacgaagagtccgtgtctcagactgataagaccgagctacagaataccctgagaactctgagttcaaaggttgaggacctgtccacatgtaacgacttgattgcaaaacacgggacggcgctccagcgctccctcagcgagctcgaaagtctcaaactccctgctgaatctaatgagaagatcaagcaggtaaatgaacgagccaccctcttccgcattaccagcaatgccatgataaacgcatgccgggatttcttgatgttggctcaaacccactccaagaagtggcagaagagcctgcagtacgagcgcgaccagcgaatacggttagaagaaacactggaacagctcgccaagcagcacaatcatctggaaagggcattcagaggggccaccgtccttcctgcaaacaccccggggaacgtaggatccggtaaagaccagtgttgtagtggcaaaggagatatgagcgacgaagacgatgaaaatgagttcttcgacgcacccgagattattacaatgccagagaacttgggccacaagcgaacaggatctaatatcagcggcgcctcctctgacatttccctagatgagcagtacaaacaccagttggaggaaaccaagaaagagaaacgcaccaggattccctacaagccgaactactccctaaacctgtggtcaatcatgaagaactgcattggaaaggagttgagtaagatacccatgcctgttaattttaacgaacctctaagtatgctgcagcgcctcacggaagaccttgaataccatgagctcctggaccgggcagccaaatgcgaaaattctcttgaacagctgtgctacgtggcagccttcaccgtgtcttcctactctaccactgtttttagaacttcaaagccgttcaaccccttgttgggcgagaccttcgagctcgaccgactggaagagaatgggtatcgatctctgtgcgaacaggtgagccatcaccccccggctgctgctcatcacgcagaatcaaagaacggctggacgctgcgtcaagaaatcaagatcacgagcaaatttaggggaaaatacctatccattatgcctctgggcaccattcattgtatatttcatgcaacggggcaccattacacatggaaaaaggttacaaccaccgtacataatatcatagtcgggaaactttggattgaccagagcggcgaaattgacatcgttaatcacaagactggcgacaagtgcaatctgaaatttgtaccttacagttatttcagccgcgacgtggctcgaaaagtaacaggggaagtgaccgatccttctggaaaggtgcactttgcgctcttggggacgtgggatgaaaagatggagtgtttcaaagtgcagccagtgataggggagaacgggggcgatgcaagacaaagaggccacgaggccgaggaatctcgggtcatgctatggaagaggaatccccttccaaagaatgctgagaatatgtattacttctcggaactggccctgaccttgaacgcctgggagtccggtacagcccctacggacagtcgacttagacctgatcagcgcttgatggagaatggtcgttgggatgaggcaaacgcagaaaagcagaggttggaagagaaacagagactaagtaggaaaaagagggaggccgaggccatgaaggcaactgaggacggcaccccctatgacccctacaaagccttatggttcgaaagaaaaaaggatcctgttactaaagaactgacacacatctatagaggcgaatattgggagtgtaaggagaaacaagactggtcctcatgcccagatatattctag

SEQ ID NO: 198350 - DNA, 1224 bp, synthetic construct
  misc_feature 1..1224: note = Description of Artificial Sequence: Synthetic coding sequence
  source 1..1224: mol_type = other DNA
atggccgccaccgagctgcggggcgtggtgggccccggccccgccgctatcgctgccctaggcggtgggggagccggaccgccggtggtcggtggcggcggcggccgaggagacgcaggccctggtagcggcgctgccctgcagcgcctgaccgaggatctagaatatcatgagctgcttgatcgagccgctaaatgcgagaattccctcgagcagctctgttacgttgctgcctttaccgtgagcagctattcgaccacagttttccgcacctcaaaacccttcaacccactattgggtgaaacttttgagctggatcgactggaggaaaatggctatcggagcctgtgcgagcaggtaagccatcacccaccagccgcggctcaccatgccgagagcaaaaacggttggacgttacgacaggagattaaaattacgtctaagttccggggaaagtatctttcgatcatgcccctgggcacaatacactgcattttccacgctacaggtcatcattatacgtggaagaaggttacgactacagttcacaatattatcgtgggaaagctgtggatagaccagagtggagagatcgacatagtcaaccataagaccggtgacaagtgtaacttgaaatttgttccatactcttacttttccagggatgtagcgagaaaggtgactggcgaggtcaccgatccaagtggaaaagtgcactttgctttactggggacgtgggacgaaaagatggagtgctttaaggtgcagccggtgattggtgaaaatggcggcgacgcacgacagagggggcatgaggccgaagagtcacgggtcatgctatggaaacggaatcccctgccaaaaaatgccgaaaacatgtactatttttcggagctcgcactgaccctgaacgcgtgggagtcaggcaccgcccctacagattccaggctgaggccagatcaacggctgatggaaaacggtcgctgggacgaggccaacgctgaaaagcaaaggctcgaagagaagcaacgcctgagtcgaaaaaagcgcgaggccgaagcaatgaaggcaacagaagatgggactccgtacgatccgtacaaggccctgtggttcgagcggaagaaggatccagtgacaaaggagctgacgcatatttaccgaggagaatactgggaatgcaaggagaaacaggactggtcttcttgtcctgatattttctag

SEQ ID NO: 198351 - DNA, 2751 bp, synthetic construct
  misc_feature 1..2751: note = Description of Artificial Sequence: Synthetic coding sequence
  source 1..2751: mol_type = other DNA
atgggcaaggccgccgcccccagccggggcggcggctgcggcggccgtagccgtggactaagttctctcttcacggtcgtcccatgtctctcctgtcacacagccgcgcctggtatgtcggcctctacgagcgggtccgggcccgagccaaaaccacagccgcagcccgtaccagagcctgagcgcggcccgctgtccgaacaggtatcagaggcagttagtgaagcagttcctcggtccgaaccagtcagcgaaactacatctgaacctgagcccggagctgggcagccaagtgagctgctgcagggctctaggccaggttccgaaagttcttctggagttggagctggccctttcacaaaggccgcaagtgaacccctgtctcgggcggtgggttccgccacttttctgcgcccggagtcaggctccctccccgccctgaaacctctccctctcctgaggccagggcaagccaaaacccccctgggggtgcccatgagcgggacaggcacaacatctagcgccccactcgccctattaccactagatagttttgagggctggctgcttaagtggacaaattaccttaaagggtatcagcggcggtggtttgtgctcgggaacggcctgctttcctactatagaaatcagggggagatggcgcacacatgccgggggactataaatctgagcactgcgcatatcgacacagaggacagctgcggaatcttgttgacctccggggcgcgatcatatcaccttaaggcctccagcgaagtcgaccggcagcagtggatcaccgcactcgagctggctaaggcgaaggcggtccgggtaatgaacacgcacagtgatgatagcggtgatgacgatgaggccacaaccccggccgataagtctgagctgcaccacactctgaagaatctctcactcaagctggatgatctctccacgtgtaacgacttgattgcgaagcatggcgcagcacttcagcgatccctgaccgagctagacgggctgaagatcccttccgagagcggcgagaagttgaaagttgttaacgaaagggccaccctgttccgcataacctccaacgccatgataaatgcttgtagggactttctggagctggccgaaatccacagtagaaaatggcaaagagccctgcagtacgaacaagagcagcgggtgcacctcgaggagacaatcgagcagctagcaaaacagcataactccctcgagagggccttccattctgctcccggccgaccagctaaccccagcaagtcattcatcgagggatccctgcttacgccaaaaggtgaggatagcgaggaggatgaggacacagagtacttcgacgctatggaggacagtacttcatttatcacagtgatcactgaggctaaagaggatagtaggaaggcggagggctctacgggcacctcttccgttgactggagctcggccgataatgtactggacggtgcttcactggtgcccaagggctcttctaaggtgaagagacgagtgcgcataccaaataaaccgaattacagtttaaatctgtggtccataatgaagaattgcatcggtcgcgaattgagtaggattccaatgccagttaatttcaacgagcctctcagtatgctgcaaagacttacagaagacctggagtaccaccaccttctggataaagctgtccactgcacctccagcgtggaacagatgtgtttggtggctgcttttagtgtaagttcttatagtactacagtccatagaattgctaagccgttcaacccgatgctcggcgagactttcgagctggatcgcctcgacgatatgggtctaaggagcctttgtgagcaggtttcccaccatccaccgagcgcagctcactacgtgttttccaagcatggttggtccttgtggcaggaaatcacgatctcgtcaaagttccggggcaagtacatcagtattatgcctctcggagctatacatctggagttccaagcgagtggaaatcactatgtgtggcggaagtctacatctacagtgcacaatataatcgtgggcaagctttggattgaccagtctggcgacattgagatcgttaatcacaagaccaatgataggtgtcagctcaaattcttgccctactcgtatttctccaaggaagcggctcgcaaggtgaccggcgtggtgtccgatagccagggcaaagcccactatgtgctgtcaggaagttgggacgagcaaatggagtgtagtaaggtgatgcatagttctcccagtagcccttcaagcgatggcaaacagaagactgtgtatcagactctgtccgcgaagctcctttggaagaaataccccctgcctgagaacgcagaaaacatgtattacttcagcgaactcgccttgaccctgaatgagcacgaagaaggtgttgcccctaccgattcccgccttcggccagaccagagattgatggagaaaggtaggtgggacgaagctaacaccgaaaaacaacggctcgaagagaaacagagactctcgcgccggcgcaggctggaagcatgcgggccgggatcctcgtgcagtagtgaagaggagaaggaggcagacgcctacactcccttgtggtttgagaagcgtttagaccccttgacaggcgaaatggcatgtgtatacaagggaggctactgggaagccaaggaaaagcaggactggcacatgtgccccaacatcttctag

SEQ ID NO: 198352 - DNA, 2625 bp, synthetic construct
  misc_feature 1..2625: note = Description of Artificial Sequence: Synthetic coding sequence
  source 1..2625: mol_type = other DNA
atgggcaaggccgccgcccccagccggggcggcggctgcggcggcagaagccgcggactgagctctttattcactgtcgtgccctgcttatcctgtcacaccgctgcacccggcatgtccgccagcactagtggctcagggcccgaacctaagccacagccccagcccgtccccgaacctgagagagggcctttaagtgagcaagtgtctgaagccgtgagcgaggccgtgcccaggagcgaacccgtctccgagacaacctccgagcccgagcctggcgcaggacagccttctgagctgctgcaggggagccggccaggatctgagagttccagcggcgtcggcgccggcccattcacaaaggcggctagtgaaccattatcaagagccgttggatccgctaccttcctgcggcctgaatccgggagcctacccgcactgaagccacttcccctactcaggccaggtcaggccaagacccccctaggggtgccaatgtcaggtacaggcaccacctcctcagcccctctcgcactcctccccctggattcttttgagggttggctgctcaagtggacaaattacttaaagggctatcagagacggtggttcgtccttggcaacgggttgctgagctactaccggaatcaaggtgaaatggcccacacctgccgcggaacgattaacttgagcactgcacacatcgacacagaagactcttgcggaatcttgctcacatccggtgcgcgtagttaccatttaaaagcttccagcgaagttgatcggcaacagtggattacagccctcgagctggcgaaggccaaggccgttcgcgttatgaacacccattccgacgattctggcgacgatgatgaggccacgactccggcagataaatcagagctccaccacacactgaagaacctgtccctgaagctggatgacctttctacttgtaacgatctgattgccaaacacggggcagctctgcagaggtccctgacagagctggatgggctgaaaatcccgtccgaatccggcgagaagttgaaggtcgtaaacgaacgcgctacactgtttcgcataacaagcaacgccatgataaatgcttgccgagattttctcgagttggcagagattcatagccgaaagtggcagcgggcacttcagtacgagcaggagcagcgggtgcacttggaagagactattgagcaactcgccaagcagcacaactcattggaaagagcttttcactctgcacctggcagacccgccaacccttctaagtccttcattgagggcagcctgctgaccccaaagggagaggatagcgaagaggacgaggacaccgagtattttgatgctatggaggattcgaccagcttcattactgttattaccgaggctaaagaggacagtaggaaagcggaggggtcaactggaacttcctccgtggactggtcttccgctgataatgtgaatttcaatgaaccattgtccatgttgcaacggttaacggaagatcttgagtaccaccacttgctcgataaagctgttcactgtacaagctccgttgagcagatgtgcctggtggcagctttctcggtctcttcctatagcacaacagttcataggattgctaagcctttcaaccctatgctgggtgagaccttcgagcttgaccgtctcgacgacatgggcttgcgctccctgtgcgaacaggtatctcatcaccctcctagcgcagcacattatgtattctccaagcacggatggtcactctggcaggaaatcacaatcagttccaaatttcgtggcaagtatataagtattatgcccctaggcgcaatacacttggagttccaggctagtgggaaccattacgtttggcgcaaaagcacatcaactgttcacaatatcatcgtgggcaagctgtggatcgatcagtccggcgacattgagatcgtgaaccacaaaactaacgataggtgccagcttaaattcctgccatatagttatttttccaaagaggctgcgagaaaggtgaccggagtagtgtcagactctcagggcaaggcccactacgtgctatccgggtcatgggatgagcagatggagtgtagcaaagtgatgcactctagtccatctagcccaagctccgacggcaagcagaagacagtttaccaaacgttgtcggcaaaactgttgtggaaaaaataccctctccccgaaaacgccgagaacatgtattatttctccgagctagctctgacacttaacgaacatgaagaaggtgtggcgcctactgacagcaggttgcgcccagaccagcgcttaatggaaaaaggccgttgggatgaagcaaatactgaaaagcagaggctggaggaaaagcagaggctgtctaggagaagacggctcgaggcatgtggtcccggtagctcctgttcctcagaagagggagaggccggtagagaaggacgtccaggaggcgaagagcgcggtgcacgcgtgggggttccccagggcagaatccccggtgagcaagcaactagccctcccacatcccctctttgcttgccttctagggaagggggaggatgccttcatgcaactgtagtgtag

SEQ ID NO: 198353 - DNA, 2253 bp, synthetic construct
  misc_feature 1..2253: note = Description of Artificial Sequence: Synthetic coding sequence
  source 1..2253: mol_type = other DNA
atgcaccggcagcggacccggaccatgagcagcctggccgccaagcgtctgggcatgaaccgacggcctgcgggaagcggcgggggaggaggcgaggcagccacatggggccatcgtttttggaggccccaggaacgacctactgaccgcaatcagggcgaaatggcccatacttgccgcggaactattaatctcagcaccgctcacatagacacagaagactcctgcggtatactgcttacctcaggggctaggtcgtatcatttaaaggcatcaagtgaagtggacaggcagcaatggatcactgctctcgagcttgctaaagcaaaagccgtgcgcgtgatgaacacccactcagatgactctggagatgatgatgaagcgacgaccccggcggacaaatcggagcttcaccatactctgaagaatctttccctcaaactagatgacctgtcaacctgcaacgatttgattgccaagcacggcgcagctctgcagaggtctctgaccgaactggacggactcaaaatcccctcagagagcggcgagaagctaaaagtggtaaatgaacgcgctacactgttcaggataacttcaaacgccatgataaacgcctgtagggactttttagaactagccgagatacatagccggaaatggcaacgcgcacttcaatatgaacaggagcagagggtgcatctggaggaaaccatcgaacagctagcaaaacagcataacagcctcgagagagcttttcatagtgcgcccggccgaccagcaaatccttccaaatctttcatcgaaggatccctgctgacgccaaagggcgaggattccgaggaggatgaagataccgaatattttgacgccatggaagacagtaccagctttattacggtgataaccgaagctaaggaggatcggaaagccgaaggatccacaggcacgtcatcagtggattggtcaagcgcagacaacgtactggatggagctagcctggttcccaaaggctcgtccaaggtaaagcggcgggtccggataccgaacaagccgaactacagcttgaatctttggagcatcatgaagaattgtataggcagagagctgtccaggattcccatgcctgtgaacttcaatgagcccctgtcaatgttacagcggctcaccgaggacctggaataccatcatctgctagacaaagccgtgcattgtaccagcagtgtagaacagatgtgtcttgtggccgccttttctgttagcagttattcaaccactgtgcatcggattgccaagccattcaacccaatgttaggagagaccttcgagctcgatcgtctcgacgatatgggcctacgctccctctgcgaacaagtaagccaccaccccccctccgctgcccattacgtttttagcaaacacggatggagcctctggcaggagataactatctctagtaaattccgcggcaaatatatcagcatcatgcctctgggagcaatccatcttgaattccaggcctccggaaaccactatgtgtggcggaagtccactagtacagtacacaacattatcgtaggaaaactgtggatagatcagtccggtgatatcgaaatagtcaaccacaagactaacgatcgctgccaactcaagttccttccctacagctacttcagtaaggaagccgcccgtaaagtgaccggcgtggtatccgacagccaggggaaggctcattacgttctcagtggttcatgggatgaacagatggagtgttccaaggtcatgcacagttccccctccagcccaagctcagatggtaaacaaaaaacggtgtaccaaaccctctccgctaagctcctgtggaagaagtacccactccctgagaacgcagaaaacatgtactattttagtgaactggcactaacactcaacgagcacgaagagggtgtggcccctaccgattcacgcctgcgtccggatcaacgcctgatggagaagggacgctgggacgaggccaacaccgaaaaacagcgccttgaagagaagcagcgcttgtcacgcagacgcagactggaagcttgtggtccaggaagcagttgcagctcagaggaggagaaagaagccgatgcctatacgccactgtggtttgagaagagactcgatccactgacaggcgagatggcctgtgtttataagggagggtactgggaggctaaggaaaaacaggactggcacatgtgcccaaatatcttctag

SEQ ID NO: 198354 - DNA, 1980 bp, synthetic construct
  misc_feature 1..1980: note = Description of Artificial Sequence: Synthetic coding sequence
  source 1..1980: mol_type = other DNA
atgaagggccggggctgctgggacaccgccagcgtgcggagcttctgttctagcggatgtcttaataagttcaaaaaggacgatagtggcgacgatgatgaggctacgacccccgctgataaatccgagctccatcatactcttaagaatctgagcctcaaacttgacgatctttctacttgtaacgatctgattgctaaacacggcgccgcactgcagagaagcctgacggagctcgatggcttaaagatcccgagcgagtcaggcgagaaactgaaggtcgtgaacgagagggctaccctgtttaggattactagcaacgcaatgatcaacgcatgtagagacttcctggagttggctgaaatccactccaggaagtggcagagggcactccaatatgagcaggagcagcgcgtacatctggaggagacaatcgagcagttagccaaacagcacaattctctcgagcgcgcttttcactctgcgccaggtcgtccggctaacccatcaaaatcatttatcgaagggagcctcctgacacctaagggcgaagatagcgaggaggatgaagatacagagtacttcgacgccatggaggatagcacaagtttcatcaccgtcatcaccgaagcaaaggaggattctcggaaggcagaggggtctaccggaacttcatctgtggactggagtagcgccgataatgtgttagacggggcgtcgctcgtccccaaaggaagctctaaggttaagagacgtgtgcggatccctaacaaacctaactactccctcaatctctggtcaattatgaaaaattgtatagggagagaactgtctcggattccaatgcccgtgaactttaacgaaccgttgagcatgctccagagactcacagaagacctggaatatcatcacttgctagataaggcagtccactgtaccagctcagtggagcagatgtgcctggtggctgccttttccgtgtcttcatatagcaccactgtgcacaggatagcgaaaccttttaacccaatgctgggggagacctttgaactggatcggcttgatgatatggggctgaggtccctgtgcgagcaggtgagccatcaccctccgagcgctgcccactatgtcttcagtaagcatgggtggtcattgtggcaagaaattacgattagctccaagtttcggggcaaatacatttccatcatgcctctcggagctattcatctggagtttcaagcaagcggtaatcactacgtgtggcggaagtctacatccaccgttcataacatcattgtcgggaaattatggattgaccagtctggtgacatcgagatcgttaatcacaagaccaacgaccgctgtcagttgaagttcctgccatattcctactttagtaaagaagccgcaaggaaggtcacaggcgtggtcagtgacagccagggcaaggcccattatgtcctgtcgggcagttgggacgagcagatggagtgctctaaggtcatgcactcatcgcccagcagcccctcaagcgatggcaagcagaagacggtgtaccagacccttagtgcaaaactgctgtggaaaaaatatcccctccccgagaacgcggagaacatgtattactttagcgaactggcgctaactctcaatgaacatgaagaaggcgtggcccctactgatagtcgccttaggcctgaccagagactcatggagaaaggaagatgggacgaagctaacacggagaaacaacgccttgaagaaaaacaaaggcttagccgtcgtagacgcctcgaggcttgcggccccggaagctcttgtagcagcgaggaggcggagaaggaggcagacgcttacacccccctgtggtttgagaaacggcttgatccactgacaggggagatggcctgcgtctacaaaggcgggtactgggaggccaaagagaaacaggactggcacatgtgtcccaatatcttctag

SEQ ID NO: 198355 - DNA, 1383 bp, synthetic construct
  misc_feature 1..1383: note = Description of Artificial Sequence: Synthetic coding sequence
  source 1..1383: mol_type = other DNA
atggaggacagcaccagcttcatcaccgtgatcaccgaggccaaggaggaccgtaaggcggaaggaagcacgggcacttcaagtgtcgactggagctcagctgataatgtcctggacggggcttccttggtgcctaagggaagctccaaggtcaaaagacgcgtgaggatccctaacaaacccaattatagcttgaacctttggtctatcatgaagaactgcatcgggagggaactgtctcgaatccctatgcctgtcaacttcaatgaacccttgtcaatgctacagagattgactgaagatctcgagtatcaccatctgctagataaggctgtacattgcacgagtagcgtggaacagatgtgcctcgttgccgctttcagcgtctcctcatactctaccacagtgcatagaatcgccaaaccctttaatcccatgctgggagagacgtttgagctggaccgcctggacgacatgggactcaggtctctttgtgagcaggtatcgcatcacccaccttccgctgcccattatgtttttagtaagcacggatggagcctgtggcaggaaattaccatctcttctaaatttcggggaaaatatatctcaattatgccccttggtgccattcatctggaatttcaggcgagtggcaaccactacgtgtggaggaagtctacgagcacggtacacaacatcatagtgggaaaactgtggatagaccagtcgggggatatcgaaatcgttaatcataagaccaacgatagatgtcagttgaaatttttgccatatagctacttttcgaaagaggccgctcgcaaagttactggagtagtgagcgacagtcaggggaaagctcattacgtgctcagcggctcttgggacgagcagatggagtgttctaaggtgatgcactcgtctccatcttcccctagctccgacgggaagcagaagaccgtctaccaaaccctgagtgccaagctgctttggaagaaataccctctgcccgagaacgccgagaatatgtactatttcagtgagttggccctgaccctaaatgagcatgaggaaggggtggctcctactgatagccgcctacggcctgaccagagactgatggaaaaaggacggtgggatgaggccaatacggaaaagcagagattggaagaaaaacagagacttagtaggcgaagaaggctcgaggcctgcgggccgggctctagctgcagctcagaagaggagaaagaggcagacgcctataccccattgtggtttgagaaacggctggatcccctaactggcgagatggcttgcgtgtacaaaggtggctattgggaagctaaggaaaaacaggattggcacatgtgccccaacatcttttag

SEQ ID NO: 198356 - DNA, 2295 bp, synthetic construct
  misc_feature 1..2295: note = Description of Artificial Sequence: Synthetic coding sequence
  source 1..2295: mol_type = other DNA
atggagcgggccgtgcagggcaccgacggcggcggcggcagcaacagcagctcccgctccagcagcagggctaccagcgccgggtcttcaccatcatgcagcttagctggtcgcggtgtctcaagccgcagcgcagccgcaggcttgggtggaggaggcagccgcagttcccccggatctgtggctgcgtcgccatccgggggcggcgggcgccgacgtgagcccgcactggagggcgtattgtcaaaatatacaaacttgctgcaaggatggcagaaccggtatttcgtactggactttgaggcaggcatccttcagtatttcgtaaacgagcagtccaaacaccagaaaccccgtggagttctctcattgtcaggggccatagttagcctgtctgatgaggctccccacatgctcgtggtgtactcagcaaacggcgaaatgtttaagctgcgggctgccgatgccaaagagaaacaattttgggtgacccagcttcgcgcctgcgctaaatatcatatggaaatgaactccaagtcggctccatcttccagaagtcgatcactcaccctgctgcctcacggaacacctaattccgcttctccatgtagccaacgacacctgtccgttggtgcacccggagtagtgaccattactcatcacaaaagcccggcggccgccaggcgcgctaagagccagtactcaggccagctccacgaggttagggagatgatgaatcaggtggagggccaacagaaaaaccttgtgcacgcaattgaatcgctgcctggatctggcccactcaccgccttggatcaggatctcctccttctgaaggctacatcagccgcgaccttaagttgcttgggagaatgccttaacctgctgcagcagagtgtacatcaggcaggccagccctctcagaaaccgggagccagtgagaatattctggggtggcatggttctaaatcccatagcactgagcaactgaagaatgggactttgggctctcttcccagtgcctctgccaacattacttgggcaatcttgccgaactctgccgaggacgagcaaacttctcaaccagaacctgaaccaaattcaggcagcgagcttgtgctcagcgaagacgagaagagcgacaatgaggataaagaggaaactgagctcggagtgatggaagaccagcgatccatcatcctccatctcatctcgcagttaaagttgggaatggacctcaccaaagtagttctcccaacgttcattctcgaaaagcgcagtctgctcgagatgtatgccgattttatggctcaccccgacctgctgctggcaattaccgcgggtgctacaccggaagaacgtgttatctgttttgtggaatactatctgaccgcctttcatgagggtcgtaagggcgccttggccaaaaaaccatataatccaattatcggagagaccttccactgttcatgggaggtgcccaaagatcgcgtgaagcctaagaggactgcctcacgatcgccggcttcctgtcatgagcaccccatggccgatgatccgtccaaatcatataagctgcgctttgtggcagagcaagtgtctcaccacccgcctatcagctgcttttattgtgaatgtgaggaaaagagattgtgtgtgaacactcacgtgtggaccaaatcaaagttcatgggcatgtccgtgggggtgagtatgattggagaaggagtcttacgtctcttagaacatggcgaagagtacgtgtttacgctgccatctgcttatgcccgatcgattcttacaataccctgggttgaactcggagggaaggtgtccatcaactgtgctaagacggggtactctgccacggtgatattccacacgaaacccttctatgggggaaaggtccaccgggtgacagctgaagtgaaacataatcccactaataccatcgtatgcaaggcgcacggcgaatggaacggcaccctggagtttacctataacaacggcgaaacaaaagtcatcgataccacaaccctcccagtgtaccccaagaagattcgaccactcgaaaagcagggtcctatggaatccagaaacctgtggagggaggtgaccagatatctacggctcggcgacattgatgccgcaaccgaacagaaacgccatctggaggaaaagcagagagttgaggagcgcaaacgcgaaaatctccgaacaccttggaaacccaagtacttcattcaggaaggagatggttgggtgtacttcaaccccctctggaaggcgcattag

SEQ ID NO: 198357 - DNA, 2103 bp, synthetic construct
  misc_feature 1..2103: note = Description of Artificial Sequence: Synthetic coding sequence
  source 1..2103: mol_type = other DNA
atggagcgggccgtgcagggcaccgacggcggcggcggcagcaactccagtagtaggtcctccagtagggctacctccgcaggcagttcaccatcctgctctctggcggggaggggcgtttctagccgcagcgctgctgccggcttgggagggggcggcagtagaagcagccctggttcagtggccgcctccccaagcggcggcggtggcaggcgaagagagccagccttggagggtgtcttgtccaagtatacaaatctgctccagggttggcagaaccgctatttcgtattggacttcgaggccggcatcctccagtacttcgtaaatgagcagtccaagcatcagaaacctcgaggcgtgctgagtctctctggtgccattgttagcctctctgatgaggcgccccatatgctggttgtctatagcgccaacggtgagatgttcaaactgcgcgccgctgatgccaaggaaaagcaattctgggtgacgcagttgcgagcgtgcgcaaagtaccatatggaaatgaactccaaaatgatgaaccaggtcgaagggcaacaaaaaaacctggtgcatgccatcgagagccttcccggaagtggcccattgaccgctctagaccaagatctgctgttgctgaaagcaacgagcgcagctactctgtcctgcctgggcgaatgtctgaatctgctgcagcaatctgttcaccaggccggacagccttcccagaaaccaggcgcctccgaaaatattctggggtggcacggttctaaaagccactccacggaacaactaaagaatggcaccctggggagtctgccatccgcttccgcaaatatcacttgggctattttgccgaatagcgcagaagacgaacagacttcacagccagagccagagccaaattcaggttccgaactggtcctgtccgaagacgaaaagagcgataatgaagataaagaagagactgaactaggagtgatggaggaccagcgatccataattcttcatctgatttctcagctcaagctgggaatggatcttacaaaagtagttttacctacttttatcctcgaaaagcggtccctgctggagatgtacgctgatttcatggcacacccagacttgctcttggctatcaccgcaggagctaccccagaagagcgtgtcatctgttttgtggaatattacctgacagcctttcatgagggtaggaagggcgcactggcaaagaagccctacaaccccattatcggcgaaactttccattgtagctgggaggttccaaaagaccgcgtaaagcctaaaagaaccgcaagtcgatccccggcctcctgtcatgaacatcccatggcagacgacccttctaaaagctacaagttacgcttcgtggccgagcaggtttcgcaccacccccccatttcttgcttttattgtgagtgtgaggagaaacgtctctgcgttaacacacacgtatggacgaaaagtaagtttatgggaatgtctgtgggcgtcagcatgatcggtgaaggtgtcttgaggctccttgagcatggcgaggagtatgtgttcactctgccgagcgcctatgctcggtcgatcctgactatcccatgggtggaactcggcggcaaggtctcaatcaactgcgcgaaaacggggtacagtgcaacagtgatctttcataccaaaccgttctacgggggcaaggtccaccgagttactgcggaggtgaaacacaacccaacgaacactatcgtctgcaaggcgcacggagaatggaacggcacactcgaatttacctacaataacggtgaaaccaaagtgatagacacgaccaccctgccggtttatccaaaaaagatccggcctctagagaagcagggcccgatggaatcgcggaacctgtggcgggaggttactagatacctgcggctcggcgacatagatgcagcaacagaacagaagaggcacctggaagagaagcagagggtcgaagaacgcaagagggagaacctgcggactccgtggaagccgaagtatttcatacaggaaggtgacggctgggtctattttaatccgctctggaaggcacattag

SEQ ID NO: 198358 - DNA, 2244 bp, synthetic construct
  misc_feature 1..2244: note = Description of Artificial Sequence: Synthetic coding sequence
  source 1..2244: mol_type = other DNA
atgcagggcggcgagcccgtgagcaccatgaaggtgagcgagagcgagggcaaactcgagggacaggccaccgccgtgacaccaaataagaatagtagctgtggcggtggcatctctagctcctcatcctccaggggcgggagtgccaaaggctggcagtattccgaccacatggagaatgtgtatggctatctgatgaagtacacaaacctagtgacgggttggcagtatagattcttcgtgctgaataatgaagcaggcctgctggagtacttcgtcaatgagcagtcacggaatcagaagcctcgaggaaccctccaacttgccggggctgtgataagccccagtgatgaggactcccatacctttacagtgaacgccgcatcaggcgagcagtacaagctgagggccactgacgcgaaagaacggcagcactgggtgagtagactccaaatctgcacacagcaccatacagaagcaatcggtaaaaacaaccccccccttaagtcccggtcctttagcctagcttcgagtagtaactccccaatatctcagagaaggcccagccagaatgctattagttttttcaatgtaggtcattccaagttgcaatcgctcagcaaaagaaccaatttacctcctgaccacctggtggaggtaagagaaatgatgtcacatgccgaaggacagcagagagaccttatcagacgaatcgaatgcctgcctacgtcaggccatcttagctctttggaccaggacttgttgatgcttaaagctacctcaatggccactatgaattgcttgaatgactgcttccatatcttacagctccaacacgcctctcaccaaaaaggctccctgccatccggaaccacaattgagtggctggaaccgaaaatttcactgtccaaccactataagaacggagccgaccagccttttgcgactgatcaaagcaagccagttgctgtgccagaggaacagccagtggcagaatcaggattactcgccagggaaccagaggagataaatgccgacgatgagatcgaggatacctgcgaccacaaggaagacgatctgggcgcggtggaagaacagcggagcgtgattctgcaccttctgtcccagctaaaacttggaatggacctgaccagggtcgtgctgccaacatttatcctggaaaagcgctccctacttgagatgtacgcagacttcatgagccatccggacctcttcattgccattaccaacggcgccacagcagaagatcgaatgataaggtttgtcgagtattatctgacctccttccacgagggccgaaagggggccatcgccaaaaagccttacaaccccatcataggggagacgtttcattgttcttggaagatgcccaaatccgaagtcgccagctccgtcttctcatccagctctactcagggagttacaaaccacgcccccctcagcggtgagtctttgactcaggtaggttctgattgctacaccgtcagattcgtggcagagcaggtgtctcatcaccccccagtcagtggattttatgccgagtgcaccgagcgcaagatgtgcgtaaacgcccatgtctggacaaagtccaagttcttaggtatgagcataggggtcacaatggtaggcgaaggcatcctttcgcttctggagcacggtgaagaatacacattttcactgccttgcgcatacgctagatccattttgacagtaccttgggtcgagttggggggtaaagtatccgtgaactgcgccaagacgggatatagcgctagtattactttccataccaagcccttttacggcggcaagttgcatcgggtgactgcggaggtgaagcacaatattacaaataccgtggtgtgccgtgttcagggagagtggaattccgttttggagtttacctatagtaatggcgagacaaagtacgtggacttgaccaagctggccgtaactaagaaacgagtccgccccttggagaaacaggatcccttcgaaagcaggcggctgtggaagaacgtgaccgacagccttcgtgagtcagaaattgataaggccacagaacacaagcataccctggaggagcggcagaggacagaagaaaggcaccggaccgaaacagggacgccgtggaagaccaaatacttcattaaagagggcgacgggtgggtttaccataagccactgtggaagattattcctacgacccagcctgccgaatag

SEQ ID NO: 198359 - DNA, 2853 bp, synthetic construct
  misc_feature 1..2853: note = Description of Artificial Sequence: Synthetic coding sequence
  source 1..2853: mol_type = other DNA
atgaacaccgaggccgagcagcagctgctgcaccacgcccggaacggcaatgcagaggaggtgagacaactcctcgagacaatggcccgaaacgaagtgatagcagatattaattgcaaaggccggagcaaaagcaacttggggtggaccccccttcatcttgcatgctacttcggccaccgtcaagtggtgcaggatctgttgaaggcaggcgcagaggtgaacgtcctaaacgacatgggcgatacccctttgcacagggccgccttcacaggccgcaaagagctggtaatgcttcttctggaatataacgcagacaccacgatcgttaatgggtcagggcagaccgctaaggaggtgactcatgcggaggagattcgctccatgctggaggccgtggagcgcacgcagcagcgtaaattggaagagcttctgcttgcggctgcaagggagggcaaaactacagagctcaccgcgctgctgaaccgaccgaatccaccagatgtgaattgctcggatcagttggggaacacccccttgcattgtgctgcctatcgcgcccataaacagtgcgcgctgaaactgcttcgtagcggtgcagatccgaatcttaagaacaaaaatgatcaaaaaccacttgatctggcccagggggcagaaatgaagcacatcctcgtcggcaataaagtcatttataaggcattgaagaggtatgagggccctctgtggaaatcaagtaggttctttgggtggaggctgttttgggttgttctggaacatggggttctttcctggtacaggaaacagcccgacgctgtgcacaacatttaccgccaggggtgtaaacatttgacacaggcagtttgtaccgtgaagtcaaccgatagctgcttattcttcatcaagtgttttgacgataccatccacggatttcgcgtgcccaagaattccctgcagcaaagccgcgaagactggttagaggcaatagaggaacactcagcctacagtacacactactgtagccaggaccagttaacagacgaagaagaagaggacacagtgagcgcggcggatctcaagaaatccttagagaaagctcagtcgtgtcaacagagactagatagagagatcagcaactttctaaaaatgattaaagaatgtgatatggccaaggaaatgctcccttcttttctgcagaaggtcgaagtggtgtctgaggcctctagggaaacctgtgttgccctgacagattgcctcaatctgttcacaaaacaggaaggcgtcaggaattttaagcttgagcaggaacaggaaaagaacaaaatcctgtccgaagccctggagactctggccaccgaacatcatgagctggaacagtctctggttaagggtagcccccctgcaagcattctgtccgaggacgaattctatgacgctctgagtgactcagaatctgagagatctctgtcgagactcgaggccgtcaccgctaggagcttcgaagaagagggcgagcatttaggctcccggaaacatcggatgagtgaggagaaggactgtggcggtggagatgcccttagtaacggaatcaaaaagcatcgaacctccttgccatctccgatgtttagccgtaacgatttctccatttggtcaattcttcggaagtgtattggcatggaactatctaaaatcactatgcctgtgattttcaacgagcccctgtctttcctgcaaagattgaccgagtacatggaacatacatatctcatccacaaggcctcctcactgtcagaccccgtcgaacggatgcagtgtgtcgcagctttcgccgtctctgccgttgcttctcagtgggaaaggactggaaagcctttcaaccccctgctaggtgaaacctacgagcttgtccgtgacgacctcggcttcagactgataagtgaacaggtgagtcatcacccccccatctcagcattccacgcggaaggactgaacaatgacttcatcttccatggtagtatatatcctaaactgaagttttggggaaagtcagttgaagcagaacctaaagggacaatcactctagaactattagaacataatgaggcatacacttggaccaatcccacttgttgcgtccacaatattatcgtggggaagctgtggattgaacagtacggcaacgttgagattatcaaccacaagaccggcgacaaatgtgtgctgaactttaagccctgtgggctattcgggaaggaactgcacaaagtggaaggctacatccaggacaagtccaagaagaagctgtgtgccctgtatggcaaatggacagagtgcctctattctgtggatcctgccacctttgacgcatacaagaaaaacgataaaaagaacaccgaggaaaaaaagaatagcaagcagatgtccacgagtgaagaactagatgaaatgccagtccccgacagcgagagcgtgtttataatcccaggctccgtgttactctggaggatcgcaccgcggccacctaacagtgcccaaatgtacaattttactagttttgcgatggtgctcaacgaggtggataaagatatggagagtgtaattcccaagactgattgtaggttaaggccagatattcgggccatggaaaatggagaaattgaccaagcttcggaggagaaaaaaagactagaggaaaagcagagggcggctaggaaaaacaggagtaaaagcgaggaggactggaagacccgctggtttcatcaaggacccaacccctataatggagcacaggattggatttattctggatcctactgggatcgcaactatttcaatttgcccgatatatattag

SEQ ID NO: 198360 - DNA, 1707 bp, synthetic construct
  misc_feature 1..1707: note = Description of Artificial Sequence: Synthetic coding sequence
  source 1..1707: mol_type = other DNA
atgatcaaggagtgcgacatggccaaggagatgctgcccagcttcttgcaaaaggtcgaggtggttagcgaggcttcccgggaaacctgcgtggcattaaccgattgtcttaacctgttcacaaaacaggagggcgttcgaaattttaagctcgaacaagagcaagagaaaaacaaaatcctgagcgaggctttagagacccttgccacggagcaccacgagctcgagcagtctttggtgaaagggagcccgcctgcaagcattctgtccgaggatgagttctacgacgccctgagcgacagtgagtccgaacgatcactgtctaggctcgaagcagtcaccgctagatccttcgaggaagaaggtgagcacctgggtagcaggaagcatagaatgtctgaggaaaaggattgcggcggaggggatgccctgtccaatggaattaagaagcacagaacttcattaccgtcccctatgtttagcagaaatgacttttcgatctggtctattttgcgcaagtgcatcggcatggagctgtccaaaattaccatgccagtgatcttcaacgagcccctaagctttctgcagaggctcacggaatatatggaacacacctaccttatacacaaggcaagttccctgagtgatcccgttgaacggatgcagtgcgtggctgcatttgccgtgagcgcggtcgcctcgcagtgggagaggaccggcaaaccttttaatccactgctgggggaaacttacgagctggttagggacgacctaggcttccggctgatatcagagcaggtgtcccaccaccctcccatctccgcattccatgccgaaggtttgaacaatgactttattttccatggatccatataccccaagctcaaattctggggcaagtccgttgaagccgagcctaaagggacgataacattagagctcctcgagcacaacgaggcctatacttggactaacccaacctgctgtgtgcataacattatcgttgggaaactgtggatcgagcagtacggcaacgtggagataattaatcacaaaactggcgataagtgtgtgttaaattttaaaccatgcgggttattcggtaaggagctgcacaaggtggaaggttatatccaagataagtcaaagaagaaactgtgtgcattgtatggcaaatggaccgagtgtctgtattcggtggatccggccacgtttgacgcctataagaaaaatgacaagaaaaataccgaggagaaaaagaacagcaagcaaatgagtacctctgaggaattagatgagatgccggtgcctgattcagagagcgtctttattattccgggatcagtcctactgtggcgcatagctccaaggccaccgaattccgcccagatgtataattttacttcatttgccatggtccttaatgaagtcgacaaagacatggagagcgtcattcctaagactgactgtaggctccgaccagatatccgcgcgatggaaaatggcgagattgaccaagccagtgaggaaaagaagagacttgaggaaaagcaaagagcagctcggaagaatcgcagtaagagcgaggaagactggaaaacccggtggtttcaccaggggcccaatccatataatggcgcacaggattggatctactctggttcttattgggatcgcaattacttcaaccttcctgatatttattag

SEQ ID NO: 198361 - DNA, 303 bp, synthetic construct
  misc_feature 1..303: note = Description of Artificial Sequence: Synthetic coding sequence
  source 1..303: mol_type = other DNA
atgaacaccgaggccgagcagcagctgctgcaccacgcccggaacggcaatgccgaagaggtgcgccagctcctcgagactatggcccgcaatgaggtgatcgccgacattaattgtaaaggacggagtaagagcaacctcggttggacccccttacacttggcctgctattttggccatcgacaggttgtccaagatctgctgaaagcaggggcagaggtcaatgttcttaatgacatgggggacacacccctgcaccgtgccgctttcactgggcgcaagatctgctcccaggggagctag

SEQ ID NO: 198362 - DNA, 1314 bp, synthetic construct
  misc_feature 1..1314: note = Description of Artificial Sequence: Synthetic coding sequence
  source 1..1314: mol_type = other DNA
atgagcgaggagaaggactgcggcggcggcgacgccctgagcaacgggattaagaaacaccggacatctcttcccagcccaatgttttccaggaacgatttctctatatggtctattttgagaaagtgtatcggaatggagctgtccaagattaccatgccggtgatcttcaatgaacccctgagctttctgcaacggctgacggaatacatggaacatacctacctgatccacaaggcgtcgagtttgagcgatcctgttgaacggatgcagtgcgttgccgccttcgcggtctctgccgtcgctagccagtgggaacggaccgggaaaccctttaacccactgttgggcgaaacctatgagttggtgcgcgacgacctgggcttccgtctaattagcgagcaagtctcccaccaccctcccattagtgcattccatgcggagggcctgaacaacgattttatattccatggcagcatttacccaaaacttaagttctggggaaaaagcgtagaagccgaaccgaagggtaccattaccctagagctcctggagcataatgaggcttatacctggacaaaccctacatgttgcgtccataacatcatagtgggaaagttatggatagaacaatacggaaatgtcgagatcattaaccataagacaggggacaagtgtgttctgaatttcaagccctgcggattgttcggaaaggagctgcataaagttgagggctacatacaggataaatccaagaaaaagctgtgtgcactgtacggaaagtggacagagtgcctctattcagttgaccctgctaccttcgatgcatacaagaaaaatgacaagaaaaacactgaagagaaaaaaaactctaagcaaatgtccacgagcgaagagttggatgagatgccagttcctgactctgagagtgtattcattattcccggctcagtgctactgtggcggattgccccacgaccgcccaacagcgcccagatgtacaacttcaccagcttcgccatggttcttaatgaagtggacaaagacatggaaagcgtgatcccaaagaccgactgccgccttcgaccggacattcgggcaatggaaaacggtgaaattgaccaggccagtgaagagaagaagcgtctagaggagaagcagcgcgctgcaaggaagaataggagtaagagcgaagaagattggaaaactagatggttccaccagggtcccaatccctacaacggagcccaggattggatatacagcggatcctactgggaccgaaattactttaatctcccggatatctattag

SEQ ID NO: 198363 - DNA, 345 bp, synthetic construct
  misc_feature 1..345: note = Description of Artificial Sequence: Synthetic coding sequence
  source 1..345: mol_type = other DNA
atgcagagcgtggccgccttcgccgtgagcgccgtggccagccagtgggaacgtacaggtaaacctttcaacccactgctgggtgagacgtacgaactcattagggaggacttgggtttccgttttattagtgaacaagtgtctcatcatcctcctatcagtgccttccacagcgaagggctaaatcacgattttctattccatggttctatatacccaaaactgaaattctggggaaaatccgtcgaggctgagcccagaggaaccatcaccctcgaattactgaacgtgaaccagcgtcatctaagagcaaagcacaaaagcccaacaaatgctgggcgatag

SEQ ID NO: 198364 - DNA, 1443 bp, synthetic construct
  misc_feature 1..1443: note = Description of Artificial Sequence: Synthetic coding sequence
  source 1..1443: mol_type = other DNA
atgaacggcgaggaggagttcttcgacgccgtgaccggcttcgactccgataatagttcaggcgagttctccgaggcaaaccagaaggttacaggaatgatcgacctggatactagcaagaataaccggattgggaagaccggcgagcgcccaagtcaagagaatgggatacagaagcataggacatccctgcccgccccaatgttcagcaggtctgacttctcagtctggacaattctgaaaaaatgcgtggggctcgagctatcaaaaatcacgatgcccatcgccttcaatgagccactttcatttctgcagcggataactgaatacatggaacatgtatacttgattcaccgagccagctgtcaaccgcaaccactggaacgcatgcagtctgttgccgccttcgccgtcagcgctgtcgcaagccagtgggagcgcacaggtaagcccttcaatccccttttgggtgagacatacgaactaattcgagaggaccttggctttaggttcattagtgagcaggtaagccatcaccctcctatatccgcgtttcattctgagggcctgaatcatgacttcctcttccacggctcaatctacccaaaactgaagttttgggggaaaagtgtagaagccgagccaaggggaacgattacccttgagctgctgaaacataacgaagcttatacttggacaaaccctacctgctgtgtgcataacgtcattattggtaagctttggattgaacagtacggcacggtggagatcctcaaccacagaacaggtcataagtgcgtgcttcacttcaagccttgtggcttgttcgggaaagagttacataaggtggagggccacatacaagataaaaacaagaagaaattattcatgatctatggaaagtggactgagtgcctttggggaatcgacccggtatcatatgaatcgttcaaaaagcaggaaagacgaggcgaccatttacgtaaggccaaattagatgaggacagtggaaaagcagactcagatgtggcggatgatgtgcctgtcgcacaagaaactgtgcaggtgataccaggtagcaaactgctttggaggattaacacacgccccccaaattctgctcaaatgtataacttcacatccttcacagtcagcttgaacgaactcgaaaccgggatggaaaagacattgccccccacagactgtaggttaagaccagatattcggggtatggaaaacggtaacatggatcttgcatctcaggaaaaagagaggctggaggaaaaacagcgggaagcccggagagaaagagctaaggaagaggctgagtggcagaccaggtggttttatccggggaataacccttatactggcacgcctgactggctgtacgcaggcgactacttcgaacgcaactttagcgactgtccagacatttattag

SEQ ID NO: 198365 - DNA, 1407 bp, synthetic construct
  misc_feature 1..1407: note = Description of Artificial Sequence: Synthetic coding sequence
  source 1..1407: mol_type = other DNA
atgaacggcgaggaggagttcttcgacgccgtgaccgaggccaaccagaaagtcactggtatgattgacctggacacaagcaaaaacaatcgtatcggaaaaactggtgagagaccctcccaggaaaatggaatccagaaacatcgcaccagcctccctgcccccatgtttagccgctccgacttctcagtatggacaatcttgaagaaatgtgtcggcctcgaactgtcaaagattaccatgcccattgcctttaatgaacccctttcttttctccagaggattacagagtacatggaacatgtgtacctcatccatcgtgcaagttgccagccccagcccctggagaggatgcagagtgtggcagctttcgccgtctcagcggtcgcgagccagtgggagagaactgggaaacctttcaaccccttactgggggagacatatgaactgatcagagaagacctgggctttcggttcatcagtgaacaagtttcgcatcacccaccgatctctgcctttcattcagaggggctcaatcacgattttctatttcatggctccatctatcccaaactcaaattctggggaaaaagtgttgaagccgagccccgcggaactataacactggaactgcttaagcacaatgaggcttacacatggaccaatcccacgtgctgtgtccacaatgttattataggcaagctctggatagagcagtacggaacagtagagatacttaatcatcgcaccggccacaagtgcgtgctgcactttaagccatgtgggctcttcggaaaggagctgcacaaagtagaaggacacatacaggataagaataaaaagaaactgtttatgatctacgggaagtggacagagtgcctttggggaatagacccagtgtcctacgagtctttcaagaaacaggaacgacggggtgaccacctgaggaaagcgaagctggacgaagactccggtaaagccgacagcgacgtagcggatgacgtgccagtcgcacaggagaccgtgcaggttatccccggctcaaagctgctttggcgaattaatactcgacctcccaattctgcccagatgtacaattttactagttttaccgtaagccttaatgagttagagaccggcatggagaagactctccccccaacggattgcaggctgcgccctgatattagaggaatggagaatggcaacatggacctcgccagtcaggaaaaggaaagattagaggaaaagcagcgggaggccaggcgagagagagctaaggaagaagctgaatggcaaaccagatggttttatccaggaaacaatccttatactggaacacctgattggttgtacgcgggcgactacttcgagaggaactttagcgattgtcctgatatctattag

SEQ ID NO: 198366 - DNA, 1113 bp, synthetic construct
  misc_feature 1..1113: note = Description of Artificial Sequence: Synthetic coding sequence
  source 1..1113: mol_type = other DNA
atgcccatcgccttcaacgagcccctgagcttcctgcagcggatcaccgagtatatggaacatgtgtaccttatccacagggcttcatgccaacctcagcctctggaaaggatgcagtctgtggcagcctttgctgtgtctgccgtcgcctcccagtgggaaagaacaggaaagccttttaaccccctgctgggtgagacttatgaactaattcgtgaggacttaggctttcgctttatctcagaacaggttagccaccacccccccatctcagcctttcattctgagggcttgaatcacgactttctcttccacggctctatttaccccaaactcaaattctggggcaagtctgtcgaggctgagccccgaggtactatcacacttgaacttctgaagcacaacgaagcgtacacttggacgaaccccacctgctgcgtccacaacgtgattattggaaagctttggattgagcagtatggaaccgtggagatcctaaaccacagaaccggtcacaagtgcgttctgcattttaaaccatgcggtttattcggcaaagagctgcacaaggtggagggccatattcaagacaaaaacaagaaaaagttgtttatgatttatgggaagtggaccgagtgcctctggggcatcgaccccgtatcctatgaatctttcaagaagcaggagaggcgtggcgaccacttgcggaaagccaaacttgatgaagatagtggaaaggcagattccgatgtcgccgacgatgtaccagtggctcaggagacagtgcaggtcatccccggctccaagctgctgtggcgtattaacaccaggccccccaactccgcacagatctggcctgccaggcgcagatccgggtggaggagaagtcgagagaagcatgggggctccggacctcggcggagacaatcaggacgcaggggcggcagtactcaagcaatcacgcctaccttaggacccccaacaggctgtatgcagggcatcaccttgagtggtatctctccaaccgcccagattagcaccgaaggtctggaagggcccggagccagagaccggaggctaacacggctcgacttcttagagtggcctctgtag

SEQ ID NO: 198367 - DNA, 339 bp, synthetic construct
  misc_feature 1..339: note = Description of Artificial Sequence: Synthetic coding sequence
  source 1..339: mol_type = other DNA
agcgtggccgccttcgccgtgagcgccgtggccagccagtgggagagaaccggtaagccttttaaccccctcctcggagaaacatatgaacttatcagagaagacctgggctttagatttattagtgaacaagtctctcaccatccaccaatttcagcattccacagcgaagggctgaatcacgatttccttttccacggttcaatctaccctaagctgaagttttggggaaagagtgtggaggcagagcctcgcggcactattacactggagttgctcaacgtgaaccagagacacctgcgggcaaaacacaagagcccgaccaacgccgggagatag

SEQ ID NO: 198368 - DNA, 2664 bp, synthetic construct
  misc_feature 1..2664: note = Description of Artificial Sequence: Synthetic coding sequence
  source 1..2664: mol_type = other DNA
atgatgagcgacgagaagaacctgggcgtgagccagaagctggtgtctccttctaggtccacttccagttgtagctcaaagcagggatcacgccaggattcgtgggaagtggtcgaaggcctacgcggggaaatgaattacacccaggaaccccccgtgcagaaaggttttctgctcaaaaagagaaaatggcctttgaaaggctggcataagcgcttcttctacttggacaaaggtatcctgaaatacgctaagtcccagacggatatcgaaagggaaaagttgcacggctgcatcgacgtaggactgagcgtgatgtcagtcaagaaatcctccaaatgcatcgacctcgatacagaagaacacatttatcacctgaaagtaaagagtgaggaagtgtttgacgaatgggtgagtaaattaaggcaccataggatgtatagacagaacgaaattgcaatgttcccgcatgaggtgaaccactttttcagtggctctaccattactgattcctcctccggggtctttgatagcatttctagcagaaaacgatcttcaatatcgaagcaaaatttgtttcagaccggcagcaatgtatccttttcttgcgggggagaaacccgtgtccctctgtggctacagtcctcagaggacatggaaaaatgttctaaggatttggcacattgccatgcttatctggtagaaatgtcccaactcctgcagtccatggatgtactccaccggacctatagtgcacctgcaatcaacgccatccagggtggcagcttcgaaagtccaaaaaaagaaaagagatctcaccgtagatggcggagcagggcaataggtaaagacgcaaagggtacactgcaagtccccaagccatttagtgggccggtgcgcctgcattccagtaatccaaatctcagtacacttgatttcggagaagagaagaattacagtgacggcagcgaaacttccagtgaatttagcaagatgcaggaagatctgtgtcatattgcgcacaaagtctatttcaccctcagatccgcatttaacattatgtctgctgagagggagaaactgaagcagctcatggaacaggatgcttccagttcaccctcagcccaggtgatcggcctcaagaacgcactgagctccgcactcgcacagaacaccgaccttaaagagaggctcaggaggattcacgccgaatctttactcttggattcccctgcagttgcaaaaagcggtgataacctcgctgaggaaaattcccgggacgagaatcgtgccctggtgcatcagctgtccaatgagtccaggcttagtattacagactctctttccgagttctttgacgcgcaggaagtcttgctaagcccatcaagctcggagaatgagatatcagatgatgattcttacgtttctgacatttctgataacctgtctttagacaatttatcaaacgacttggacaacgaaaggcagactttgggccccgtactagacagcggcagagaagccaagagtagaagaaggacatgcttaccagccccctgtccgtcatcctcgaatattagcctctggaacatcctccgcaataatattggtaaggacctatccaaggtcgcgatgcctgtagaactaaacgagcccctgaatacactacagagactctgcgaagagctagaatatagtgagctgctcgacaaagcggcacagataccaagccccctggagcggatggtttacgtagctgcattcgcaatatctgcctatgcctcaagctattaccgggccggtagtaaaccctttaacccagtactcggcgaaacgtacgaatgcatccgtgaagataagggatttcagttctttagcgagcaggtgagccatcacccacctatttctgcctgccacgcggagagcagaaacttcgttttctggcaggatgttaggtggaaaaacaaattctggggaaagagtatggaaatcgttcccataggaaccactcacgtgaccctccctgtctttggggaccactttgagtggaacaaagtgaccagctgcattcataatattttgagcggccaaaggtggatcgaacattacggtgagattgtgatcaagaatcttcatgacgacagctgctattgcaaagtgaactttattaaggcgaaatattggtcgacaaatgcacacgaaatcgagggcactgttttcgaccgatcaggaaaagcggtacatcggcttttcggaaagtggcacgagtccatctattgcggcggaggctcctcttctgcttgtgtttggagagccaacccgatgcctaaaggatatgagcagtattattcttttactcagttcgcgctggagctgaacgagatggatccaagcagtaagtccttgttgccccccacggacacgagattccgcccagatcagaggtttcttgaagagggaaacctggaggaggccgaaatccagaagcaacgaattgaacaacttcaacgagagagacgcagggtgttggaggagaatcatgtcgagcatcaacctcggtttttccgaaaaagtgatgatgactcctgggtctcaaatggcacatacctggagctgcgtaaagacctcggcttttcgaagctcgatcaccccgtactgtggtag

SEQ ID NO: 198369 - DNA, 2571 bp, synthetic construct
  misc_feature 1..2571: note = Description of Artificial Sequence: Synthetic coding sequence
  source 1..2571: mol_type = other DNA
atgatgagcgacgagaagaacctgggcgtgagccagaagctggtgagccccagtcgatctacatctagttgttcttctaagcagggctctcggcaggactcatgggaggtagtagaaggattacgaggagagatgaactacacccaggagccacctgtgcagaagggctttttgctgaaaaagcgtaaatggcctctgaaaggctggcacaagcgatttttctacctcgacaaaggcatccttaaatacgcaaagtcacagacggatatcgaaagggaaaaactccatggctgtatcgatgtgggactgtcagtcatgtccgtcaagaagtcgtccaagtgtatagacctggatacggaggaacacatctaccacctgaaggtgaaaagcgaggaagtcttcgacgaatgggttagcaaactcagacaccaccgaatgtaccgccaaaacgagattgcaatgttcccccatgaggtgaatcacttcttctccggttccacaatcacagactcttctagcggtgtgttcgatagcatcagctcacggaagcgctcatctataagtaagcagaacctgttccaaaccggctcgaacgtttcttttagctgcggaggagagactcgtgtgcctctatggttgcagtcttccgaggacatggaaaagtgcagcaaggacctagcccactgtcacgcctatctggtggagatgagccagttgttgcagagcatggatgtgctccaccgtacctacagcgcacccgccattaatgcaatccaggttcccaaaccgttctctggacctgtgcgacttcactccagcaatcccaacctttctacactggattttggagaggaaaaaaactatagtgatggctcggagacaagttcggagtttagcaagatgcaggaggacctgtgccacattgctcataaggtgtacttcacattaaggagtgcattcaatatcatgagcgccgagagggagaagctcaagcagctcatggagcaggacgcaagttctagcccctccgctcaggtgattggtctaaagaacgccctcagctccgctcttgctcagaataccgaccttaaagaacggttaagacggatccatgctgagagcctgcttctagattcgccagccgtggctaaatctggcgacaacctggccgaggagaatagccgggacgagaatagggccctggttcaccagctcagcaacgagagcaggctgtctattacagatagcctcagcgaattttttgacgcccaagaagtgctcttgtcaccttcatcctccgaaaatgagatttcagacgatgatagttacgtgagcgacatctccgacaacctgagtttggacaacttgagcaacgatctggataacgagcggcagacactcgggccagtgctcgactccggccgggaggccaagagtcgacgacgaacgtgcctcccagcaccgtgcccttccagctcaaatatctctctgtggaacattctgcgcaataatatcgggaaggatttatccaaggtggctatgcccgtcgaactgaacgagccgcttaacacccttcagagactgtgcgaagagttagaatactcagaactgctggataaagcagctcagattccctcccccctggagaggatggtttacgtggctgcctttgccatttcagcctacgcctctagctactacagggcgggctcaaaacctttcaatcccgtccttggagaaacatacgagtgtatccgtgaggacaagggattccagttcttttcagagcaggtcagtcaccatcctcctatttccgcatgccatgccgaatctagaaacttcgtcttctggcaggatgtccgatggaagaacaagttctggggtaaatccatggaaatcgtaccaataggcactacccacgtaaccttgcccgtgtttggcgaccattttgaatggaacaaagtaacatcctgtattcacaacatcctgagcggtcagcgctggatcgagcattatggagagatcgtaattaagaatttgcatgacgatagctgttactgcaaggtgaattttatcaaggccaaatactggtccactaatgcccacgagattgaaggcacggtattcgatcgtagtggtaaagctgtgcaccgcctctttggcaaatggcatgagtccatatactgcggcggaggctcgtcgagtgcctgtgtgtggagagcaaacccgatgcctaagggctacgagcaatactactccttcacacagtttgctttggagctgaatgagatggacccctcctcaaaatcactgctgcctccaacagacaccagattccggccagatcaacggtttctagaggaaggcaatctcgaggaggccgagatccagaaacaaaggattgagcagcttcaacgggaacgtaggcgagtgttggaagagaatcacgttgaacaccaaccaagattcttcaggaaatcggatgacgactcatgggtaagcaacgggacatacctcgaactcagaaaagacctgggttttagcaaacttgaccaccctgtgctgtggtag

SEQ ID NO: 198370 - DNA, 2556 bp, synthetic construct
  misc_feature 1..2556: note = Description of Artificial Sequence: Synthetic coding sequence
  source 1..2556: mol_type = other DNA
atgatgagcgacgagaagaacctgggcgtgagccagaagctggtgtcaccctcgcgctctacctcatcgtgttcgtccaaacagggcagtaggcaggattcctgggaggtagtcgaaggtctgcgcggtgagatgaactacacacaggagcctcccgtccaaaaaggatttctgctgaaaaaacggaaatggcccctgaaagggtggcacaagagattcttttacttggataaagggatactgaagtacgcaaaaagccagaccgatatcgagcgggagaaactccatgggtgtattgacgtcggcttgtccgtcatgagtgtcaagaagagctctaaatgcattgatctggatacagaagaacacatttaccacctgaaggtcaagagtgaggaggtgttcgacgagtgggtgagtaaattgcgccatcaccggatgtacaggcaaaacgagatcgctatgttcccacatgaggtgaaccactttttcagcgggagtacgattacggattcttcctccggtgtgttcgatagcatttccagcaggaaacgatcctctatttctaaacagaatttattccagaccggctctaacgttagcttctcttgcgggggggaaacaagggtgccactgtggctgcagtccagtgaggatatggaaaagtgctccaaggacttggcgcactgtcatgcttacttggttgagatgtcccagctgttacagagcatggatgtgctccatagaacatacagcgccccggctatcaatgcaatccaaggagggtccttcgaatctcccaagaaagagaagcgctctcatcgccgttggaggtcgcgagccataggcaaggatgcaaagggcacactccaagtgcctaagcccttttccgggccagtgaggttacactcgagcaatcctaatctcagcactcttgactttggagaggagaagaactattcagatggaagcgagaccagctcggaattcagcaaaatgcaggaagatctctgccatattgcccacaaggtatattttacactgcgctctgccttcaatattatgtcagccgaacgagagaagttgaaacaactcatggaacaggacgcctcatcaagccctagtgcccaggtgatcggccttaagaacgctctgtcctcagagaatagcagagatgaaaaccgcgctttagtacaccagttgtccaacgaaagccgactctccattactgactcgctctccgaattctttgacgcccaggaggtgctgctttcaccaagctcttccgaaaacgaaatcagcgacgacgacagctacgtgtcagacatatctgataacctctcacttgataatctgagtaacgacttggataatgagcggcagacactaggtccagtgttagattctgggcgggaagcaaaatcacggcgccgcacctgcctgcccgccccgtgtccctcatcatcaaatatcagtctttggaacatcctgcgcaacaacattggtaaagacctgagtaaagttgccatgccagtggaactgaatgagcctctcaataccttgcagagactctgcgaagagcttgagtactcagaactgttagataaagcggcccagataccatcacccctggaacggatggtatatgtggctgcgtttgcaatatcagcttatgcctcctcctactaccgcgcgggtagcaagccattcaatccagtccttggggagacttacgagtgcatccgagaagacaaaggtttccagttcttttcggaacaagtgagtcaccacccaccgataagcgcctgccacgccgagagccgcaacttcgtcttctggcaggatgtccgatggaaaaacaagttctgggggaaaagcatggaaatagtgcccataggaaccacacatgtgacactgcctgtgttcggggatcacttcgagtggaataaggttacaagttgcatccacaatattctgagcggacagcgttggatcgaacactacggtgagattgtgatcaaaaatctccatgacgacagctgctattgcaaggtaaattttattaaagcaaaatattggagtactaacgcccacgaaatcgagggaactgtgttcgataggtcgggaaaagccgtccatcgattattcgggaaatggcacgagtccatttattgtgggggcggctcatcaagtgcgtgtgtatggcgcgccaaccctatgcctaagggatacgagcaatactacagttttacacagtttgccctcgaactgaatgaaatggacccatcttctaagagcctgctaccgccgacggatacgcgatttaggcccgatcaaagattcttggaggagggaaatctcgaggaagccgagatacagaagcaacggatcgagcaactgcagcgggaacggagaagagtccttgaagagaatcacgtggaacatcagcctcgtttctttcgcaaatccgacgacgactcttgggtgagcaacggtacctacctggagctccgaaaggaccttggcttctcaaagctggaccaccctgtgctgtggtag

SEQ ID NO: 198371 - DNA, 2556 bp, synthetic construct
  misc_feature 1..2556: note = Description of Artificial Sequence: Synthetic coding sequence
  source 1..2556: mol_type = other DNA
atgatgagcgacgagaagaacctgggcgtgagccagaagctggtgagcccatctagaagcacaagttcttgcagcagcaagcagggctctaggcaggacagttgggaggtggttgaaggactccgtggcgaaatgaactatacccaggaacccccagtccagaagggattcctgctgaaaaaacggaaatggcctcttaagggatggcacaaacgctttttttatctggataaagggatcctgaaatatgctaagtctcagacagacatcgagcgggaaaagttgcacggctgcattgacgtaggactatctgtcatgagtgtcaaaaagagcagcaaatgtattgacttagacaccgaagaacacatttatcacttgaaggtcaagtcagaggaagttttcgatgagtgggtgtcaaaactgcgccatcataggatgtacaggcagaatgaaatcgctatgttcccccacgaggtcaaccacttcttctctggctccaccattactgacagctccagtggagtatttgatagcatctcctcacgcaaacgctcctcaatcagtaagcagaacttgttccagactggatcgaacgtgagtttttcctgtgggggagaaacacgcgtgccgctgtggctccagtcgagtgaggatatggaaaagtgcagcaaggatctggcccactgccacgcatatcttgttgaaatgtcccaactgctacaaagtatggacgtgctgcataggacatattccgctcccgccatcaacgctatacagggcggaagctttgaatcccctaaaaaagaaaagaggtcccacagacgttggcgctcaagagctatcgggaaggacgccaaaggcaccttgcaagttcccaagccattctcgggccctgtgaggctgcacagtagtaaccccaacttaagcacacttgactttggagaagagaagaactatagcgacggttcagaaacttcgtctgagttctctaagatgcaggaggacctgtgccacatagcgcataaggtctacttcacactcagatcagcctttaacatcatgagcgcagaaagggagaaactgaagcagttaatggaacaggacgcctcttctagtcccagcgcgcaggttataggcttgaagaacgccctgtcttctgaaaacagccgtgacgagaacagagccctggtgcaccagttatctaacgagtcgagactgtcaatcactgactctttgagtgaattctttgacgcccaggaggtgctgctgagtccttcgtcctctgagaatgagatttctgacgatgattcctacgtctcagatatctcagataatctgtctctggataacttgagcaatgacctggataacgaacggcagacattaggccccgtgcttgacagcggccgagaagccaagagcagacgtcgcacctgcctgccggccccctgtccctcatccagtaacattagtctctggaatattctgagaaataacatcgggaaggatctctccaaggtggccatgcccgtggagctaaatgagcctctgaatacactgcagaggctgtgcgaggaacttgaatattctgaactactggataaggccgcccagataccctcacctttggagcgtatggtgtatgtggccgctttcgcaatcagcgcctatgctagcagctattatagagcaggatctaaacctttcaatccggtgctgggagagacctatgagtgcatccgggaggataagggattccagtttttcagtgaacaggtgagtcatcatccccccattagcgcatgtcacgccgaatcacgtaacttcgtattctggcaagatgtcagatggaagaataagttttggggcaagtcaatggaaatagtgccaatcggtacaactcatgttaccttaccagtcttcggggatcactttgaatggaacaaagtcacctcctgcatccataatatcctctccggccagaggtggatcgagcactatggagaaattgtgattaaaaacctccatgacgactcttgttattgcaaggtgaacttcattaaggccaagtattggtcaactaacgcacatgaaattgaaggcacggtattcgatagatcagggaaggcagtgcatcggctgttcggaaagtggcatgaatcaatctattgtggcggcgggagttccagcgcttgcgtctggcgagccaaccccatgcccaagggatacgagcagtactactcatttacacagtttgcgcttgaactgaatgagatggatccaagctccaaatctctgctgccccctacagacacaagattcaggccagatcagcgctttctcgaagaaggcaacctcgaggaagctgaaatccagaaacagcgaatcgagcaattacagcgggaaaggagacgggtgctagaagagaatcacgtggaacatcagccacgattcttccggaagtctgacgatgactcttgggtgagcaacggcacctatttggaactgcgcaaggatctaggtttttcaaaactagatcatcctgtgctgtggtag

SEQ ID NO: 198372 - DNA, 2571 bp, synthetic construct
  misc_feature 1..2571: note = Description of Artificial Sequence: Synthetic coding sequence
  source 1..2571: mol_type = other DNA
atgatgagcgacgagaagaacctgggcgtgagccagaagctggtgtccccatctcgttccacaagttcttgtagtagtaaacagggatctaggcaagatagctgggaagttgttgaagggcttaggggcgagatgaattatactcaagagcctccagtacagaaaggcttcttactgaagaagaggaagtggcctctaaagggatggcacaagaggttcttttacttggacaagggtatccttaaatacgcaaagtcccaaacagacatagaaagagagaagttgcacggttgtatcgatgtggggctaagcgtcatgtctgtcaagaagtcctcaaagtgtattgacttggatacagaagagcacatctatcacctgaaagtgaagtctgaggaggtgttcgacgagtgggtcagcaaattaaggcaccaccgaatgtacaggcagaacgaaatcgccatgttcccccatgaggtgaaccatttcttcagtgggtcaaccataacagattcatcatccggtgtcttcgatagcatcagttcacgcaagcgtagctcgatcagcaagcaaaatctctttcagactggatctaacgtgtcgttttcatgtggaggtgaaactagagtgccactgtggctgcagtcatctgaagatatggaaaaatgcagtaaagacctcgcgcattgtcacgcctatctggtcgagatgtctcagctcctccagagcatggatgtccttcaccgcacatatagcgcaccagccatcaacgcgatccaggttccaaaaccgttctctggacccgttcggctccactcatcaaatcctaaccttagtaccttggatttcggagaggaaaagaactatagcgatgggtccgagacttcctcggagttcagcaaaatgcaagaggacctttgtcatatcgcccacaaggtgtatttcacgcttaggtcagctttcaatatcatgagcgcagaaagagagaaactgaaacagctaatggagcaagacgcctcatcgagcccgagtgctcaggtgattggactcaagaatgccttgtcctccgctctggcacagaacacagatcttaaagagcgtctgaggagaatccatgccgagtccctcctccttgacagtcccgccgttgctaagagtggggataaccttgccgaggagaattcaagagatgagaacagggcgctcgtgcatcagctttctaacgagtcacgtctttccattaccgactccctctccgaattttttgacgcccaggaagtcttgctgtctccaagctcgtctgagaatgaaatttctgacgatgactcatacgtatccgacattagcgataacctgtctttggacaacctgtcaaacgacctcgacaatgagagacaaacacttggccctgtattagacagcggcagagaggctaaatcaaggcggcgtacctgcctgcctgccccatgcccctccagctctaacatatccctctggaacatcttgcggaataacatcggaaaggacttgtccaaagtcgctatgcccgtagagctgaacgagccacttaacactctccaacgcctgtgcgaggagctggaatactcggaacttttagataaggccgcccaaatacccagcccattggagcgtatggtatatgttgccgcgttcgcaatctccgcatatgctagttcctattaccgggctgggtcaaagccattcaatcccgtgcttggggaaacctacgaatgtattcgcgaggataaggggtttcaattcttttctgaacaggtttcgcatcatccgcctattagcgcatgtcacgcagaatctaggaatttcgtgttttggcaggacgtcagatggaagaacaagttttggggaaaatcaatggagattgtgcctattggaaccactcacgtcacactaccggtttttggcgatcacttcgaatggaataaggtcacgtcatgcattcacaacattctctcaggtcagagatggattgaacactacggagagattgtgatcaagaacctacatgacgattcgtgctactgcaaggttaactttataaaggcaaagtactggtctacaaacgcccatgaaatagagggcactgttttcgaccgctctggaaaggccgtgcacagactgtttggcaaatggcatgagtcaatctactgcggcggaggttcgtcttcagcttgtgtctggagagccaatcccatgcccaagggctatgaacaatattacagttttacacaattcgctctggaacttaacgagatggaccccagcagtaagtctctgctaccccccactgacaccaggtttagacctgatcagcgctttctggaagagggaaatctggaggaagccgagatccagaagcagaggatcgagcagttacagagagaacgcaggcgcgtgctggaggaaaatcacgtagaacatcagccgcggttctttaggaagtcggacgatgattcgtgggttagcaatggaacttacctggagctccgtaaagatctgggcttctctaaactcgatcaccccgttctgtggtag

SEQ ID NO: 198373 - DNA, 2463 bp, synthetic construct
  misc_feature 1..2463: note = Description of Artificial Sequence: Synthetic coding sequence
  source 1..2463: mol_type = other DNA
atgatgagcgacgagaagaacctgggcgtgagccagaagctggtgagcccttcccgtagcaccagttcttgctcctctaagcaaggctctcgccaggacagctgggaagttgttgaagggctgaggggcgaaatgaattatacccaagagcctccagtgcagaaggggtttctgttaaaaaaaagaaaatggcccctcaagggctggcacaaacgatttttttatttggataagggcattctcaaatatgccaagtcacagactgatatcgagcgagagaagctgcacggctgcattgacgtcggcctttcagtgatgtccgtcaagaaatcttcaaaatgcatcgaccttgacaccgaagagcacatctatcatctcaaggtcaaaagtgaagaagtgttcgacgaatgggtgtctaaattgaggcaccaccgaatgtatcggcaaaatgaaattgcgatgttccctcacgaagtcaatcatttcttttctggctcaacaatcacagacagctcaagcggcgtcttcgatagcatcagcagtcgtaaacgaagttctattagtaagcagaatctgttccaaaccgggtcaaacgttagtttcagttgcggtggagagacccgggtgcctctctggctgcaatcaagcgaggatatggagaagtgcagtaaagaccttgcccattgccatgcatatctggtagagatgtctcagctcctccaatcaatggatgtgctgcatagaacatactccgctccggctatcaacgcaatacaagttccaaagcccttttctgggccggtgcggcttcactcttcaaacccaaacctttctactttggactttggcgaagaaaaaaactatagcgatggatctgaaacgagtagcgaattttccaagatgcaggaagatctctgccatatcgctcacaaagtttactttaccctcaggtccgctttcaatatcatgagtgctgagcgagaaaagctaaaacaactaatggagcaagacgcatcctcctcaccttcagcccaggtgataggattaaagaacgccctgtcaagtgagaattctcgggacgaaaaccgtgccctggtgcaccagctgtcgaatgagtcgcggctgagtattaccgattcacttagcgagttctttgatgctcaagaagtgctgctcagccctagcagctccgagaacgaaatttcagatgacgattcttacgtgtccgacatttccgataacctcagtttagataacctgtccaatgatctggataatgagcgccagactctcggccccgtgttggacagcggtagggaggccaaatcacgccggcgcacatgtctgcctgctccctgcccctcctcatcgaacatttctctgtggaatattctgcgaaacaatattggaaaagacctgtcaaaggtggctatgccagtggagcttaacgaaccgttgaacacactccagcgcctgtgtgaagagctagagtactctgagttgttggataaagccgcccagatcccctcgcccttagaacgcatggtttatgtggccgctttcgcaatctcagcctatgcctcaagctactatcgagcaggctcgaagccttttaatccagtgcttggcgagacatatgagtgtattcgagaagataaagggttccagtttttttcagagcaagtctcccaccaccccccgatttccgcatgccacgccgaatcaaggaactttgtgttttggcaggacgttcggtggaagaacaagttttgggggaaatccatggagatcgttcccatcgggacaactcatgtgactctgcccgtttttggcgatcatttcgagtggaataaggttacttcttgtattcacaacatcctgagtggtcaaagatggatcgagcactacggtgagatcgtgatcaaaaatttacacgacgatagctgctactgtaaagtgaatttcattaaggccaagtactggtccacgaacgctcacgagattgaaggaaccgtcttcgatcgaagcggcaaggcggttcacagactgtttgggaagtggcacgaatctatttactgcggcggggggagcagctcagcctgcgtctggagggcaaacccaatgcccaaaggttacgagcagtattactcttttacccagtttgctttagaactgaatgagatggacccttcatctaaaagtctccttccacccacagacaccagattccggcctgaccagcggttcctggaagagggaaaccttgaggaagctgaaatccagaagcagcgcatcgaacaattgcagagggaaagaaggagggtgcttgaagagaatcacgtcgagcaccagccacgcttttttagaaagtccgacgacgattcctgggtgtcaaacggaacatatttggagttgcgcaaagatttgggctttagcaaactcgatcatccggtactgtggtag

SEQ ID NO: 198374 - DNA, 339 bp, synthetic construct
  misc_feature 1..339: note = Description of Artificial Sequence: Synthetic coding sequence
  source 1..339: mol_type = other DNA
atgatgagcgacgagaagaacctgggcgtgagccagaagctggtgtccccctccaggagcacctcatcctgcagcagcaagcagggctctagacaggatagttgggaggtcgtggaaggccttcggggagaaatgaattatactcaggaaccccctgttcagaaaggcttcctgctgaaaaaacgcaagtggcctttgaaaggctggcacaaacgatttttttatttggataagggaatcctgaagtacgccaaaagtcagacagatattgaaagggagaagctgcacggttgcatcgacgtgggcttaagtgtcatgagcgtgaagaagtcctcttag

SEQ ID NO: 198375 - DNA, 186 bp, synthetic construct
  misc_feature 1..186: note = Description of Artificial Sequence: Synthetic coding sequence
  source 1..186: mol_type = other DNA
atgatgagcgacgagaagaacctgggcgtgagccagaagctggtgagtccttccaggagcactagttcatgcagtagcaaacaaggttcaaggcaggacagctgggaagtggtcgaggggctcaggggagagatgaactatactcaagagcctccggtacagaaaggcttcttattaaagaaatag

SEQ ID NO: 198376 - DNA, 2463 bp, synthetic construct
  misc_feature 1..2463: note = Description of Artificial Sequence: Synthetic coding sequence
  source 1..2463: mol_type = other DNA
atgatgagcgacgagaagaacctgggcgtgagccagaagctggtgagcccttctcgaagtacttcaagttgttccagcaaacaaggcagcaggcaggactcctgggaggtagttgaaggtctaaggggggaaatgaactatacccaggaacctcctgtccagaaaggctttctgttgaagaagaggaagtggcctctgaaggggtggcataaacgttttttttatctcgacaaaggtatcctcaagtatgcgaagtcgcagaccgatatcgagcgggagaaacttcacggctgtatcgacgtgggactctctgtgatgtcagttaaaaaatccagtaagtgcatcgatctggacactgaggaacatatttaccatctcaaggtgaaatccgaggaagtgttcgatgagtgggtttctaagctgaggcatcatcgcatgtataggcagaacgagatcgcaatgtttcctcacgaggtgaatcattttttctcaggctctaccatcacagactctagttccggtgtctttgatagtatttcaagtagaaaaagaagctcaatctctaaacagaatttattccagaccggatccaacgtgtccttctcttgtggaggagagaccagggttcctctctggctccagtctagcgaagatatggagaaatgtagcaaggatctggcccattgccatgcctacctggtggaaatgagccagcttctacagtcaatggacgttttgcaccgcacatacagcgccccggcaatcaatgccatccaggtgccgaagcccttctccgggcctgtgcgattgcactctagtaacccgaatttatccaccctcgactttggagaagaaaagaattactccgatggtagcgaaacatcttcagagttttcgaagatgcaggaggacctgtgtcacatcgctcacaaagtatatttcacattacggtcggctttcaacattatgagcgcagagcgcgaaaaactaaaacagcttatggaacaggatgcatcctcctccccatctgcccaggtgataggcctgaaaaacgccctgtccagcgaaaactcccgagacgaaaatagggccttagttcatcagctgtcaaacgagagccggctttcaataactgactctctgtccgaattcttcgatgcgcaagaggtgctcctttccccttctagctccgaaaatgagatcagtgacgatgattcttacgtgtctgatatctctgataacctgtctctggacaatctttccaacgatctcgataacgaaagacagactcttgggcccgtgctggattctggtagggaggcgaaatcgcgccgacgcacttgtttacctgcaccatgcccctcaagctccaatatttctctgtggaacatcctgaggaacaacatcggcaaggacttgagcaaagtggccatgcctgtggagctgaatgagcctctaaatacactccagcggttatgcgaagagctggagtactctgagctgctagataaagcagcacaaataccctcacctctcgagagaatggtatacgtggctgcttttgctatatcggcttacgccagttcctactaccgcgccgggtccaaacctttcaatccagtgctgggagagacctatgagtgcattagggaggacaaaggctttcaattttttagcgaacaggtgtcacaccacccgcccatttctgcttgtcacgctgagtctcgcaatttcgtattttggcaagatgtgaggtggaaaaacaaattctgggggaagtccatggaaatagtaccaattggcacaacacatgtgaccttgcccgtgttcggtgaccattttgagtggaataaggtaacaagttgcatccataacatactgtccgggcagcgttggatcgagcattacggcgagatcgtgatcaagaatttgcacgacgattcttgttattgcaaggtaaacttcatcaaggccaagtattggagtaccaacgctcacgaaattgaaggtacggtgtttgaccggtcaggcaaagctgtgcaccgccttttcggcaagtggcacgaatccatctactgtggcggcgggtcctcgtccgcatgcgtgtggagagcaaatcccatgcccaaggggtatgaacagtattactcattcacacagtttgctctggaacttaacgaaatggatccctcgtccaagtcattgctccctccgacggacactagatttaggccagaccagagattcttggaagagggtaacttggaagaggcggagatacagaagcagagaattgagcagcttcaacgggagcggcgtcgcgtgctggaggagaatcacgtggagcaccagccaagattcttcagaaagagcgacgacgatagctgggtgtcgaacgggacctacttggaactgcgtaaggaccttggtttcagcaagctagaccatccagtgttgtggtag

SEQ ID NO: 198377 - DNA, 270 bp, synthetic construct
  misc_feature 1..270: note = Description of Artificial Sequence: Synthetic coding sequence
  source 1..270: mol_type = other DNA
atgatgagcgacgagaagaacctgggcgtgagccagaagctggtgtctccgtctaggtcaacctcctcgtgttcaagcaagcagggcagtcggcaggatagttgggaagtcgtggaaggccttaggggcgaaatgaattatactcaagagccacccgtccagaagggctttctccttaaaaaacgaaagtggcctcttaaagggtggcacaagcgcttcttctacctggataagggtatccttaagtatgccaagtcgcagactgactag

SEQ ID NO: 198378 - DNA, 2640 bp, synthetic construct
  misc_feature 1..2640: note = Description of Artificial Sequence: Synthetic coding sequence
  source 1..2640: mol_type = other DNA
atgaaggaggaggccttcctgcggcggcggttcagcctgtgccccccgagcagtactccgcaaaaggtcgatccccggaaattaacacggaacctactgctgagcggtgacaatgagctttaccctctgagccctggaaaggacatggaacctaatgggccctctctgccaagagatgaaggaccgccaaccccatctagcgctactaaggtgcccccagccgaatatcgcctgtgcaatggatccgataaggaatgcgtgtcgccaactgccagggtaacaaaaaaggagactctcaaggctcagaaagaaaattataggcaggaaaagaaacgcgccacaagacagctgctgtctgctctgacagacccctcagtagtgatcatggctgattcgctcaaaatccgaggaacactcaaatcctggacaaaattgtggtgcgtgctcaagcccggggttctcttaatctataagacacccaaggttggacagtgggttggcacagttctcctgcattgttgcgaactaatcgagcgaccgtcaaaaaaagacgggttttgttttaaacttttccaccccttagatcaatcggtgtgggcagtaaagggtccgaagggtgagagcgtgggcagcatcactcaaccactgccctcttcctacctcatttttagggcagccagcgagtctgatggccggtgctggctggatgccctggaactggcactcaggtgctcctccctcttgcggctgggaacttgtaagcccgggagggatggggagcccggaacgtctccagacgcttcaccatcttcactgtgcggcctaccagcttctgcgacggtgcatcccgaccaggatctgttcccactcaatggctcatctttggaaaatgacgctttctctgataagtccgaacgcgaaaatcccgaagagagtgatacagaaacacaggatcactcacgcaagaccgagagtggttcagaccagagcgaaactccaggggccccagtgcggcggggaaccacatacgtggaacaggtgcaggaggagcttggggaactgggggaggcctcccaggtcgaaacagtttcggaagagaataagagtctgatgtggactctgctgaaacagctgcggccagggatggatctctctagggtagtcctgcccacattcgtgctcgaacctcgcagcttcctgaataagctctctgattactattaccatgctgatctgctaagtagggccgccgtggaggaagacgcctactctaggatgaaactggtgctccgctggtacctgtccggattttacaaaaagcccaagggaataaaaaaaccatacaatcccatactcggcgaaacatttaggtgttgttggtttcatccacagacagattcccggacattttatatcgcagagcaggtgagccatcaccctccggtgtcggcatttcatgtgagtaaccggaaggatggattttgcattagcggaagcataacggctaagagtaggttctatggcaacagccttagcgccctgcttgacggaaaagcgacactaacttttttaaacagggcggaagactatactctcacaatgccttacgcccattgcaaaggaatattgtacggtaccatgacattggaactagggggcaaagtcacaatcgaatgcgccaaaaataatttccaggctcagctggagttcaagctgaagccgttctttggcggatcgacctcaattaatcagattagcggtaagataacttcaggcgaggaagtgctggcaagcctgtctgggcattgggatcgcgacgtgtttatcaaggaagagggttccggtagttcagcactgttctggactccaagtggggaagttcgccggcagcggctacgccagcacaccgtgccactggaggagcaaacagagctggaaagcgagagactctggcagcacgttaccagggctatttctaagggggaccaacatagggctacccaggaaaaattcgctctggaagaggcccagaggcagagggcacgggagcgtcaggagtcgctcatgccttggaaaccccaactgttccacctggatcccatcacgcaggaatggcattatcggtatgaggatcacagcccctgggaccctctgaaggacatagcacagttcgagcaagacggaatcttaagaacactacaacaggaagctgtggcccggcaaacaacgtttcttgggtctcccggcccacgccacgagcgtagcgggcctgatcaacggctcagaaaagcgagcgaccagcctagtggccacagccaggcaacagaaagctcaggctctacacctgaatcctgcccagagctctcagacgaggagcaagatggtgactttgtgccaggaggagagtccccgtgtcctcgttgtagaaaggaggcgcgccgcctgcaggcactgcacgaggccatcctgtccattcgagaggctcagcaggagctccatcggcatctgagcgctatgttaagtagcaccgccagagcggctcaagcgcccactccaggactgctccaaagcccaaggtcctggtttctcctctgtgttttcctggcgtgccagctttttatcaatcacatcttaaagtag

SEQ ID NO: 198379 - DNA, 2436 bp, synthetic construct
  misc_feature 1..2436: note = Description of Artificial Sequence: Synthetic coding sequence
  source 1..2436: mol_type = other DNA
atgaaggaggaggccttcctgcggcggcggttcagcctgtgcccccctagcagcactccacagaaggtggatcctcgtaaactaacgagaaatcttctgctttcgggggacaacgagctgtatccgctgtctcccgggaaggacatggaacccaatggccctagcctgcccagagacgaaggacccccaactccatcttcagcgactaaggtgcctcccgctgagtataggctgtgcaatggatcagacaaggaatgcgtatcacctaccgcacgcgtcaccaaaaaggagaccctgaaagcccagaaggaaaactatcggcaagagaagaagagggccacccgacagctcctcagcgctctcactgacccaagcgtggtgatcatggcggactctctcaaagggcctaaaggcgaatcagtgggctccattacccaaccacttcccagttcttacctaatctttcgcgccgccagcgagtcagatggcagatgttggttggacgcactggaactggccttgcggtgttcctctctgctccgactgggtacctgtaagccgggccgggacggggaacccggaactagtccagatgcttctccttcctccctgtgcggattacccgccagcgcgaccgtgcaccctgaccaagatctgtttcctctgaacggctcctcattagaaaatgatgccttctctgacaaatcagagcgcgagaacccagaggaaagtgacacagagactcaggaccattctagaaaaactgaatcgggctctgatcagtccgaaactcccggtgcaccagtgcgacgcggaacgacctatgttgaacaagtccaggaggagctcggtgagcttggagaggcttcccaggtcgagaccgtgagtgaagagaataagtccctgatgtggacacttttgaagcagctgcgcccagggatggatctgagcagggtggtgctgcctacttttgtgttggaacctcgcagttttctgaataagctatccgattactattaccacgcggaccttctgagtcgggctgctgtcgaagaggatgcctacagcaggatgaagctcgttctccgttggtacctgtccggcttttataagaagccaaaggggatcaaaaagccttacaatccaatacttggcgagaccttcagatgctgctggtttcatccgcagacagacagtcgtacattttacatagcggagcaggtctctcaccatcctccagtgagcgcttttcatgtgagtaaccgaaaagacggattttgtatcagcgggtccatcacagcaaaatctcggttctacggcaactcattgtctgcccttctagacggcaaagcaactctaaccttcttgaatcgtgcggaggactacactctgacaatgccctatgcgcattgcaaagggattttatacggcacaatgacgttggagctcggtggcaaagtaaccatcgaatgcgctaaaaacaattttcaagcacagcttgaatttaagctcaaaccattcttcggcggtagcactagcatcaaccaaatttcgggcaaaataacaagtggagaggaagtgctcgccagcttgagcggacattgggatagagacgtgttcatcaaggaggagggctctgggtcgagtgctctcttctggaccccatctggggaggtgagacgccaaaggctgcgccaacacactgtgcctcttgaagagcagaccgaactggagtctgagcgcttgtggcagcacgtgacaagagccatcagcaaaggagatcagcatagggccactcaggaaaagttcgctttggaggaagcccaacgacagagagctcgggagcgacaggagagtctgatgccatggaaacctcagttgttccaccttgatccaatcactcaagagtggcattatcgctacgaagatcacagcccgtgggatccattaaaggatatcgcccagttcgagcaagatggtatccttcgcaccctacagcaggaggcggttgccaggcagactactttcttgggaagcccagggcctaggcatgagagaagtgggccggatcagcggctgaggaaagctagcgatcagccgagcggccactcccaggccactgagagctctgggtctacaccagagagctgccctgagctgagcgatgaagagcaggatggcgatttcgtgccaggaggggaatccccctgccccagatgtaggaaagaagcacgacggctccaggccttgcacgaagcaattttgagtatccgcgaggcccagcaggagctgcaccggcacctttcagctatgctctcctctactgcccgggccgctcaagcccccactcccggcctactgcagagcccgcgaagctggtttctgctgtgtgtcttcctggcctgccaattatttatcaatcacatcttaaagtag

SEQ ID NO: 198380 - DNA, 1320 bp, synthetic construct
  misc_feature 1..1320: note = Description of Artificial Sequence: Synthetic coding sequence
  source 1..1320: mol_type = other DNA
atggacctgagccgggtggtgctgcccaccttcgtgctggagccccggagcttcctcaataagttatctgactactattaccatgccgacttattgtccagggccgccgttgaagaagatgcatattctaggatgaaactggtgcttagatggtatctgagtggcttctataaaaagccgaaaggcattaagaaaccttacaatcctatactgggcgagaccttccggtgttgctggttccatcctcagactgattccaggactttttacatagcggaacaggtgagccaccaccctccggtatccgcctttcatgtttcaaacagaaaagacggattctgtatatcgggttccataaccgcgaagtctagattctatggcaacagcctgtcagctctgctggacggcaaagccactctgacttttctgaatagagctgaggactatacactcaccatgccatatgcacactgtaaaggaatcctgtatggcacgatgactctggagctcggggggaaggtgaccatcgagtgtgctaagaataacttccaggcgcagctggagttcaagctaaagccgttctttggcggcagtacgtctatcaatcagattagtggcaagattacctccggcgaagaagttctggctagtttatctgggcattgggatagagatgttttcataaaggaagaagggtccggttccagcgcgctgttctggacacctagcggtgaggttaggaggcagaggctgcggcagcacacagtacctctagaggagcaaaccgaactcgaatctgaacgactgtggcagcatgtgacccgggccatatccaagggagatcaacatcgcgcaacgcaggagaagtttgctttggaagaggctcagcgacagagggcaagagaacgacaggaatctctgatgccgtggaaacctcagctctttcacttagatcctattactcaagaatggcactatcgatatgaggatcactccccatgggatccactaaaagacatagcccaatttgagcaggatggcatcctgcgcacccttcagcaggaggctgtggcccggcaaacgacttttcttggctcacccggcccgcgacacgaacgaagcggtccagatcaacgtctacgaaaggcctcagaccaaccttctggtcactctcaggccactgagtcaagtggttcaacccccgagtcctgcccggagctgcacggcaccgggtctacgggaactgaccccaggcctcccgccgaaccccctatacttgtgcctgccctgcgggtaccaggcgtgtctgctgtgcattag

SEQ ID NO: 198381 - DNA, 2436 bp, synthetic construct
  misc_feature 1..2436: note = Description of Artificial Sequence: Synthetic coding sequence
  source 1..2436: mol_type = other DNA
atgaaggaggaggccttcctgcggcggcggttcagcctgtgccccccttcatccacaccccagaaagtggacccccgaaagctcacaaggaatttgctcctaagtggcgataatgagctgtacccgctgagccctggaaaggatatggagccaaacggaccttcactgccgcgcgatgagggcccacccacacccagctctgctaccaaagtgccaccagccgagtaccggctgtgtaacggctctgacaaggagtgtgtgtcacccaccgcccgagtgaccaagaaggagacgctgaaggcacagaaggagaattatagacaggaaaaaaaacgagctaccagacagcttctttctgctctcacagacccaagcgtggtcattatggccgattccctgaagggtccgaagggggaatccgtagggagtattacccagcctctcccatcgagctaccttatttttagggccgcctccgagtcagacggcagatgttggctcgatgctctcgaacttgcccttcgctgctctagtctcctgcgattaggcacatgtaagcccggacgggatggggagcctgggacatcgcctgacgcttcaccgagttctctatgtggactcccagctagcgctaccgtgcaccctgaccaagacctgttcccgcttaatggctcatccctagaaaacgacgccttctctgacaaatcagaacgagaaaaccctgaagagtcggacacagaaactcaagaccactcacgtaagactgaatccggttctgatcagagtgagacgcctggtgcgccagtccgcagaggaaccacttacgtggaacaggtacaggaggaactgggtgaacttggtgaggcctctcaagtggagacggtgtccgaggagaataaaagcctcatgtggactctgttaaagcagttgcggcctggaatggacctgtctcgcgttgtactgcccacatttgtcttggagcccagatcctttctgaacaaactttctgactactactatcacgcagaccttctgagcagagctgccgtggaagaagacgcgtattcccgaatgaagttggtactccgttggtatctgtcgggtttttacaaaaaacctaaggggattaagaaaccctacaatccaatcttaggagagactttccgctgctgctggttccatccccagaccgatagccggaccttctacatcgcggaacaagtgagccatcatccaccagtcagtgcttttcacgtgtccaatcggaaagatggcttctgcattagcgggtccataactgccaagtccaggttttatggaaattcactgagcgctcttttggatggcaaggctactctcacctttctcaacagggctgaagactataccctcaccatgccctacgcccactgcaagggaatcctctacggcacaatgactttagaactgggagggaaagttaccatcgagtgtgcgaagaataactttcaggctcaactggagttcaaactgaagccattcttcggtggctctacctcgattaatcaaatttccgggaagattactagcggcgaggaggtgctcgccagcctgagtgggcattgggatcgtgacgttttcattaaggaggaagggagtggctcttccgccctgttctggacgccatctggcgaggttcgtagacagagactgagacaacataccgtgccgctggaggagcagaccgaactggaaagcgagaggctttggcaacacgtgacccgggcaataagtaagggggatcagcaccgggccacccaggaaaaattcgcactggaagaggcgcaacggcagcgagcacgcgaacgccaggagtcactgatgccctggaaaccccagctgttccacctagatccaatcacccaggagtggcactatcggtacgaagaccacagcccctgggatccactgaaagacatcgcccagttcgaacaggacggtatcctgaggacattgcagcaggaggcagtggcccgacaaacaactttcctgggaagtcctggtccgagacatgaaagatccgggccagatcagaggctacgaaaggctagcgaccagccaagcgggcactcgcaggcaacggagagcagcggctccacacccgaatcctgcccagaacttagtgacgaagagcaggatggcgacttcgtaccgggaggtgaaagcccttgcccaaggtgccggaaggaggcccgccggcttcaagctttgcatgaggcgattttgtccataagagaagcacagcaggagctgcaccgccaccttagtgctatgttaagcagcaccgccagagccgctcaggcccctactccagggttattacagtcacctagaagctggtttttactgtgtgtgtttctggcctgccagcttttcatcaatcatatcttgaagtag

SEQ ID NO: 198382 - DNA, 375 bp, synthetic construct
  misc_feature 1..375: note = Description of Artificial Sequence: Synthetic coding sequence
  source 1..375: mol_type = other DNA
atgaaggaggaggccttcctgcggcggcggttcagcctgtgccccccctcatccacaccacaaaaggtcgatccgagaaagctgactaggaacctgcttttgtccggagataatgaactatatccgctctcccccggtaaagacatggagccgaatggaccctcactcccgagagacgaaggcccgcccacgcctagctcagccactaaagtgcccccagcagagtatagactgtgcaatgggagcgacaaagaatgtgtgtcaccaaccgcacgggttacaaaaaaggaaacgttgaaggcgcaaaaggaaaattacaggcaggaaaaaaaaagggcaaccaggcaattgcttagtgcactgacagatccgtag

SEQ ID NO: 198383 - DNA, 297 bp, synthetic construct
  misc_feature 1..297: note = Description of Artificial Sequence: Synthetic coding sequence
  source 1..297: mol_type = other DNA
atgaaggaggaggccttcctgcggcggcggttcagcctgtgcccccctagctccacccctcaaaaggttgaccctaggaagttaactagaaacctcctacttagtggtgacaatgagttataccctctctcccctggcaaagacatggaaccaaatgggcctagccttcctagagacgagggaccccctacaccatcctctgctacgaaagtgcctcctgcggaataccggctgtgtaatggtagcgataaggagtgcgtttcgcccactgcccgcgttacaaaaaaggagacatag

SEQ ID NO: 198384 - DNA, 420 bp, synthetic construct
  misc_feature 1..420: note = Description of Artificial Sequence: Synthetic coding sequence
  source 1..420: mol_type = other DNA
atgaaggaggaggccttcctgcggcggcggttcagcctgtgccccccctcatccacaccacaaaaggtcgaccccagaaaacttaccagaaatctgcttctgtctggcgataacgagctctacccactaagccctggcaaagacatggaacccaacggcccatcactgcctcgggatgaggggcctcctactccctcatccgccaccaaggtgccgcccgccgaatatcgactttgcaatggctccgataaagagtgcgtgagccctaccgcccgcgtgacaaaaaaggaaaccctgaaagcccagaaagagaactacagacaggaaaagaagcgcgccacgcgtcagttgctgagcgccttgacggaccccagcgtggttatcatggcagatagtctgaagatccgaggtacgctctag

SEQ ID NO: 198385 - DNA, 273 bp, synthetic construct
  misc_feature 1..273: note = Description of Artificial Sequence: Synthetic coding sequence
  source 1..273: mol_type = other DNA
atgaaggaggaggccttcctgcggcggcggttcagcctgtgccccccgtcctctaccccccagaaggtcgacccccgtaagctgactagaaacttgctgttgtctggggacaacgaactttatcctctgtcccctggcaaagatatggagccaaatggaccctccctccctcgcgatgagggtccacccacaccctccagtgccaccaaagtcccaccggccgaatataggctctgcaacggctcagacaaggagtgcgtttctccgacatag

SEQ ID NO: 198386 - DNA, 210 bp, synthetic construct
  misc_feature 1..210: note = Description of Artificial Sequence: Synthetic coding sequence
  source 1..210: mol_type = other DNA
atgaaggaggaggccttcctgcggcggcggttcagcctgtgccccccttcatcaactccccagaaagtcgatcccaggaagttaactcgcaatcttctgctgtctggggacaatgaactctacccactgtctccaggcaaggatatggaaccaaacggcccatctctgccccgagacgaaggcccacccacgccttcctccgcgacgtag

SEQ ID NO: 198387 - DNA, 1299 bp, synthetic construct
  misc_feature 1..1299: note = Description of Artificial Sequence: Synthetic coding sequence
  source 1..1299: mol_type = other DNA
tacaaccccatcctgggcgagaccttccggtgctgctggttccacccccagacagatagccggaccttttatatcgctgaacaggtctcccatcacccccctgtgagcgctttccacgtgtccaaccgcaaggatggcttctgtatttccggcagcatcactgccaaatcccggttttacggaaactccctgagcgccctgttagatgggaaggccacattgacttttctcaaccgagccgaggattacaccctgaccatgccctatgcccactgtaagggcatactatacggcacaatgaccctcgaactgggcgggaaagtaaccattgaatgtgccaagaacaacttccaagcacagttggagttcaaactgaagccattctttggtggatccacctccataaaccagatctctggtaaaatcacgtctggcgaagaggtgctggctagcctttctggtcattgggacagagatgtattcataaaggaagagggcagtggatctagcgctctgttttggaccccatctggggaggtgcgccgccaacgcctgcgtcagcacacggtcccattggaagagcagacagaattagaatccgagagactttggcagcacgtgacacgtgccatctctaaaggagatcagcacagagcaacacaggagaaatttgcgctcgaagaagcccagcggcagagggcaagagagagacaggaatcattaatgccctggaaaccacaactcttccacttagaccccattacccaggagtggcactaccgctacgaggaccatagtccctgggaccccctcaaggacatcgctcagttcgagcaagatggaatcctacggacccttcagcaggaagctgttgcaagacagactacctttctcggctcccccgggcccaggcacgaaaggagtgggccagatcagcgcttgcgtaaggcttctgaccaaccctccggtcatagtcaggccactgaatccagcggatcgacacccgaatcttgtcccgaactgagtgacgaggaacaagatggagactttgtgccgggaggggaatccccttgccccaggtgccggaaggaggcccgaagattacaagctttgcacgaggcaatcctctccatccgggaggcccagcaggaactgcaccggcatttgtctgcaatgttgagttctacagctcgagcagctcaggcaccgacccctggcttactccagtccccccgctcttggtttctgctgtgcgtgtttctagcctgtcaactgttcattaatcatatcttgaaatag

SEQ ID NO: 198388 - DNA, 1533 bp, synthetic construct
  misc_feature 1..1533: note = Description of Artificial Sequence: Synthetic coding sequence
  source 1..1533: mol_type = other DNA
atgtgcgtgccccaccggcagggccaccaggagggcgacagccagggcgctgaaggcgagttgccagccggcgaggagccaagatctttcctgaataagctgagcgactactactaccacgcagatttgctgagccgcgcagccgttgaggaagacgcgtatagtcggatgaaactggtgcttcgctggtacctcagcgggttttacaagaaaccaaaggggattaaaaaaccatataatcccattctgggcgagacctttaggtgttgttggttccaccctcaaaccgacagccgaacgttttatatagccgagcaggtctctcatcacccgcctgtgtctgctttccacgtgtccaatagaaaggatggcttctgtatctctggatctatcactgcgaaatctcgtttttatggcaactccctgagcgccctgcttgacggaaaagccactctcacattcctgaaccgcgctgaggactacacattaactatgccgtatgctcactgtaaaggtatattgtacgggaccatgacactcgaactcggaggcaaggttacaatagagtgtgccaagaataactttcaagcgcaactggagttcaagctcaagccctttttcggcgggtctactagcatcaatcagatttcaggtaagattacgtcgggagaggaagtactggcctccctgtcaggacactgggacagagacgtgtttatcaaagaagaaggctcaggaagttctgctctgttctggacaccatctggagaggtccgtcggcaaaggctccgccagcacactgtcccattggaagaacagacagaattggagagcgaacgactgtggcagcacgtgacccgcgccataagcaagggcgaccagcacagggccactcaggagaaatttgcgttagaagaggcccagcgccaaagagcgagagagcgacaagaaagcctgatgccttggaagcctcaactgttccaccttgacccaattactcaggaatggcattaccgctacgaggaccatagcccatgggaccctctgaaggacatcgctcagttcgagcaagacggtatccttagaacgctgcagcaagaggctgtggcacgccaaactacattcctgggcagccccggccctagacacgaaaggtccgggcccgaccaacgtctgcgaaaagcaagcgaccagccttctggccactcacaggccactgagtcttccggcagtacaccagagagttgccctgagttaagcgatgaagaacaagatggagacttcgtccccggtggcgaatcaccctgtccccgctgccggaaggaagccagaaggcttcaggccctccacgaagctatcctgtcgataagggaggcccagcaggagctgcacaggcacttatctgcgatgctttcaagcactgctcgcgcggcacaagccccaactccgggcctgctgcagtcccctaggagctggtttctgttgtgtgtgttcctggcttgtcagttgttcatcaatcatatcctaaagtag

SEQ ID NO: 198389 - DNA, 2805 bp, synthetic construct
  misc_feature 1..2805: note = Description of Artificial Sequence: Synthetic coding sequence
  source 1..2805: mol_type = other DNA
atgagcagcgacgagaagggcatcagccccgcccacaagaccagcactccaacgcacagaagtgctagtagttctacgtccagccagcgggattctcggcagtcaatccacatattggaaagaaccgcttcatcctcgactgagccttctgtctcccggcaactgctggagcccgagcctgtacccctgagtaaagaagcagactcttgggagataatagaaggcctcaagattggccagactaatgtacaaaagccggacaaacatgaaggatttatgttaaaaaagagaaaatggcctctgaaaggctggcacaaaaggttcttcgtgctcgacaacgggatgcttaaatactccaaagcaccactggatatccaaaaggggaaagtccatggctcaattgacgtcggcttgtccgtgatgtccattaagaaaaaggcaaggcgcatagatcttgataccgaagagcacatctaccatctgaaggtcaagtctcaggactggtttgacgcctgggtctccaagcttcgccaccaccgcctgtaccggcagaatgagatagtgcgctcccctagagacgcaagcttccacatctttccctccacttctactgccgaatcttcgcctgctgctaacgttagcgtgatggacgggaagatgcagcccaattcctttccttggcagagtcctttgccttgtagtaatagtttgccagcgacctgtacgacgggacagagtaaggtggccgcctggctgcaggatagcgaggagatggatcgctgcgcagaggatctggcccattgccagagtaatcttgttgagctctcaaagctgctgcagaatcttgagatcctacagagaacacagagcgctcccaacttcaccgacatgcaggccaactgtgtggacatcagcaaaaaagacaagcgcgtcacaagaagatggaggactaagagcgttagcaaggacaccaagatacagttgcaggtgcctttttctgctacaatgagccccgtccgccttcacagcagtaaccccaacctctgtgcagatatcgagttccagacacctccctctcatttaacggacccactcgaatcatccactgactacaccaagttgcaagaggagttttgtctcattgctcagaaggtgcacagtctgctgaaatccgcatttaattccatcgctattgagaaggagaaactaaaacagatggtttccgagcaggaccattcgaagggtcactctacgcagatggcccgcctacgacaaagcttaagccaggctttaaatcaaaacgcggaactccgctcccgcttgaaccgcatccactccgagagtataatctgcgaccaggttgtatccgtcaacatcatcccatcacctgacgaggcgggcgagcagatccacgtgtctctgcctttgtcacagcaggtcgctaacgaaagcagactctcaatgtcagaatctgtcagcgagttctttgacgcccaagaggttctcctgtccgcttcatcgagcgaaaacgaggcctcggacgatgaatcttatatttctgacgtgtctgataatatttctgaggacaacacctccgtggctgacaacatatcaaggcaaatcctgaatggggagctgacgggcggagctttccgtaacgggaggcgagcctgtctgccagcaccgtgtccggacacatccaacattaatttgtggaatatcctgaggaacaacattggtaaggatctcagcaaagtctcaatgccggtggaactgaacgaaccgctgaatacgctccagcacctttgtgaagaaatggaatactcagagctcttggacaaggcttctgagacggacgatccttacgaacgcatggttctggtggctgcgttcgccgtttccgggtactgctctacatattttagagcggggtccaaaccctttaacccggtgctgggtgaaacttacgaatgcattagggaggacaaaggattccgattctttagtgagcaggtcagtcatcaccctcccatttcggcatgccactgcgagtctaagaatttcgtgttctggcaagatataagatggaagaataaattttggggaaagtccatggaaattctccctgtgggaacactgaatgtaatgctgcctaaatatggagactattatgtgtggaataaagtaacaacttgtatccacaatatcctctccggccggcgctggatagagcactatggcgaggtgaccatcaggaatacaaaatcctctgtatgcatttgcaagctgacatttgttaaagtgaattactggaacagtaacatgaacgaagtgcagggcgttgtgattgatcaggagggaaaagcggtgtaccgtctttttgggaaatggcacgaggggctctactgtggggtggcaccttccgctaagtgtatttggaggcctggtagtatgcccaccaactacgaattatattatgggttcacacgattcgccatcgaactcaacgaactcgatccagtgctcaaggaccttttaccacccacagatgcaaggttccgacctgaccagagattcctcgaggaaggcaatctggaggcagccgccagcgagaaacagagggtcgaagagctccagaggagccgacgccgttacatggaagaaaataacttagaacacatacctaagtttttcaagaaagttattgacgcaaaccagcgtgaagcttgggtgtccaacgacacttattgggagctgcggaaggatccaggattttctaaggtagacagtccagtcctgtggtag

SEQ ID NO: 198390 - DNA, 2817 bp, synthetic construct
  misc_feature 1..2817: note = Description of Artificial Sequence: Synthetic coding sequence
  source 1..2817: mol_type = other DNA
atgcaccagctgagcctgatccggggcaaccggggccggagcatccacatcctggaacgtacggccagtagctctacggaaccctcggtctctcgtcagttactagaaccggaacctgtgcccttgtccaaagaggcagatagctgggagatcattgagggtctgaagatcggccagaccaacgtgcagaaaccagataaacacgaagggttcatgctaaaaaagaggaagtggccccttaagggttggcacaagcgcttctttgtcttggataatggcatgctcaaatatagcaaggcccctcttgacatccagaaaggtaaagttcacggctcaatcgacgtcgggctgagtgtgatgagcatcaaaaaaaaagctcgcaggattgacttggacaccgaggagcacatataccacctcaaggtgaagagccaggactggtttgacgcgtgggtgtccaagctgcgccatcataggctctaccgccagaatgagatcgtgaggtcacctcgggacgctagttttcacatatttccctccacgagcacagctgagagcagccctgcagccaatgtgtccgtgatggatgggaagatgcagccgaactcatttccgtggcagagccctctaccctgcagcaactcactgcccgccacctgcacaacgggtcagtccaaggttgcagcttggctccaggacagcgaagagatggacagatgcgccgaggacctggcccactgtcagtcaaatctggtggagcttagtaaactacttcagaatttagagattttacaacgcacccaatcagcccctaatttcaccgatatgcaggccaattgcgtcgatattagcaagaaagacaaacgagtgacccgccgatggcgtactaaatccgtgagtaaagatacaaagatccagctgcaggaaggacctccggctaaaggacaattcagcaccacacgccgcagacaaaggctcgcagctgctgtggccactactgtgcctttttctgcaaccatgtcccccgtccgcctccattcctctaatccgaacctgtgtgcggacatcgaatttcagacaccgccctctcacctcactgacccactggagtcttccactgattacactaagctgcaggaagaattctgtctgattgcacaaaaggttcactctctattgaaaagcgcattcaatagcattgccatcgaaaaagaaaagctcaaacaaatggtgtctgagcaggatcactctaaaggccatagcacccagatggcaaggttgagacagagcttgagccaggcactcaatcaaaacgcggagttgcggagccgactcaatcggatccactctgagtccattatttgcgatcaagtcgtaagcgttaacatcattccttcacctgatgaggcgggggaacagatacacgtgtcccttcccttaagtcagcaggtcgccaatgagtctcggttaagcatgtcagaatccgtttcggaattctttgacgcccaggaggtactgctatcagcctcttcctcagagaatgaagcaagtgatgacgagtcttatatctcggacgtttccgataacatttccgaggataataccagtgtcgcagacaacatttcccgtcaaattcttaatggagaactgacaggaggggcttttaggaatgggcggcgggcgtgcctgcccgctccatgccctgatacttccaacattaacctctggaacatcctgcggaataacatcggtaaagacttgagtaaggtgagcatgcctgttgagctgaacgagcctcttaacaccctgcagcacctctgtgaagagatggagtatagcgagctgctggacaaggctagtgagaccgatgatccgtacgaacgaatggtgctggtggccgcgtttgcggtttccgggtactgctctacctatttccgtgcggggtcaaaaccgtttaacccagtcctgggggagacatacgagtgtattcgggaagataaaggctttaggtttttttcagagcaggtgtcccaccaccctcctatcagcgcctgccactgtgagtctaagaactttgtgttctggcaggacattaggtggaaaaacaagttttgggggaagagtatggaaatccttcccgtgggaactttgaatgtgatgctacctaaatacggagattactacgtctggaacaaagtcaccacatgtatccataatattctgtcaggcaggaggtggatagagcactacggcgaggtcacaatccggaataccaaatcgtcggtgtgcatatgtaagctgactttcgtcaaagtgaattattggaattccaatatgaacgaagtgcagggagtcgtcatcgaccaggagggcaaggcagtctatagactgttcggcaaatggcacgagggactctattgtggcgtggccccgagcgctaaatgcatttggagacctggatccatgccaacaaactacgagttatattatggctttacacgatttgccattgagttgaatgaactcgatccggtccttaaggacctcctcccaccaaccgacgcgcgctttagacccgatcagagattcctggaagagggcaatctggaggccgccgcctccgaaaaacagagagttgaggaacttcaaagaagcagacggaggtacatggaagaaaataatctggaacacatcccaaaattcttcaagaaggtgatcgacgcaaaccaaagagaggcctgggtgtcaaatgatacctactgggagcttcgcaaggaccccggattcagcaaagtcgattcgcctgttctctggtag

SEQ ID NO: 198391 - DNA, 2697 bp, synthetic construct
  misc_feature 1..2697: note = Description of Artificial Sequence: Synthetic coding sequence
  source 1..2697: mol_type = other DNA
atgagcagcgacgagaagggcatcagccccgcccacaagaccagcactcctacccaccggtcagcttctagtagcacgtcctcacagagggattctcgccagtctattcacatcctggagcgtactgcatcaagcagcacggagccaagtgtatctagacagcttctggaaccggagcccgtgccactatcaaaagaggcagattcgtgggaaataattgaaggactgaaaatcgggcagacgaatgtccaaaagcccgataagcacgaagggttcatgctaaaaaagagaaaatggccattaaaagggtggcacaagaggtttttcgtacttgacaatgggatgctgaagtattccaaagctccccttgacatacaaaaggggaaggttcatgggtcgatcgatgtggggctcagcgttatgtccataaagaagaaagcccggagaatcgacttggacactgaggaacacatataccacttgaaagtgaagtcgcaggactggtttgacgcctgggtgtccaaactaagacatcaccggttgtatcggcagaatgagattgttagatcgcctcgggacgcctcttttcacatctttccctcaacatctacagccgagtccagccccgccgccaatgtctcggtgatggacggaaagatgcagcccaattcattcccctggcagagtcctctgccatgcagcaacagtctcccagcaacctgcacaaccggtcagagcaaggtagcggcctggttacaggactccgaagagatggatagatgcgcagaggaccttgctcactgtcagtctaatcttgttgagttgagcaaactcctgcagaatcttgagattcttcagcgcacacagtccgcaccgaacttcaccgacatgcaagctaactgtgtggatatctctaagaaggataagagagtgaccagaagatggagaaccaaatccgtgagtaaggacaccaagattcaactacaagtccctttcagcgctactatgtctccagtcaggttgcacagctccaatcctaacctatgcgcagacattgagtttcagactccaccgtctcacctgaccgaccccctggagtcctctaccgactataccaaactgcaggaggagttctgcctcattgcacagaaggtacacagtctgttaaagtctgcattcaatagtatcgccatcgaaaaggagaagttgaagcagatggtgagcgaacaggatcactctaaaggtcactctacccagatggccaggctcaggcagagcctctcccaagcaggggagcagatacacgtctcactgccattgtcacagcaggtggctaacgagtctagactttcaatgagtgagtcagtaagtgagttctttgatgctcaggaggttctgcttagcgcatccagctcagaaaacgaggcatccgatgatgaaagctatatctcggatgtgtcagacaatatctctgaggacaatacgagtgtggctgacaacatctcacgacaaattctgaatggtgagctcaccggtggagcattccgcaacgggagacgcgcatgcttacccgccccatgtcctgacaccagcaacatcaatctgtggaatatattacgcaacaatattggcaaggacctttcaaaagtgagtatgccagttgagctgaatgaaccgttgaacactctgcaacacttgtgtgaggaaatggagtatagcgagctcctggataaagcttcagagacggatgacccttatgagcggatggtgctggtggcggcgtttgctgtttcaggctattgtagcacatattttagagccggtagcaagcccttcaaccccgtactgggcgaaacttacgaatgtattcgcgaagataaggggtttcgattttttagcgaacaggtgtcccatcaccccccaatcagcgcttgtcactgcgagtctaagaactttgtgttctggcaggacatccggtggaagaacaagttttggggaaaatctatggaaatcctccctgtcgggactctcaacgtgatgctccccaagtatggcgattattatgtgtggaacaaggttacaacatgcatacataacatattaagcgggagaaggtggatcgaacattatggggaagttacaatcaggaacacaaagagtagtgtttgtatttgtaaactgacatttgtgaaggtcaactactggaacagtaatatgaacgaagtacaaggggtcgtaattgaccaggaggggaaggccgtgtatcgactcttcgggaaatggcatgaaggcctttactgcggcgtggccccatctgctaagtgtatttggcggccaggatctatgccgactaactacgaattatactatgggtttactcgttttgcaatagagcttaacgaactagacccagtccttaaggatttattgcccccaaccgatgcacgatttcggcccgaccagcgctttctcgaggaggggaacttggaggccgccgctagcgaaaagcaacgggtggaggagctgcagcggtccaggcggagatacatggaggagaacaatctggaacacatacccaaatttttcaaaaaggtcatagacgccaaccaacgtgaggcctgggtatcaaacgacacatactgggaactgcggaaggatccagggtttagcaaggtcgactcacctgtcctttggtag

SEQ ID NO: 198392 - DNA, 573 bp, synthetic construct
  misc_feature 1..573: note = Description of Artificial Sequence: Synthetic coding sequence
  source 1..573: mol_type = other DNA
atggacggcaagatgcagcccaacagcttcccctggcagagccccctgccttgtagtaattccctacctgccacatgcactactggccagtcaaaggtcgccgcttggcttcaggacagcgaagaaatggaccggtgcgcggaggacctggctcactgccagtccaacctggtggagttatcaaaattactccagaatctcgagatcctgcaaagaactcagagtgcacctaatttcacagacatgcaagccaattgcgtggatatcagcaaaaaagacaagagggtgaccaggaggtggcgcaccaaaagtgtctccaaagataccaagatccaattacaggtcccctttagtgccacgatgagccctgtccggttgcactcgtctaatcctaatctctgcgcggacattgagttccagacaccaccccccaatcactttggcattctgtccgtgctgctgcaaccctattccctgaaaaagaagaagaaaaaaaagaagaaatctacccccagccttgaaagccgtatcaagggagccgaatacaagatccaatccctgacttcgctctag

SEQ ID NO: 198393 - DNA, 2880 bp, synthetic construct
  misc_feature 1..2880: note = Description of Artificial Sequence: Synthetic coding sequence
  source 1..2880: mol_type = other DNA
atgagcagcgacgagaagggcatcagccccgcccacaagaccagcactccaactcataggtctgccagtagcagtacatccagccagagggacagccggcaatcaattcacatcttggaacgcacggccagtagttccaccgagcccagcgtcagccggcagctgttggagccagagccggttcccctttccaaagaggccgactcctgggagatcatcgagggtctaaaaataggacagacaaacgtccagaaacccgataagcacgagggttttatgctgaagaaacggaagtggcctctgaagggctggcacaaaagattcttcgtcctcgacaacgggatgctgaagtattcgaaagcccctctggacatacagaaaggcaaagtgcatggcagtattgatgtcggactctcggtaatgagtataaagaaaaaggctcggcgcattgacctggacaccgaggagcacatttaccacttgaaggtaaaaagtcaggactggttcgatgcctgggtatccaagctgcgtcatcatagactttacaggcaaaacgagatcgtgcgcagccctcgtgatgcttcttttcacattttcccgagcacaagcactgctgaaagctctcctgcagcgaacgtgtccgtcatggacggaaaaatgcagccaaacagtttcccctggcaaagcccactgccttgctctaatagcctaccagctacttgcaccacaggacaatcaaaagtggccgcctggctccaagactctgaggagatggatcggtgtgcagaagatctcgcccactgtcagagcaacctggtggagttgagcaagctgcttcagaacctggaaatactgcagcgcacccaatccgcgcctaactttacagatatgcaagcgaattgcgtagatatctctaaaaaggataaacgcgtcaccagacgctggagaaccaaatccgtttccaaggataccaagattcagcttcaggaggggccacccgccaagggccagttctccaccacccgcaggcgccagcgactcgcagcggcagtcgcaactaccgtcccattctcagccaccatgtctcctgtacgtttacatagctccaatcccaatctctgcgctgatatcgagtttcagacacctccctcacacctgacagatccacttgagtcatcaactgactacacgaagctccaggaagaattttgtctcatcgcgcagaaagtccattccctgctcaaatcagcatttaattctatcgccattgagaaggagaagctgaaacaaatggtatcggaacaggaccactccaaaggtcatagcacacagatggctcgactcaggcagtcactttcacaggctctgaatcagaacgccgagcttcgcagtcgactgaatagaatccactccgagtctatcatttgtgaccaagtggtgtccgtgaatattatcccgagccctgacgaggcaggggagcagattcatgtaagcctacccttgtcccagcaggttgcgaatgagtcacgtctttcaatgagtgagtctgtttcagagtttttcgatgctcaggaagtcctgctgagtgctagttcgtccgagaatgaagcaagcgacgacgaatcttacatcagtgacgtgagcgacaatatctcagaagataatacctctgtggccgacaacatctctagacagatcttgaatggcgagctgacgggtggagctttccggaacggtcgcagggcttgcttgcctgcgccttgtcccgatacctcgaatatcaacctgtggaacatactgcgcaataatattggtaaggacctgtccaaggtcagcatgcccgtcgagctcaacgaaccactcaacacgctacagcatctgtgtgaagagatggagtattcagagttgttagacaaggcaagcgaaacggatgacccatacgagcggatggtgctggtggccgccttcgctgtctcgggctactgttctacttacttccgggccggctccaagccattcaaccctgtgctaggggaaacatatgaatgtatccgagaggacaagggcttccgattttttagcgaacaggtgtctcaccatcctccaatatctgcgtgccactgcgaaagcaaaaattttgtcttttggcaagatatccgatggaaaaacaaattttgggggaagtccatggaaatactgcccgtgggaaccctaaacgtgatgctccccaaatacggagactattacgtctggaataaggtgaccacgtgtatccacaacatcctgtccgggcgtcgttggatcgaacattatggcgaggttacgatacgtaataccaagagcagtgtctgtatctgtaaactgaccttcgtgaaggttaattactggaactcaaacatgaacgaggtgcagggagttgtgattgatcaggaaggtaaggccgtgtaccgtctgttcggcaagtggcatgaggggttatattgcggagtggcaccttcagcaaagtgtatctggagacctggaagtatgcccactaactatgagttgtactacggttttactcggtttgccatcgagttgaatgaacttgatccagtgctgaaggaccttcttccccctacggacgcccgattccgcccagatcaacgatttctcgaagaggggaatctggaggcggcagcttctgagaagcagcgcgtcgaggaactccagaggtccagaaggcggtacatggaagagaataacctcgagcacataccaaagttctttaagaaggttatcgatgctaatcagagggaagcatgggtcagtaacgatacctactgggagctcagaaaagaccctgggtttagtaaagtggatagtccagtgctgtggtag

SEQ ID NO: 198394 - DNA, 2712 bp, synthetic construct
  misc_feature 1..2712: note = Description of Artificial Sequence: Synthetic coding sequence
  source 1..2712: mol_type = other DNA
atgagcagcgacgagaagggcatcagccccgcccacaagaccagcacccctactcacaggtccgcgagtagctcaacaagctcacagagggattcccgacaatccattcacattctggagaggactgcgagtagctctacagagccaagcgtgagtcggcagttgttggaaccagaacccgttccccttagcaaagaagccgattcgtgggagatcattgaagggctgaagatcggccagactaatgtgcaaaagccagataagcacgaaggttttatgctaaaaaaacgcaaatggcctctgaagggatggcataagagattcttcgtgctcgataacggaatgcttaagtactctaaggcgcctttggacatacaaaaagggaaggtccacggttctatcgatgtgggcctttccgtaatgagcatcaagaaaaaggcacggcgcatcgacctggataccgaagaacatatttaccatttaaaagtgaagtcccaggactggtttgacgcatgggtatccaaactgagacaccaccgtctatatagacagaacgagatcgtgaggagtcctagagacgcttctttccacatcttcccgagcactagtacggccgaaagctccccggcagcgaatgtgagtgtgatggatggtaagatgcagcccaacagctttccttggcagtcacctctgccttgctcaaacagcctccccgccacttgtaccaccgggcagtccaaagtggcggcttggctgcaggacagcgaggagatggaccgctgcgccgaggacctggcccactgtcagtcaaatctggttgagctgtccaagttgctccagaacctggagattctgcaacgtacccaatctgcacctaattttacagacatgcaggtgcccttctcagctactatgtcgcccgttaggttacacagtagcaaccccaacctgtgcgcagacattgaattccagacgcctcccagccacctgaccgatcccctcgaaagcagtaccgactataccaaactgcaagaggagttctgcctcattgcacaaaaagtccatagccttttgaaatcagcattcaatagtatagccattgagaaagaaaaactgaagcagatggtatccgaacaagatcacagtaaaggtcatagcactcagatggctcgactgcgacagtccttgagccaagctttgaaccagaacgccgaactccggtcgcgcctgaatcgcattcactccgagtctatcatttgcgatcaggtggtgtctgtgaatattattccctcaccggatgaggcaggggaacaaatccatgtcagcctgccactttcccagcaagtcgcgaacgaaagcagactttctatgtcagagtccgtgtcagagttcttcgacgcgcaggaggtgctgttatccgcctccagctcagaaaatgaagcgtctgatgacgagtcttacatcagtgacgtttctgataacatctccgaggacaacaccagcgtggctgacaatatctctcgtcagattcttaacggggaactaactggaggagcctttagaaacgggagacgggcctgtctcccagcaccctgccctgatacctccaatatcaacctgtggaatattctgcgaaacaacatagggaaggaccttagcaaagtctccatgccggtggaactgaacgaaccacttaatactcttcaacatctgtgcgaagaaatggagtatagtgagcttctggataaagcatcggaaactgacgacccttatgaaaggatggtgctggtggccgcattcgccgtctcagggtactgtagtacctactttagagccggaagcaaaccattcaacccggtcctgggggaaacctatgagtgcatccgcgaggacaaagggttccgattcttttcggagcaggtatcgcaccatccaccgatatccgcctgccattgcgagagcaaaaatttcgtcttttggcaggacataagatggaagaataagttctggggaaagtcaatggaaattttgcccgtggggacactgaacgtcatgttacctaagtacggtgattactacgtctggaacaaggtgaccacctgtatccataatattctgagcggccgccgctggattgaacactatggagaggtgactatacgaaacactaagtcttctgtgtgcatatgtaagctgacgttcgtaaaagtgaattactggaattctaatatgaacgaggtccaaggagtcgttatcgaccaggaaggaaaagcagtctatcgactctttgggaaatggcatgaggggttatactgtggcgtggctcctagcgcaaaatgcatctggcgccctggaagtatgccaactaactacgagctgtactatggcttcacacgctttgcaatcgagctcaatgagctggaccctgtgctcaaggacttgctgccccccacagacgcgcgattccggccggatcaacgatttctggaggagggcaatcttgaagccgcagcatccgaaaagcaacgggtagaggagcttcagcgatcaagaagacgatatatggaagagaataatttggagcatatccctaagtttttcaagaaggtgattgacgctaatcagcgggaagcctgggtttcaaacgatacttattgggagcttcggaaagatccaggattttccaaggtcgactcccccgtcctttggtag

SEQ ID NO: 198395 - DNA, 2529 bp, synthetic construct
  misc_feature 1..2529: note = Description of Artificial Sequence: Synthetic coding sequence
  source 1..2529: mol_type = other DNA
atggacttccaggagcgggacccccccttcctgcccgagagcgcccagtcctccaagccctcaagcgcccagcaggcttcggagttatgggaagtggtcgaggaacctcgcgtccgcctgggaaccgagggtgtaatgcccgagagacaggagggacacttgttgaagaagcggaagtggcccctgaagggctggcataagcggtattttgtactggaggatggaattctgcactatgctacaactcgccaggacataacaaagggtaagttacatgggagcatcgacgtgagactttcagtgatgagcattaataaaaaagctcagcgcatcgacctcgacaccgaggacaacatctaccacttgaagattaaaagtcaggatttgtttcagagctgggtcgcccaactgagagctcaccgactggcacaccggttggatatgcctcgagggtccttgccttcaacagcacaccgtaaggtgcccggggcacagctacctaccgcagctactgcgtcagctctaccaggtttaggcccacgggagaaggtgtcgtcgtggcttagggattcggatggcctggaccgttgctcgcatgaactgtccgagtgtcaggggaaactgcaagaactccacaggttgctccagtccctcgaaagcctgcacaggatcccttctgcccccgtgattcccacgcaccaggcctctgtaacaacagagcggcccaaaaaaggaaagagaacctcacgaatgtggtgtactcagtcttttgcgaaggatgacacaattggtagagtgggcagactgcacgggagtgtcccgaatctctcacgctacctggagagtcgtgattccagcgggacgcggggtctgcctcctactgactacgctcatctgcagcggtccttttgggccttggcccagaaggttcactcatcgcttagcagcgtgctggccgcactcaccatggagcgcgatcagctcagagatatgcaccaaggtagcgaactctcccgcatgggggtgagcgaagcttcaaccggacagcgacggttgcatagcctgtccacgtctagtgacactaccgccgactcgtttagctcccttaatcctgaagaacaagaggccctttatatgaagggccgggagctgaccccccagctgtcccagacttcaatcctgtctctggcagactcgcataccgagttcttcgacgcctgcgaggtgctgcttagcgcctcatccagcgagaatgaaggctctgaggaagaggagagttgcacttccgagattactaccagcctcagcgaggagatgctggacttaaggggtgcagaaaggtgtcaaaaaggagggtgtgtgccaggtcgacctatgggcccaccacggcgacgatgtctgcccgcagccagcgggccaggcgccgatgtatccttatggaatatcctcagaaacaatatcggaaaggacttgtcgaaagtctcaatgcctgtgcagctgaacgaaccgcttaataccctacagagattgtgtgaggaactagagtattcttctctgttagatcaggctagtcgcatcgccgatccatgcgaacggatggtgtatattgccgcgtttgctgtgagtgcctatagctcaacttaccacagggctgggtgcaagccgtttaatcctgtactgggagagacctatgagtgcgagcgccccgacaggggcttccggttcatatccgagcaagtaagtcatcatcctccaatctctgcctgccatgcagagtccgagaactttgccttttggcaggacatgaaatggaaaaacaaattttgggggaagagtcttgagatcgtgcccgtgggtactgttaatgtcagcctgccccgttttggagatcacttcgaatggaacaaggtaacaagctgtatccataacgtgttgagcgggcagaggtggatcgagcattacggggaggtgttaatccggaacactcaagacagcagctgtcattgtaaaattacattttgcaaagcaaagtactggagttccaatgtacacgaagtgcagggcgctgtcctctcccggagtgggagggttctacaccgactttttggaaagtggcacgagggactttaccggggaccaacccccggaggacaatgtatctggaagcctaactccatgccaccagatcacgaacgtaattttggattcacacagttcgccttggaactgaacgagttgaccgccgagttaaagcggagtttaccctctaccgacacacgactacgccctgatcagcggtacctggaggaaggaaacatccaagccgccgaagcacagaagcggcgtatcgagcagctacagagggacagacggaaggtaatggaggagaataacatcgtccatcaagcacgatttttcaggaggcagaccgattcatcaggaaaggagtggtgggttaccaataatacctattggagactacgcgccgaaccgggctacggcaatatggacggagccgtactttggtag

SEQ ID NO: 198396 - DNA, 2529 bp, synthetic construct
  misc_feature 1..2529: note = Description of Artificial Sequence: Synthetic coding sequence
  source 1..2529: mol_type = other DNA
atggacttccaggagcgggacccccccttcctgcccgagagcgcccagtcctcgaagccctcctccgcccagcaggcctctgaattgtgggaggtagtggaggaaccacgggtgcggctcgggaccgagggcgttatgcccgagagacaggaaggccatctgctcaagaagagaaaatggcccctgaagggctggcacaaacggtatttcgtattagaggatgggattctacactatgccactactaggcaggacattactaagggaaaactacacggatctattgacgtccgtttatccgttatgagtattaataaaaaggcccagagaatcgaccttgacaccgaagataacatctaccatctcaagataaaaagtcaggacctcttccagtcctgggtcgcccagctgcgtgcccatcgtctggcacaccgattagacatgccgaggggttccctcccttcaacggcacaccgaaaagtacctggggctcagctgccaactgcggcaacagcctccgctctaccaggcctcggtccaagagagaaagtaagctcatggttgcgcgacagtgatggattggatcggtgttctcacgagctctctgagtgtcaaggtaaattgcaggagctccaccgtctgttgcaaagcctggagtcactgcaccgcatcccgtcggcgccagtaatccctacacatcaggcaagtgtgaccactgagcggcccaagaaaggaaaaagaacctctagaatgtggtgtacccagtcttttgcaaaagatgacacgataggaagggtgggacgccttcatgggtctgtcccaaatctctccagatatctggagagccgcgactcaagtgggactcgcggcttacccccaactgactacgcccatctgcagaggagtttctgggcactggcgcaaaaggtgcattctagcctgtctagcgtactggcggccttaaccatggagagggatcagcttagggatatgcatcaggggtcagagctgagcagaatgggagtttccgaagcatccacgggccaacgccgtctccatagcctgagcacttcttctgacacgactgctgactcctttagcagcttaaatcctgaggagcaagaagcattgtacatgaaaggacgggagctcactcctcagctgtcgcagacctccattctgtctctggcagattcccacactgagttcttcgatgcatgtgaggttctgctctcagcctctagctcagaaaacgagggaagtgaagaggaagagtcatgcaccagcgagatcacgacatccttgtctgaggagatgctggaccttagaggggctgaaagatgccagaagggcggttgcgtccccggaagaccgatgggccctcctcgccgccggtgtctccctgcagccagtgggcccggtgccgacgtgtccctatggaacattctgcggaacaatatagggaaggacctgtcaaaagtgtctatgcctgttcagttaaatgaaccgcttaacactctgcagcgtctgtgtgaggagcttgaatatagcagcttgctggaccaagcttccagaattgcggatccttgcgagcgtatggtgtatattgccgcctttgccgtgagtgcatacagttctacttatcacagggctggctgcaaacccttcaatccggtgctgggggagacatacgagtgcgagagacccgatcgaggcttccgctttatcagcgagcaggttagccatcatccccctatctccgcctgtcacgcagagagcgaaaacttcgctttttggcaagatatgaagtggaagaacaaattctggggaaagtcccttgagattgtcccagtaggaactgtcaatgtttctctcccacgtttcggcgatcattttgagtggaacaaggtcacctcttgcattcacaacgttctttcaggacagcgttggatcgagcactatggcgaagtgttaatacggaatactcaggatagcagttgtcactgcaagatcactttctgcaaggccaaatattggtccagcaacgtgcatgaggtgcagggcgccgtgctgtccagatcagggagggtcctgcaccggctgttcggcaagtggcatgagggattataccgaggcccaactcccggcggacagtgtatctggaagccgaacagtatgcctcctgaccatgaaagaaacttcggattcactcagttcgctctggagctgaacgaacttacggccgaactcaagcgcagtctccctagcacagatacaaggctccgtccagaccaacgatatcttgaagagggcaacatccaagcagctgaggcacagaagagaaggatcgaacaattgcagcgtgaccggcgcaaggtgatggaagaaaacaacatcgtacaccaggccaggtttttccgcagacaaaccgacagtagcggaaaagagtggtgggtcacaaacaatacgtactggcggctgcgtgcggaaccaggctacggcaatatggatggtgcagttctttggtag

SEQ ID NO: 198397 - DNA, 2670 bp, synthetic construct
  misc_feature 1..2670: note = Description of Artificial Sequence: Synthetic coding sequence
  source 1..2670: mol_type = other DNA
atggagggcggcctggccgacggcgagcccgaccggaccagcctgttgggggactcaaaggacgtcctgggcccatcgaccgtggtcgccaactccgacgagagccaattgctgacccctggaaagatgtctcagaggcaaggcaaggaggcttatcccacacctaccaaggaccttcaccagccaagtctctccccggcaagcccacactcccagggcttcgagcgaggaaaggaggacatatcccagaataaggatgagtcaagtctcagcatgtccaaatcaaaatctgaatccaaactttacaatggcagtgagaaggatagtagcacatctagcaaactgactaagaaagagagtctgaaggtccaaaagaaaaattatagagaggaaaagaaacgcgctaccaaggaactgctttcgaccattacagacccgagtgtgatagtaatggcggattggctgaaaatccggggtacgctgaagtcgtggactaaattgtggtgtgtacttaagccgggggtactcctaatttacaaaacacagaagaacgggcaatgggtgggcacagtcctgctgaacgcttgcgagattattgagcggccaagcaaaaaggatggcttctgctttaagctcttccaccccctagagcagagcatttgggccgtgaagggcccgaagggggaagcagtggggtccatcacacagccactcccttcaagttatttgattataagagcaactagcgaatctgatggaaggtgctggatggatgccttggagttggctttgaagtgttcctccctgctgaagcggactatgatcagggagggtaaagagcacgacctgagcgtgtcgagcgactccacacatgtcaccttctacggactgctgagggccaacaacctccattcgggcgataactttcagctgaacgatagcgagatcgaacgccaacatttcaaagaccaggacatgtacagcgataagagcgacaaagagaatgatcaagagcacgacgaatcagataacgaagtcatgggcaagtccgaagagagcgacacagatactagtgagagacaggacgattcttacatagagcccgagccggtagagcccctgaaagagacgacctacacagaacagagtcatgaagaactgggcgaggcaggcgaagcctcccaaaccgagaccgtcagcgaagagaataaatccctcatttggacactattaaagcaggtgagaccaggaatggacctgagcaaggtggttctgccgacgttcattttggaacccaggtcttttttagacaaattgtcggactactactatcacgcagacttcttgagcgaagcggccctggaggagaacccatatttcagactgaaaaaggttgtgaagtggtatctgtcaggcttttacaagaaaccaaaaggactgaagaaaccatataacccaatcctgggagaaacattccgctgtctgtggatccacccacgaaccaattctaaaacattttatatcgccgagcaggtgtcacatcacccccccattagcgcattttatgtgtctaatcggaaggacggcttctgtttgtcagggtctattctagcgaagtccaagttctacggcaattctttgagtgcaatactggaaggcgaggcccggctgaccttcctcaacaggggagaggattacgtcatgaccatgccatacgcccattgcaaaggtatactgtacggtacgatgacactagagctgggtggaaccgtcaatatcacctgccaaaagacaggttactctgccattctggagtttaagctgaagccatttttaggctccagtgattgtgttaatcagatcagcggcaagctcaagttagggaaggaagtcctggccacactagaaggccactgggattcagaggtttttatcaccgataaaaagaccgacaactcagaggtgttctggaatccaacccctgacatcaagcagtggcgattgataagacatacagtgaagttcgaagaacaaggcgattttgagagcgaaaaactatggcagcgtgtgacccgtgctatcaatgccaaagaccagacagaggcaacacaggaaaaatatgttctggaggaagctcagcgtcaggcagcacgagatagaaagacaaaaaatgaggagtggagttgtaagctgttcgagctagatccactcaccggggaatggcactataagttcgccgatacccgtccctgggaccctctgaacgatatgatccaatttgaaaaggacggcgtcatccaaacaaaggttaaacacaggactccaatggtctccgtcccaaaaatgaaacacaagccaactagacagcagaagaaggtagctaagggctactcctcccccgagccagatattcaggactcttcaggatcagaagctcagtctgtcaagccgagcacacgccgcaaaaagggcattgagcttggggatattcagagcagcatcgagtcaatcaaacaaacgcaggaagaaatcaaacggaatatcatggccctgcgcaatcatctggtttccagtactccagctacagattatttcctccaacagaaagactattttatcatctttctcttgatcctgctccaagttatcatcaatttcatgttcaagtag

SEQ ID NO: 198398 - DNA, 2544 bp, synthetic construct
  misc_feature 1..2544: note = Description of Artificial Sequence: Synthetic coding sequence
  source 1..2544: mol_type = other DNA
atgagccagcggcagggcaaggaggcctaccccacccccaccaaggacctgcaccagcctagcctatcaccagctagcccacactcccaggggttcgaacggggtaaagaggacatcagccagaacaaggatgagagctccctgagtatgtccaaaagtaaaagtgagtccaagctgtataatgggagcgagaaggatagtagcacctcttcgaagctcaccaagaaggagtccctaaaagtgcaaaagaagaattatcgcgaggagaaaaaacgcgccactaaagaactgttatcgacaattaccgatccctccgttattgtgatggcggactggctgaagattagggggactctgaaaagttggacgaaattatggtgcgtgctgaagccaggggtgctcttaatttacaagactcagaagaatggccagtgggtcggaacggtgcttctgaatgcatgcgagattatcgagaggccttctaagaaagacggcttttgctttaagctgtttcacccccttgagcagtctatctgggctgtgaagggccccaaaggcgaggctgttggttcaattacacagccactgccttctagttacttaatcatccgagccacgtccgagagtgacggaagatgttggatggatgccctggaactggctcttaagtgcagctccctcctcaagcgcaccatgatccgagagggtaaagagcatgatttaagcgtgtcctcagattcaactcacgtcactttctacggactgcttcgcgcaaacaacctgcattctggggacaatttccaattgaacgacagcgaaattgagcgtcaacactttaaagatcaggacatgtacagcgataaaagtgacaaggagaatgaccaagaacacgatgagtcggacaacgaggtgatgggaaaatccgaggagtctgacaccgacaccagcgagagacaggatgatagttatatcgagcctgaacctgtcgaacccttgaaggaaaccacatacacagaacagtctcatgaggagctcggggaggccggagaagcttctcagaccgaaacagtctctgaggaaaataaatccttaatttggaccctgctgaaacaagttagacctggtatggacttgtcgaaagtagtactcccgactttcatactggaaccaaggtcctttctggacaagctatcagattactactatcatgcagatttcctctctgaggctgcactggaagagaacccctactttagactcaagaaggtggttaagtggtatctcagtggtttttataagaaaccaaagggacttaaaaaaccttataaccctattctaggagaaacctttcgatgcctgtggattcatccccggacaaatagcaaaacattctacattgctgaacaggtgtcgcaccatccgcctataagtgctttttacgtgtctaaccgcaaagatggcttttgcctttccggatccatcctggccaagtcgaagttttacggcaattccctttcggccatactcgagggcgaagctcggcttaccttcttgaacaggggggaggactacgtgatgacaatgccctatgctcattgcaagggcattctgtatggtacgatgaccctcgagttaggtggtactgtgaatatcacctgccagaagactggctactccgccattctggaatttaagcttaagccattcctgggatcctcagattgcgtgaaccagatcagcggaaagctgaagctcggcaaggaggtcctggctactcttgaagggcactgggacagcgaagtattcattactgacaagaagacagacaatagtgaggtattttggaatcccaccccggacatcaagcagtggcgcctgatccggcacaccgtcaaattcgaggaacagggagacttcgagtctgaaaaactgtggcagcgcgtgacccgcgcaattaatgcgaaggaccaaacagaagccactcaagagaaatacgtcctcgaggaagcgcagcgccaagcagctcgcgacagaaaaacaaagaacgaagagtggagttgcaaactcttcgaattagaccctctcacaggggaatggcattacaaattcgctgacaccagaccgtgggaccccctaaatgacatgattcaattcgagaaggacggagtgatacagaccaaagtcaagcacaggactcctatggtcagcgtgcctaagatgaaacacaagcccacacgacagcagaaaaaggtagctaaggggtactctagtcccgaacccgatattcaggactcgtccggctcagaggcccagagcgtgaaaccctcaactaggaggaagaaagggattgaactcggcgacattcagtcttccatcgaaagcattaagcaaacccaggaggaaattaagaggaatattatggcactccggaaccatctcgtgtctagcacaccagccaccgattattttttgcagcaaaaagactactttatcattttcctactcatcctgctccaagtgatcatcaatttcatgttcaaatag

SEQ ID NO: 198399 - DNA, 2544 bp, synthetic construct
  misc_feature 1..2544: note = Description of Artificial Sequence: Synthetic coding sequence
  source 1..2544: mol_type = other DNA
atgagccagcggcagggcaaggaggcctaccccacccccaccaaggacctccatcagccttccctttctcctgcctcccctcacagccaagggttcgaaaggggaaaagaggacatcagccagaataaggatgagtcaagcctttccatgagcaagtcaaagtctgagagcaagctatacaacggatccgaaaaagactcgtcgacgtcttcaaagttgacaaagaaggaaagtcttaaagtacagaaaaagaactacagagaggagaaaaagagagcaaccaaagagctgctttctacaatcacagatccatccgtgattgtgatggcagactggttgaagatacggggaacgcttaagtcttggaccaagctgtggtgtgttctgaagcccggagtgctgctgatttacaagactcagaaaaacggccagtgggttggcactgtgctcctgaatgcctgtgaaatcattgaaagaccatcaaagaaggatggcttttgcttcaagttgttccatcctctggaacaaagcatctgggccgtcaaaggccctaaaggtgaggccgtgggttcaatcacacagcctctccccagtagctacctgattatcagggccacatccgagagcgacgggaggtgctggatggatgctctggaactcgccctcaagtgctcttccctgctgaagagaactatgataagggagggcaaagaacatgatttatcggtatcctctgattccacccacgtgacattctacgggcttttaagagctaataacctgcatagcggtgacaatttccagctgaatgacagcgagatcgaacggcagcactttaaagatcaggacatgtactccgataaatcggataaggaaaatgaccaggaacacgatgaatccgataacgaagtaatgggcaaatccgaggagtccgatacggacactagcgagagacaggatgattcctacattgagcctgagccagtggagcctctgaaggagacaacctacactgagcagagccacgaggagctgggagaagctggcgaagccagccagaccgaaaccgtgagcgaggaaaacaaaagtctgatctggactctgctgaaacaagtcaggcccggcatggatctgtctaaggtggttctgcctacattcatcttagaaccgcggagcttcctggataagctgagcgattattattatcacgccgatttcctgtctgaggccgcacttgaagagaatccgtatttccgtcttaagaaagttgtcaaatggtatctgtccggcttttacaagaagcctaagggactgaagaagccgtacaatccgattcttggcgagacatttcggtgtttatggattcacccccggaccaactctaagaccttctacatagccgagcaggtctcacaccacccacccatctctgcattttacgtttctaaccggaaagatggattttgccttagcggttccatcctggccaagagcaagttctacggcaattccctttcggcaattctcgaaggggaggctcggcttacattcttaaacaggggggaggactacgtaatgactatgccctacgcacattgcaaaggaatattgtatggtacaatgaccctcgagttaggtggcacagtcaacattacatgccagaaaacaggttactccgcaatcctggaatttaagctaaaacccttccttgggagcagtgattgcgtcaatcaaatctccggtaagttaaaactcggaaaagaggtcctggccacactggaagggcactgggacagcgaagtgttcatcactgacaagaagactgacaatagtgaggtattctggaatccaacccctgatattaaacagtggcgtttgatccgccatacagtcaagtttgaagaacagggagacttcgagtcagagaagctgtggcagcgcgttacccgggcaattaatgctaaagatcaaacagaggctacacaggagaaatatgttcttgaggaggcccagcgtcaggcagctcgcgacaggaagactaagaacgaagagtggtcatgcaaactcttcgaactcgaccctctcaccggagagtggcactataagttcgccgatacacggccctgggacccactgaatgacatgatccagttcgaaaaggatggagtcatccaaaccaaagtcaagcacagaacccctatggtgtcagtaccgaagatgaagcacaagcctactcgtcaacagaagaaagttgctaagggatacagctccccggagcctgatatccaagattcatcgggcagtgaggctcagtctgtgaagccctctacacggcgcaaaaagggaatagaactgggtgatatccaatcatcaattgaatctattaagcagacacaggaggaaatcaagagaaacattatggccctgcgcaatcaccttgtgtccagcaccccagccacggactactttttgcagcagaaggattatttcatcatttttctccttatactgctgcaagttataattaacttcatgtttaaatag

SEQ ID NO: 198400 - DNA, 2187 bp, synthetic construct
  misc_feature 1..2187: note = Description of Artificial Sequence: Synthetic coding sequence
  source 1..2187: mol_type = other DNA
atggagggcggcctggccgacggcgagcccgaccggaccagcctgttaggagacagtaaagatgttctggggccttccaccgtggtggcgaatagtgacgaaagccagctgctcacccctgggaaaatgtctcagcgccaaggcaaagaagcctatcccaccccaaccaaagacttgcatcaaccatctctaagtccagcgagtccccactctcagggctttgagagaggcaaagaagatatctcccagaataaagacgaatcttcgctctctatgtccaagagcaagagcgagtcaaagctttataatggctccgagaaggactctagcactagtagcaaactcaccaagaaagaatcccttaaggtgcagaaaaagaactacagagaagaaaagaagcgcgctactaaagaactcctgtcaactattaccgatccctcggtcattgtcatggctgactggttgaaaatcagagggacccttaaatcttggaccaaactttggtgtgtcttgaagcccggcgtcctgctgatatataagacacagaaaaacggccagtgggtgggaacagtgctgcttaacgcgtgtgaaatcattgaacgtccgtccaagaaggacggtttctgctttaagctttttcacccactggaacagtctatctgggcagtgaagggccccaagggtgaggctgtcggcagcatcactcaacctctcccctcctcatacttgattattcgcgcgacctcagaatctgatggtcggtgctggatggacgcactggaactggccctgaagtgctccagcctgctcaagcgcacaatgatcagggaggggaaagagcacgatcttagcgtgagttcagactctacccacgtgactttttacgggctcttacgcgccaataatctccactccggagacaactttcaactgaacgatagcgagattgagagacagcatttcaaagatcaagatatgtacagcgacaaatcagacaaagagaacgaccaggaacacgacgagtccgacaatgaggtgatgggcaagagcgaagagagcgatactgacacctctgagcgccaggacgactcttacatcgagcccgagcctgttgagcctttgaaggaaactacctacaccgagcagtcccacgaggagctgggtgaagctggagaggccagccaaactgagaccgtttccgaggaaaacaagtccttgatctggaccctgttgaagcaggtgagacctggaatggacctgagcaaagttgttttgcctacattcatactggagccccggtcttttcttgataagctctctgattactattatcatgctgacttcctctcagaagcagcacttgaagagaacccttactttagactcaagaaggttgttaaatggtatctaagtggcttctacaagaaacccaagggcctcaagaaaccgtataatcctatacttggtgagactttccggtgtctgtggatacatccaaggacgaatagtaaaactttttacattgctgagcaagttagtcaccacccacccatttctgcgttttacgtaagcaacagaaaggacggcttttgtttgtccggctccatccttgcaaagagcaaattttacggcaattcactctcagccattctggagggcgaggcacggctgacctttttaaaccggggggaggattacgtcatgaccatgccgtatgctcactgtaaaggtatactatatgggacaatgaccctggaacttggaggaactgtgaacatcacttgccagaaaaccggatatagtgcaatactcgaatttaaactgaaacccttcctaggatctagcgactgcgtcaatcagattagcggaaagctcaagctaggcaaggaagtgcttgccaccctcgagggccactgggatagcgaagtgtttatcacagacaaaaaaacagacaattctgaggtgttttggaatccgactcccgacataaaacagtggaggcttatcagacatactgtgaaatttgaggaacagggcgattttgaaagcgagaaactttggcagcgcgtgacaagagcaattaacgcaaaagaccagaccgaagcaacccaggagaagtacgtgctggaagaggcacagcgacaggccgctcgggataggaaaacaaaaaatgagaagaagaagtag

SEQ ID NO: 198401 - DNA, 2625 bp, synthetic construct
  misc_feature 1..2625: note = Description of Artificial Sequence: Synthetic coding sequence
  source 1..2625: mol_type = other DNA
atggagggcggcctggccgacggcgagcccgaccggaccagcgccaatagcgacgagtctcagctgctgacacctggtaagatgtcgcagagacaagggaaagaagcttatcctacgccaacaaaagacctgcaccaaccaagtcttagccccgccagcccccactcccagggattcgaacggggtaaggaagatatatctcagaataaagatgagtctagcttgtccatgagcaagtccaaaagcgaatctaagttatataacgggtccgagaaggatagttcgaccagcagcaagttaaccaagaaagaatcgcttaaagttcagaagaagaattacagagaggaaaaaaagcgggccacgaaagaacttctgtctacaatcacggacccgtctgtaatcgtgatggccgactggctcaagatccgtgggactctgaagagctggacaaagctttggtgcgttctgaagccaggagtgctcctcatatacaaaacgcagaagaatgggcagtgggtcggaacagtgctcctcaacgcttgcgaaatcatagaacggccaagtaagaaagacgggttttgcttcaaattgtttcaccccctggagcaatccatatgggccgtgaagggccctaagggggaagcagtgggatccattacacagccactcccttcatcctaccttatcatccgcgccacttcagagagcgacgggcgctgttggatggatgctcttgagcttgcactgaaatgcagcagcttgttgaagcgcacgatgattagggagggcaaggaacatgacttaagtgtgagtagtgacagtacccacgtaaccttctatggactgttgcgagccaacaacctacacagtggagataactttcagcttaatgactctgaaattgagagacagcatttcaaggatcaggatatgtacagtgacaaatccgataaggagaacgaccaggaacatgacgagagcgacaatgaagtgatgggaaagagtgaggagtccgacactgacacaagtgagcggcaagatgactcctacatcgagcctgaaccggttgagcccttaaaggaaactacgtatacggagcagtcccacgaggagctgggggaagcgggtgaggcctcccagacagaaacagtgagtgaggaaaacaagagcttaatctggacattgctaaagcaggttaggcctggaatggatctgtcaaaagttgtcttgccgaccttcattcttgaaccacgatcattcctggataaactgtccgactactattaccatgccgatttcctgtctgaagctgcactggaggagaacccatatttccgtctgaagaaggtcgttaagtggtatttgtccggcttttataaaaagcctaagggcctgaaaaaaccctacaacccaattctgggggagaccttcaggtgcctatggatccacccccggacaaactccaaaactttttatatcgccgaacaggtctcacaccatcctcccatatctgctttttatgtgtccaacaggaaagatggattttgcctatccggaagcattctggccaagtctaagttctacgggaacagtctgagcgctattttagagggggaagcacggctcaccttcctgaatagaggggaggactatgtcatgacaatgccctacgcgcactgtaaaggtatcctctacgggacaatgacactcgagctcggcggtaccgttaatatcacttgccagaagactgggtactcagccatcctggagtttaaactgaagccgtttttgggctccagtgattgcgtgaaccagatctcaggtaaactgaaactcggcaaggaagtattagcaactcttgaaggccattgggattcggaggtcttcatcacagacaaaaagactgataactctgaagtgttctggaaccctacacctgacattaaacagtggaggcttatcaggcacacggtgaagtttgaagagcagggggacttcgagagcgagaagctgtggcagagggtcacgagggctataaatgctaaagaccaaacagaggctacccaggagaagtacgtactggaggaagcgcagcgccaggcagcaagagaccggaagacgaaaaacgaggagtggtcctgcaagctctttgaactcgatccactgactggcgagtggcactataagttcgcagacaccaggccgtgggaccccctgaatgacatgattcagtttgaaaaggatggtgtgatccagacaaaggtcaagcaccggaccccaatggtgtccgtacctaagatgaaacacaagcccactaggcagcagaaaaaggtggccaagggctactcctcaccagagcctgatatccaagactccagtggctccgaggcacagagcgtgaaacctagtacccgaagaaaaaaggggatcgagcttggagacatccagagctcaatcgaaagtatcaaacagacacaggaggagattaagcgcaacatcatggcattacgcaaccacctggttagcagcactcccgccaccgactactttctgcagcaaaaagattacttcattatatttcttcttatactgctacaggtcatcattaactttatgttcaagtag

SEQ ID NO: 198402 - DNA, 162 bp, synthetic construct
  misc_feature 1..162: note = Description of Artificial Sequence: Synthetic coding sequence
  source 1..162: mol_type = other DNA
atggagggcggcctggccgacggcgagcccgaccggaccagcctgcttggagattccaaggacgtgctaggaccaagcacgaatagtgatgaatcccagctgctaacgccaggcaaaatgtctcagagacagggaaaagaagcctacccaacacccacatag

SEQ ID NO: 198403 - DNA, 231 bp, synthetic construct
  misc_feature 1..231: note = Description of Artificial Sequence: Synthetic coding sequence
  source 1..231: mol_type = other DNA
atgagccagcggcagggcaaggaggcctaccccacccccaccaaggacctgcaccagccgagtttgtcacccgcctctccccatagccagggcttcgagcgtggaaaagaggacatctctcaaaacaaggatgagtcatcattatcaatgtccaaatccaaatctgaatctaaactatacaacggctccgagaaagattcctccacatcctctaagctaacgaagaagtag

SEQ ID NO: 198404 - DNA, 177 bp, synthetic construct
  misc_feature 1..177: note = Description of Artificial Sequence: Synthetic coding sequence
  source 1..177: mol_type = other DNA
atggagggcggcctggccgacggcgagcccgaccggaccagcctgttgggagacagcaaagatgtgcttgggccgagcactgttgttgccaattctgacgaaagccaattgctgactccagggaagatgtcccagagacaggggaaggaagcttacccgactcctacaaaagattag

SEQ ID NO: 198405 - DNA, 336 bp, synthetic construct
  misc_feature 1..336: note = Description of Artificial Sequence: Synthetic coding sequence
  source 1..336: mol_type = other DNA
atgagccagcggcagggcaaggaggcctaccccacccccaccaaggatcttcatcagcctagtctgtcccccgccagcccccactctcaagggtttgaaaggggcaaggaggatatttcccagaataaagatgagagctccttatcgatgtccaaatcaaaatccgagagtaaattgtacaacggcagtgagaaggactccagcaccagtagtaagcttacgaaaaaagaatctctgaaggttcagaaaaagaactatagggaagagaaaaagcgggcaaccaaggagctgctctccaccattacagatccatccgtcatcgtgatggctgactag

SEQ ID NO: 198406 - DNA, 2226 bp, synthetic construct
  misc_feature 1..2226: note = Description of Artificial Sequence: Synthetic coding sequence
  source 1..2226: mol_type = other DNA
atgccctaccggcgggtgaccagcggccggctgctgagcctggccgcgcctaagatggcctctatcatggagggtccactctctaaatggacaaatgttatgaaagggtggcagtaccgttggttcgtgctggactataacgctgggttgctatcatactatacaagcaaggacaagatgatgcgcgggtcccggcggggctgcgtccggctgcggggggctgtgataggaatcgacgacgaggacgacagcaccttcacaattacggtggaccagaaaaccttccactttcaggctagggacgcggacgaaagagagaagtggatacatgccctggaggaaacgattcttcgtcacacactgcagttgcagggactggatagtgggtttgttccatcggtgcaggacttcgataaaaaattgacagaggctgacgcttatctgcaaatcttgattgagcagttgaagctcttcgatgacaagttgcaaaactgcaaagaagacgaacagcgcaaaaaaattgaaacgcttaaagagactacaaactcaatggttgagagtataaaacactgcatcgttctgctccagatagcaaaatctacgattaaccctgtcgacgctatttaccagccaagtccccttgagccagtcatctcaaccatgcccagccagaccgttttaccacccgaaccagtccagttatgcaagtcagaacagcgaccgagcagtctaccagtcgggcccgtcctggccacactgggtcatcatcagactcccactccgaatagcaccggttccgggcatagccccccaagcagttccctgacatcaccatctcatgtcaacctttcaccaaacactgtcccggagtttagttattctagctctgaggatgaattctatgacgctgatgaattccaccagagtggatctagtccaaagcggctgattgatagcagtggctccgcttccgtgcttacccattcatcgtccggaaattcactgaagcgccccgataccactgaatctctcaatagtagcttgtccaatggaacgtccgatgcagacctctttgacagccatgatgatagggatgatgatgcagaggctggatccgtggaggagcataaatcagtcataatgcacctgctctctcaggttcgcctggggatggatctgaccaaagttgttctgcctacctttattttagaaaggcgctctttattggaaatgtatgccgacttctttgcccacccagatctgttcgtctcaataagcgaccaaaaagaccctaaggatcgcatggtgcaggtcgttaagtggtacctgtcagcctttcatgccggccgcaaaggatcggtcgccaaaaagccatacaatcccatattgggcgagatttttcagtgccactggaccctgccaaatgacaccgaggaaaacacagaattggtgagtgaggggcctgtgccttgggtcagtaaaaacagcgtgactttcgttgctgagcaagtatcacaccaccctcccatatctgccttttacgccgagtgctttaacaaaaagatccagttcaacgcccacatttggacaaagtcaaagttcctggggatgtccatcggcgtccacaatattggccagggctgcgtgagctgcttggactatgatgaacactatattctcactttcccaaacgggtatggccgatctattctgactgtcccatgggtggagctcggcggggaatgcaatatcaattgtagtaaaaccggctattctgccaatatcattttccacactaaacctttctacggtggcaagaaacacaggatcaccgccgaaatcttctcacccaacgacaaaaagagcttctgttctattgagggcgagtggaatggcgtgatgtacgcgaagtacgctacaggagagaatactgtgttcgtcgatactaagaagctgccaataattaagaaaaaggtaagaaagctggaggatcagaacgagtatgaatcacgttccctatggaaggatgtcaccttcaatttgaaaattcgggatattgatgccgctactgaagcgaagcatcgattagaagaaagacaaagagccgaagcaagggaacggaaggagaaagagattcagtgggaaacccgcctcttccacgaagacggcgagtgctgggtgtacgatgaacccctcctgaagcgcctaggagcagccaagcattag

SEQ ID NO: 198407 - DNA, 1881 bp, synthetic construct
  misc_feature 1..1881: note = Description of Artificial Sequence: Synthetic coding sequence
  source 1..1881: mol_type = other DNA
atggccttcctgctggccacctgcggcggcctggacagcggcttcgtcccatccgtccaggatttcgataagaaactaactgaagccgatgcttatctccaaatcctcatcgaacagttgaagcttttcgacgataagctacagaattgcaaggaggatgaacaaaggaaaaagatagagacccttaaagagacgaccaactccatggttgaatccataaaacactgtattgtattgttgcagattgcgaagtcgaccatcaacccagtggacgctatctatcagccgtcccccctggagccagtcatttccactatgccgtcccagactgtcttgccacccgaacctgtccaattgtgtaagtcagaacagcgcccaagttccctgcccgttggtccggttctggccacgctgggccatcaccagacccccacccctaattccacaggctctgggcattcccccccgagcagctctctcacgagcccctcccacgtaaatctgagccccaacacggtgccagagttctcttatagttccagtgaagacgaattttatgatgccgatgagtttcaccagtctggatcaagccctaaaagacttatcgactctagcggttcggcctcagtgttgactcactccagttccggaaactcgttgaagcgcccagacactaccgagagcctgaactcctcgctctctaatggcacttccgacgccgacctatttgatagtcacgatgaccgcgatgatgatgctgaggcaggaagtgtggaggagcataagagcgtgatcatgcatctcctctctcaggttagattgggtatggacttgactaaggtggttctgcctacgttcatactcgagagacgatctttattagagatgtatgcagattttttcgcccacccggacttgttcgtgagtatcagcgaccaaaaagatcctaaagaccggatggtccaagtggtaaagtggtacctttctgcatttcatgccggccgcaaaggttcagtggccaaaaaaccttataacccaattcttggagagatcttccagtgccattggaccttgccaaatgataccgaagaaaacacggaacttgtgtccgaggggcctgtgccatgggtgtcaaagaactctgttacctttgtggccgaacaggtaagccatcaccccccaatctccgccttttatgccgagtgcttcaacaagaagatccagtttaatgctcacatttggacaaagtcaaagttcctcggtatgtccatcggtgtccacaatatcggtcaaggatgtgtgagttgccttgattacgacgagcattacattctgacttttcctaatggctatggtagatccatcttgacagtgccttgggttgaattagggggcgagtgcaatattaattgctctaaaaccggatacagcgccaacattatcttccatacaaaaccattttacggcggaaaaaagcaccgtatcaccgccgagatttttagtcccaacgataagaagagcttctgcagcatcgaaggagagtggaatggcgtaatgtacgccaagtacgcgacaggggagaacacggtcttcgtggatactaaaaagctgcccatcattaagaagaaggtcagaaaactcgaggaccagaatgagtacgagagccgctctctgtggaaggacgtgacctttaatctcaagatacgggacatcgatgccgccactgaggcaaaacatcgcctcgaagagcggcagagagccgaggccagggagagaaaggaaaaagaaatccaatgggaaacccgtctgttccatgaagacggggagtgctgggtgtatgacgagcctttactgaaacgactgggggccgcaaaacattag

SEQ ID NO: 198408 - DNA, 2265 bp, synthetic construct
  misc_feature 1..2265: note = Description of Artificial Sequence: Synthetic coding sequence
  source 1..2265: mol_type = other DNA
atgccctaccggcgggtgaccagcggccggctgctgagcctggccgcacccaagatggcgagcatcatggaaggacctctcagcaagtggaccaacgtgatgaaaggctggcaatacaggtggtttgtgctggactacaacgccggcctgctctcatattatacatccaaagacaaaatgatgcgcggatcccggcgtgggtgcgttcggcttcgaggtgctgtaatcgggatcgacgatgaggatgatagtacgttcactattacagtcgatcagaagacgttccactttcaagcgcgggacgccgacgagagggagaaatggatacacgccttagaggaaaccattcttcggcacaccctgcagctgcaggggctcgactctggctttgttccctccgtgcaggactttgacaaaaaactcacggaggcagacgcctatctacagatcctgattgaacagctcaaattatttgacgacaagttacagaactgtaaggaggacgaacagaggaaaaagatagaaaccctgaaagaaaccactaatagtatggtggaatcaattaagcactgtattgtcctgttacagattgcaaaagaccagtcaaatgctgaaaagcatgccgacggaatgatttccactatcaatccagttgacgccatttaccagccttcccccctggaacccgtgattagtactatgccatcacagaccgtgctacctccagaacctgtgcagttgtgcaagagtgaacaacggcctagtagtttacccgtgggacccgtgctagctactctgggacatcaccagactccgactccgaactcaacgggaagcgggcacagcccgcctagctctagcctcacaagccctagccatgtgaacctttctcccaacaccgtccccgaattttcatatagttcgagcgaggacgaattttacgacgctgatgaatttcaccagtcgggatcctccccgaaacgcctgattgattcttcggggagtgccagcgtgcttacccacagctcttcgggcaactctcttaaacgcccagacacgacagaatctctgaactcctcactaagcaatggaactagcgatgccgacttgtttgactctcacgatgatagagatgacgacgctgaggctgggagcgtggaggagcataagagcgtgattatgcacctcctgagccaggttcggctcggtatggatcttactaaggtggtgttgcccactttcattctggaaaggcgttcgctgctggaaatgtacgctgacttttttgctcatcctgatctatttgtcagcattagcgatcagaaggatcctaaggatcggatggtccaggtcgtgaaatggtatctctcagccttccacgctgggcggaagggtagtgtggctaagaagccatacaacccgatcctcggtgaaatattccagtgccactggacgctgcctaacgataccgaagagaatacagaactggtaagtgaaggacctgtcccatgggtgtcgaaaaattctgtgactttcgttgctgagcaggtttctcatcaccctccaatttcagcattttacgcggaatgctttaataagaaaattcagttcaacgctcacatctggactaaatctaagttcctgggaatgtcaatcggtgtccacaatatcggccagggctgcgtcagttgcttggactacgatgagcactacattttaacattcccaaacggctatggccgatccatcctaacggtgccatgggtggagttggggggggagtgtaacattaattgttcgaagactgggtacagcgcaaatattatctttcatacaaaaccattttacggtggaaagaagcatagaattaccgccgaaattttctctcccaacgataaaaagagtttctgcagcatcgagggtgaatggaatggagttatgtacgcaaagtatgccacaggagaaaacacagttttcgtcgataccaagaagctccccataatcaaaaagaaagtgagaaagttggaggaccagaatgaatacgagagtcgttccctgtggaaggacgttaccttcaacctcaaaataagagacattgacgccgccactgaagccaagcaccggctcgaggagcggcagagagccgaagctcgggagcggaaggagaaggagattcagtgggagacccgactcttccatgaggatggtgaatgctgggtgtacgatgagccgcttctgaaacgcctgggggcagctaaacattag

SEQ ID NO: 198409 - DNA, 2172 bp, synthetic construct
  misc_feature 1..2172: note = Description of Artificial Sequence: Synthetic coding sequence
  source 1..2172: mol_type = other DNA
atggccagcatcatggagggccccctgagcaagtggaccaacgtgatgaagggttggcaataccgatggttcgtgctggattataacgcaggccttctgtcatattatacttcaaaagataaaatgatgcgcggttccagacgtggctgtgtgcgcttacggggtgctgtcattggcattgatgacgaagatgactcgactttcaccattacggtggatcagaagacttttcactttcaggctagggacgccgacgagcgcgagaaatggatccatgctttggaagaaactatcctgcgccatactttacaactgcagggacttgactcgggttttgtgccatctgtccaagattttgacaagaagctgacagaggcggatgcatacctgcaaatactgattgaacagctaaaattgttcgatgacaagctgcaaaattgtaaggaggacgagcagaggaaaaagatagaaacactcaaggagacaacaaacagtatggtggaaagtatcaagcattgtatcgtgctgctccagatcgctaagtcaactataaaccccgtagatgccatctatcaaccatcacctctcgagcccgttatatcaacaatgcccagtcagactgtactgcctccagagcctgtccagctgtgcaaatctgagcagcgccctagctccctacctgtaggcccagtgcttgccaccctcggacatcaccagacccccacacccaacagtacaggatcgggacatagccctccctcatcgtcgctgactagcccctcacatgtcaatctgtcccccaatacagtgcccgagttttcttattcctctagtgaggatgaattctacgacgccgatgagttccaccagtccggtagctcccctaaacggctgatcgacagcagcggatcagcttccgtactgacccattcgtcaagtggtaactccctcaagcggcccgacactacggagtctttaaattcctccttgagcaatggtacatctgacgccgacctattcgactcacacgacgatagggatgacgacgccgaggcggggagcgtcgaggaacacaaatctgtcatcatgcatctcttgtctcaggtgcgcttgggtatggatctcactaaagtcgtcctcccaacctttattctggaaaggaggagtctactcgagatgtatgcagacttttttgcacatccagacttattcgtgtccattagcgaccaaaaggacccaaaagatcgcatggtccaggtggttaaatggtacctttctgccttccacgctgggagaaaaggatcagtcgcaaaaaaaccttacaacccaatccttggtgagatcttccagtgccactggactctgccaaacgacaccgaggagaatacagagctggtctcagaggggccggtgccgtgggtctccaaaaactccgtgactttcgttgccgagcaggtgagccatcatcctcccatttccgccttttatgctgagtgcttcaacaaaaagattcagtttaacgctcacatctggactaagtctaaattcctgggcatgtcgatcggagtacacaatattggccagggctgcgtgtcgtgcctagactatgatgaacattacattttgacattcccaaatgggtacggaaggtcaatactgacagtgccatgggtcgagctcgggggggagtgcaatatcaactgtagtaaaaccgggtattctgcgaacatcatcttccatacaaagccattctacggaggcaaaaagcatcggatcaccgccgagatatttagtccgaatgacaagaagagtttctgcagtatcgagggggaatggaatggagttatgtatgctaagtatgcgactggcgagaacaccgtgttcgtagacactaaaaaattgccaatcataaaaaagaaagttcgcaagctggaagaccagaatgagtacgaatctagatctctctggaaagatgtgacctttaatctcaaaatacgcgatattgacgccgcaaccgaggccaagcacaggctggaggaaagacaacgggccgaagccagagagaggaaagagaaggaaatccagtgggagacacgcttatttcacgaagacggcgagtgctgggtttacgatgaacctctgctgaaaaggctcggcgccgccaaacattag

SEQ ID NO: 198410 - DNA, 2211 bp, synthetic construct
  misc_feature 1..2211: note = Description of Artificial Sequence: Synthetic coding sequence
  source 1..2211: mol_type = other DNA
atggccagcatcatggagggccccctgagcaagtggaccaacgtgatgaagggctggcagtatcgctggtttgtgctagactacaacgccggattgttgtcttactacacttccaaagacaaaatgatgagaggaagccggaggggatgcgtgcggttacgaggcgctgttatcggtatcgatgacgaagacgacagtactttcacaattacagtagaccagaaaacctttcacttccaggctcgagatgccgatgagagggaaaaatggatccacgctctggaggagacaattcttcgacatacacttcagctgcagggattggactcagggttcgttcctagcgtgcaagacttcgacaagaagctaactgaagccgatgcctacctgcagattctgatcgaacagttgaagctgttcgatgacaagcttcagaactgcaaggaagacgaacaacgcaagaaaattgagacactgaaggagaccaccaacagtatggtggaatcaatcaaacactgcatagttcttctacagatcgccaaggaccaatctaatgccgaaaaacacgcagacggtatgatttccaccatcaatccggttgacgcaatctatcagcccagccccctggagcctgtgatctccacaatgccctcccagacggtgcttccacctgaacccgtgcagttatgtaagtcggagcagagaccttcgtccttgcctgtaggacccgtgttggctaccctcgggcaccaccaaactccgacccctaattccactggaagcggtcactctccccccagcagctctttgactagtccctcccacgtgaacctaagtcccaacaccgtgcccgaattcagctattccagctctgaggatgaattctatgacgctgacgagttccaccaatctggaagctcaccaaagaggctgatcgacagcagcggttccgcgagtgtgttaactcacagctctagcggaaactccctgaaaaggcccgacacaacagagagtttgaacagcagtttaagcaacggaacctccgacgcggacctgtttgacagccatgacgatcgggacgatgacgcagaggccggaagcgttgaagagcacaaaagtgtcattatgcaccttctttcacaggtgcgcctgggtatggatttgactaaagtcgtgctgcctacatttatcctcgagcggaggagcctgctggagatgtacgccgacttctttgcgcatcccgatctgtttgtctcaatcagcgatcagaaggatccaaaagatcggatggttcaagtggtgaaatggtacctgtccgctttccacgccggccgaaaagggagcgttgccaagaaaccctacaatcccatactaggcgagattttccaatgtcattggaccctacccaacgacactgaagaaaacactgagttggtgtctgaggggccagtcccatgggttagtaagaactccgttactttcgtcgccgaacaagtgtcgcaccaccccccaatttccgctttctacgctgagtgcttcaacaagaagatccagttcaatgcccatatctggacgaaatccaaattcctcggaatgtcaattggggtccacaacatagggcagggctgcgtctcctgcttggactacgatgaacattacatcctcacctttcctaacggatatggccggtctatcttgacagtgccctgggttgaattagggggcgagtgcaacattaactgctccaaaactggttacagtgccaacattatctttcataccaagccattctacggcgggaagaaacaccggatcactgcagagatcttctctcctaacgacaaaaagtctttctgtagcatcgaaggtgaatggaatggcgtgatgtacgcaaagtacgcgaccggcgaaaacactgtgtttgtggacacgaagaagcttcccatcattaagaaaaaagtgagaaaactggaggatcagaatgagtacgaatcaagaagcttgtggaaagatgtgacctttaatttaaaaattagagacatcgatgctgcgacggaagccaaacacaggctggaggaacgccagcgggcggaggcaagagagagaaaagaaaaggagatacagtgggagacccgcctctttcatgaggacggtgaatgttgggtatacgacgagcctttgctcaagcggctgggtgcagcaaagcactag

SEQ ID NO: 198411 - DNA, 1716 bp, synthetic construct
  misc_feature 1..1716: note = Description of Artificial Sequence: Synthetic coding sequence
  source 1..1716: mol_type = other DNA
atggtggagagcatcaagcactgcatcgtgctgctgcagatcgccaaagatcagtccaatgccgagaagcacgcggacggtatgatctcaaccataaaccccgtggacgcaatttatcagccgtctccacttgaacccgtcatcagcacaatgccgtctcagacagtgctgcctcctgaacctgtccaactctgtaaaagtgaacagagaccgtcgtcattaccggtcgggcccgtgctggctacccttgggcaccatcaaacccctacgccgaactcaacgggcagtggccacagtcctcctagctcaagtctgacctctccctcccatgttaatcttagccctaatacagtgcctgagtttagctacagcagctcggaggatgaattttatgacgctgacgaattccaccagtctgggtcctcccccaagagactgatagattcttcaggatctgcttccgtgttgacacattctagcagtggaaattcactcaagagacccgacactaccgaatctctcaactcttccctcagcaacgggactagcgacgcagacctgttcgatagccatgacgatcgagacgacgacgccgaggcgggaagtgtagaggaacataaaagcgtcatcatgcatctacttagtcaagttcgcctgggaatggacctgacgaaagtggttttgccaacctttattctcgaaaggcggtcactgctcgagatgtatgccgatttctttgctcaccccgatctgtttgtcagtatctccgaccagaaggatccaaaggatcgcatggtgcaggtggttaagtggtacttgagcgctttccacgcaggcagaaagggaagcgtggccaaaaagccttacaacccaattctgggagagatcttccagtgccattggacattgcctaatgacaccgaagagaacacggaactggtgagcgaaggcccagttccctgggtgtcaaaaaactctgtcacatttgtggcggagcaggtgagtcaccaccccccgatcagtgccttttatgccgagtgttttaataaaaagatccagttcaacgcccacatctggacgaaaagtaagttccttgggatgtcgatcggcgtgcataatattggtcagggctgtgtcagttgtctagattacgatgagcactacatcctaactttcccaaacggatatggccggagcattctaaccgtgccatgggtcgaactggggggtgaatgcaatatcaattgttctaagactggttactccgcaaacattatatttcacacaaagcctttttacggcggaaagaaacaccgcatcacagccgaaatcttctcgccaaatgacaaaaagagcttctgttccattgaaggagaatggaacggcgtcatgtatgccaagtacgctaccggagagaatactgttttcgtggacacaaagaagctgcctattatcaagaagaaggtgcggaagttagaagatcagaacgagtatgagtctcgcagtctgtggaaggacgtgaccttcaaccttaagatacgtgatatagatgccgctactgaagcaaaacaccggcttgaggagaggcagcgcgcagaagcgcgggagagaaaagagaaggaaatccagtgggaaacaaggctgttccacgaagacggtgaatgctgggtatacgacgaaccactgctcaaacgcttgggcgccgccaaacattag

SEQ ID NO: 198412 - DNA, 2241 bp, synthetic construct
  misc_feature 1..2241: note = Description of Artificial Sequence: Synthetic coding sequence
  source 1..2241: mol_type = other DNA
atggccagcatcatggagggccccctgagcaagtggaccaacgtgatgaaaggctggcagtataggtggtttgttttggattacaatgctggtctgttaagctattatacgtccaaggataaaatgatgcgaggcagtcgacgggggtgtgtgaggctaagaggagcagtcattggtatagacgacgaagatgatagtactttcaccatcacagtagatcagaagaccttccattttcaggccagggacgcagacgaacgtgaaaaatggatacatgccctggaggagactattctccgccacaccctccagctgcagatatctacaacactggccttcttccagtcatctggaattagccccgtgcttgaattttctaagattatcggactcgatagcggcttcgtgccctcagttcaggactttgataagaaactcaccgaggcagacgcctatctgcagatcctgatcgaacaactcaaactatttgacgataagttgcagaactgcaaggaggatgaacagagaaaaaaaatcgagactctcaaagaaaccaccaacagcatggttgaaagcattaagcattgcatagtactgttacagatagctaagtccacgattaatcctgtcgacgccatttatcagccctcaccacttgagccggtcataagtaccatgccgagccagacagtgctgccgcctgaaccagtacagctgtgcaaatccgaacagagaccctcctccctgcctgtgggccccgtgctggctacactgggccatcaccagacaccaacacccaatagcactggctccggccacagtccccccagctccagcctgacttccccgagtcacgttaaccttagccctaatactgttcccgagttctcctactcaagctcagaggatgagttctatgatgcagacgagtttcatcaatccggcagtagtccaaagcggttgatagattccagtggaagtgctagcgtcctgactcactcatcatctgggaacagtcttaaaaggccagacaccactgagagtctgaatagttcattgtcaaacggcacctcagatgctgatttatttgactcacacgatgacagggatgatgacgcagaggctggctctgtggaggagcacaagagtgtaattatgcacttactctctcaggtacgtttgggcatggatcttactaaggtggtcttgcccactttcatccttgaaagacgtagcctactcgaaatgtacgccgacttttttgcacaccccgacttgttcgtgtccatcagcgatcagaaggatccaaaggaccggatggtgcaggtggtgaagtggtacctcagcgcgtttcatgcaggaagaaagggatcagtcgcaaagaaaccctacaatcccatcctgggcgagattttccaatgccactggacgctgcccaatgacaccgaagagaacaccgaactggtgagtgaaggcccggtgccctgggtcagcaaaaatagcgtaaccttcgtagcagaacaggtcagccatcacccccccatctcagctttctatgctgagtgcttcaataagaagattcagttcaacgctcacatttggacaaagtcaaagtttttggggatgagcataggtgtgcataacatcggccaagggtgcgtgagttgtctcgactatgatgaacattacatacttacctttccaaacggctacggtcggagcatcctgaccgtgccttgggtggaattggggggggaatgcaacattaactgctcaaaaactggatattccgctaatattatctttcacaccaagcccttctacggagggaagaagcatagaatcactgcagagatattcagtcccaatgataaaaaaagcttctgctctattgaaggcgaatggaatggtgtgatgtacgccaaatatgccacaggcgaaaatacggtgttcgtggatacaaagaaactgcccattatcaaaaagaaagtgcgtaagcttgaagaccagaacgaatacgaatccagaagcctgtggaaggatgttacatttaatctgaagatcagagacattgacgcagctacagaggctaaacatcgcttggaggagaggcagcgggctgaggcccgggagaggaaggagaaggaaattcaatgggagacccggttgttccatgaggacggggagtgttgggtctatgatgagcccctgctgaagcgtctgggcgctgcaaagcattag

SEQ ID NO: 198413 - DNA, 2160 bp, synthetic construct
  misc_feature 1..2160: note = Description of Artificial Sequence: Synthetic coding sequence
  source 1..2160: mol_type = other DNA
atggccagcatcatggagggccccctgagcaagtggaccaacgtgatgaaaggatggcaatacaggtggtttgtgctcgactacaatgctggactgctcagttactataccggggccgtgatcggaatcgatgacgaggacgactcgacctttactattacggtagaccagaagacatttcacttccaggccagggacgccgacgaaagagagaagtggattcatgctcttgaggagacgatcctgcgccacacactgcagcttcaggggctcgacagcgggttcgtcccatccgtacaggacttcgacaaaaaactgaccgaggctgacgcctatctccagatcctgatagaacagctcaagttattcgatgacaagcttcaaaattgtaaagaggacgagcaaagaaagaaaatagagaccttgaaggagaccaccaacagtatggttgaatcgatcaaacactgcatcgtactgttgcagattgcgaaagatcagtcaaacgccgaaaaacacgctgacggcatgatttctacaatcaatccagtcgacgctatctaccagccgagccccctggagcccgtcatcagcaccatgcctagtcagaccgtcctgccgcccgagcccgtgcagctgtgcaaatccgaacagagaccctcttccctgccagtcggcccagtcctggctactctggggcaccatcagaccccgacccctaattccaccggatcgggtcactcccctccttccagcagcctgacatccccgagtcacgtgaacctaagcccaaatacagtgccagaattcagttacagttcatccgaggacgagttttatgatgcggacgaatttcatcaaagtggaagctccccaaagcgcctcatcgacagttcgggaagtgccagtgtgctcactcatagctcatctggtaattctttgaagcgtcctgacactacagagagcctcaacagcagcctcagcaacggcacttctgacgccgaccttttcgactcacatgacgatagggacgatgacgcggaggcaggttccgtggaggaacataaatctgtgattatgcacttgctttcacaggtgcgactggggatggatttaaccaaggtcgtcctcccaacctttattttagagcgacgctctttactggagatgtacgccgacttttttgcacacccagatttgtttgtcagcatttccgaccaaaaggaccccaaggaccgcatggtgcaggtcgtcaagtggtatctaagtgcctttcacgcagggaggaagggatccgtggcgaagaagccttacaaccctatcctcggggagatctttcagtgccactggactcttcctaacgataccgaagaaaacactgaactggtgagtgaggggccggttccctgggtttctaagaattctgtgacgtttgttgccgagcaagttagccaccacccacccatttcagcattctatgcagaatgtttcaacaaaaaaattcagttcaatgcacacatatggaccaagtcaaagttcctcggtatgagcatcggtgttcataacattggacaagggtgcgttagctgcctcgactatgatgagcactatattctgactttcccaaacggatacggccggtctattctgacagtaccatgggtcgaactggggggcgagtgcaacattaactgcagcaagactggatactcagcaaacatcatattccataccaaacccttttacggcggtaagaaacacagaattactgcggagatattttccccaaatgacaagaaatccttctgcagtattgaaggagagtggaatggtgtcatgtacgcaaagtatgctacaggtgaaaacactgttttcgtcgacaccaagaagttgcccattatcaaaaagaaggtccggaagcttgaagatcaaaacgagtacgagtcgaggtctctgtggaaagacgttacatttaatctgaaaatacgggacatcgatgcagcgactgaagccaagcacaggttagaggagcgccagagggccgaggctcgcgagaggaaggaaaaggaaatacagtgggaaaccagactgttccacgaggatggcgagtgttgggtctatgatgaacctctgttaaaaagactgggagcggccaaacactag

SEQ ID NO: 198414 - DNA, 1677 bp, synthetic construct
  misc_feature 1..1677: note = Description of Artificial Sequence: Synthetic coding sequence
  source 1..1677: mol_type = other DNA
atggtggagagcatcaagcactgcatcgtgctgctgcagatcgccaagagcactattaaccctgtcgacgccatctaccagccaagcccactggaacctgtgatctctacaatgccaagccagaccgtcctgcctcctgaaccagtccagctatgtaagagtgagcagcgccctagcagtctacccgtaggacccgtgctggccaccctgggtcaccatcagacacctactccgaactccacgggtagtggacacagtcctccatcatccagcctgacatcacctagtcatgtgaacctgagtcccaacaccgtgcctgagttctcatatagcagctctgaggatgagttctacgacgcagatgagtttcatcagagcggttccagtcctaagaggctgattgattcttccggaagtgcgagcgttcttacacattcttcgagtgggaacagcctaaaaaggcccgacaccaccgaaagcctaaattcttccctgtcaaacggtacctcggatgccgacctgtttgatagtcacgacgatagagacgatgatgccgaagccggaagtgtggaggagcataagtctgtgataatgcatttactttcccaagtgcggcttgggatggacctgactaaggtagtgctgcccacatttatattggagcggaggagcctgcttgagatgtatgcagacttcttcgcccacccagacctctttgtgtctataagcgaccaaaaggatcccaaggatcggatggttcaggttgtcaagtggtatctgtcagcttttcacgccggccgtaaaggatcagtggcgaagaagccctacaatcctatcttgggggagatttttcagtgccactggaccttaccaaatgacactgaggaaaacacggagctcgttagcgaaggaccagtcccttgggtgtccaaaaatagtgtgacgttcgtggcggaacaggtgtcccaccacccccccatctccgccttttatgccgaatgctttaataagaaaattcagttcaacgctcatatctggaccaaaagcaaattcctgggcatgtcaatcggcgtgcataacatcggacagggctgtgtctcttgtctggactatgacgagcactacatcttgacattccccaatggctatggtcgctccatccttaccgtgccctgggtggagctgggcggagagtgtaatattaactgcagcaaaacaggatatagtgctaatataatctttcacaccaaacctttctacggcgggaagaaacacagaattaccgccgaaatcttctcgcctaatgataagaagtccttttgcagtatagagggagaatggaatggtgtgatgtatgctaagtacgctacaggtgagaatactgtgttcgttgacacaaagaagctgccgataattaaaaaaaaagtgaggaaattggaagaccagaacgagtatgagtcgagaagtttgtggaaggacgtgacattcaacctgaaaatcagggatatagacgcagctaccgaggcaaagcataggttggaagagagacagcgggcagaggctagggaaagaaaggagaaggaaattcagtgggagacaaggctgttccacgaagacggcgagtgttgggtctatgacgaaccgttgctcaagagacttggggctgcaaaacattag

SEQ ID NO: 198415 - DNA, 99 bp, synthetic construct
  misc_feature 1..99: note = Description of Artificial Sequence: Synthetic coding sequence
  source 1..99: mol_type = other DNA
atggtggagagcatcaagcactgcatcgtgctgctgcagatcgccaaagaccagagcaatgcggagaagcacgccgacggcatgattgtgagtctttag

SEQ ID NO: 198416 - DNA, 1677 bp, synthetic construct
  misc_feature 1..1677: note = Description of Artificial Sequence: Synthetic coding sequence
  source 1..1677: mol_type = other DNA
atggtggagagcatcaagcactgcatcgtgctgctgcagatcgccaaaagtactataaaccccgtcgatgcaatctatcagcccagcccattagaacccgttatcagtactatgccgtcccagaccgtgctccccccggagccagtgcagctgtgcaaaagcgagcagaggccttcctctctaccagttggcccagtgctggccaccttgggccatcatcagacgcccacccccaattccaccggctccggacattcgccgccatcgagttcactgacctcgccctcacacgtaaacctatctccaaacacagtgcccgaattttcgtattcaagcagtgaagacgagttttacgatgctgatgagtttcatcaaagcggttcatctccgaagcgccttatcgactctagtggttccgccagtgtgctcactcatagttcttcaggtaacagcctgaagagacctgacacaaccgagtcattgaacagttctctttcaaatggcacctctgatgctgatctcttcgacagccatgacgaccgagacgatgatgctgaggcaggcagtgtcgaggagcacaaatcggtgataatgcacctcttatcccaggttagactggggatggacttaacaaaagtcgtcctccccacattcattctggaacggagatcactcttagaaatgtatgctgatttcttcgcccacccagacctctttgtcagcatctccgaccagaaggaccccaaagacaggatggtgcaggtggtaaaatggtatcttagcgcctttcacgccgggaggaaagggagtgtggccaaaaagccctacaatcccattcttggagaaatcttccagtgccattggactctgcccaatgataccgaggaaaacaccgagctagttagcgagggcccagtgccttgggtctctaagaattctgtgacctttgttgcggagcaggtttcacaccatcccccgatttccgccttctacgcggaatgctttaataagaaaattcagttcaatgctcacatctggactaagagcaagttcctggggatgtccataggagtacataacatcgggcagggttgcgttagctgcttggactatgatgagcattacatcctcacttttcccaacggctacggtcgttctatcctgaccgtgccttgggtggagctcggcggcgaatgtaatatcaactgttctaaaacaggctattctgccaatatcatatttcatactaagccgttctatggcggaaagaaacatcggataaccgctgagatcttctctcccaacgataagaagagcttctgtagcattgagggggaatggaacggcgttatgtacgctaaatatgcgactggagagaataccgtgttcgtggacacaaagaagctacctattatcaagaagaaggtgagaaaattggaagaccagaacgagtatgaaagtcggtccctgtggaaggacgtgacatttaatctaaagatccgggacattgatgccgctactgaggccaagcacagattggaagagcgacagcgggcagaggcccgagagcgaaaagagaaggagatacagtgggaaactcgcctgttccacgaggatggggagtgctgggtgtatgatgagccgctgttgaagcgcttgggcgctgccaagcactag

SEQ ID NO: 198417 - DNA, 1968 bp, synthetic construct
  misc_feature 1..1968: note = Description of Artificial Sequence: Synthetic coding sequence
  source 1..1968: mol_type = other DNA
atgggctgctgctgctgctggctggtgttcaccgaggcccgggacgccgacgaacgcgaaaaatggatccacgcactggaggagacaattttaagacatacgctgcagctgcagggactcgattctggtttcgttccgagcgttcaagacttcgataaaaaacttacggaagccgatgcgtatttacaaatcttgatcgagcaactgaaactatttgacgacaagctgcagaattgcaaggaggacgaacaaaggaagaaaattgagaccctgaaggaaacgactaacagtatggtggaatctatcaaacactgcattgtactgctgcagattgcgaaatcgactatcaacccggtcgacgcgatctaccaaccttcacccctagaacccgtcataagtactatgccatcccaaacagtgctcccgcccgaaccggttcaactgtgcaaatcagaacaacggccaagttctcttcccgtgggccccgtgttagctactcttggacaccaccagacacctacacccaatagtaccggttcgggacattcacctccctcctcatctctcacctcgccttcgcatgtaaatctttccccgaatactgtgccagaattcagctactcttcgtccgaggacgaattctatgatgccgacgaatttcatcagagcggctcatctccgaagcgcctgattgacagctccggcagtgcctccgtcctgactcattctagctctggcaactcactgaagcgccccgatacaacagaatctttaaacagctccctgagtaacgggacaagcgacgctgatctatttgatagtcatgacgaccgtgatgacgacgccgaggctgggtctgttgaggagcacaagagtgtgatcatgcacttattatctcaggtgcgtctcgggatggacctaactaaggtggtgctgcctacattcattcttgagcgcagatcactgttggagatgtatgcagacttcttcgctcaccctgacctgttcgtgtccatcagcgatcagaaagatccaaaggaccgtatggtgcaggtagtcaagtggtatctgtcggcctttcacgccggacgcaagggatccgttgctaaaaagccctacaaccccattttaggcgagattttccagtgtcattggactctgcccaacgataccgaagagaatactgagctggtctccgagggccctgtgccttgggtgagcaagaacagtgtcacctttgttgccgaacaggtgagccaccatccgcccatatctgctttttacgccgagtgttttaataaaaaaatccagtttaacgcacacatctggaccaagtctaagtttttaggcatgtcaattggagtccacaacatcggacaggggtgcgtgtcatgcctggattacgacgagcattatattctcacttttcccaatggctatggtcggtctattctgacagtgccctgggtggagctcggtggagaatgtaatattaactgctctaaaacaggctacagcgccaatataatctttcatacaaaacctttctacggcggaaagaagcatcggatcaccgcagaaatctttagcccgaatgataaaaaatccttttgctctatagagggggagtggaatggagtcatgtatgccaagtatgccacgggagaaaataccgttttcgtagacacgaaaaagctcccgattataaaaaaaaaggtgcggaagctcgaggatcaaaacgagtacgaaagtaggtcattatggaaggacgtgacattcaacctcaaaatccgggacattgacgctgctaccgaagcaaagcacaggctcgaggagcgacagcgggctgaggctagagaaaggaaggaaaaggaaatacagtgggagacgaggctgtttcatgaggacggcgaatgctgggtgtatgacgagccattgctgaagcggctgggcgccgccaagcactag

SEQ ID NO: 198418 - DNA, 330 bp, synthetic construct
  misc_feature 1..330: note = Description of Artificial Sequence: Synthetic coding sequence
  source 1..330: mol_type = other DNA
atggtggagagcatcaagcactgcatcgtgctgctgcagatcgccaagagcacaatcaacccagtcgatgctatctaccagccttctcccctggaacctgtgatcagcaccatgccgtctcagaccgttcttccgcctgagccggtccagctttgtaagagtgagcagagacctagtagtctccctgtcggcccggtccttgcaaccctgggacaccaccaaacccctacaccaaattcaaccggcagcgggcactcacctcccagctcttctttgacctccccaagtcacgtgaatctgtcaccgaacactgttcccgaattctcgtag

SEQ ID NO: 198419 - DNA, 1170 bp, synthetic construct
  misc_feature 1..1170: note = Description of Artificial Sequence: Synthetic coding sequence
  source 1..1170: mol_type = other DNA
atggagggcgccctggccgccaactggagcgccgaggccgccaacgcatctgctgcaccgcctggcgccgagggaaacaggaccgctggcccaccccgtcgcaatgaagccctggctagggttgaagtcgccgtcctgtgcctgattttactcctggccttatccggcaatgcttgtgtgctcctggctcttaggacgacccgccaaaagcatagccggctttttttttttatgaagcatctgagcattgctgatctcgtggttgccgtgtttcaggtcctgccccagcttctgtgggatattacatttcgattttatggacccgatttattgtgtcgccttgttaagtacctgcaagtcgttggaatgttcgcctccacttatttgctgttattaatgtctcttgacaggtgcttggcaatttgtcagcctttgaggtcactgcggaggcgtactgaccgcctggccgtacttgcaacctggctgggctgcctggtcgcatcggctccccaggtacacattttctctttgagagaggtggccgacggggtgttcgactgctgggctgttttcattcagccgtggggtccgaaggcctatattacctggattacacttgcagtatacatcgtgcccgtcattgtgctcgctgcgtgctacgggttaatatcatttaagatctggcagaatcttaggttgaagaccgcagcggctgccgcggctgaggcccctgagggggccgcggcaggggacgggggcagggttgcattggcaagagttagtagtgttaagctgattagtaaagccaaaatcaggaccgttaagatgacgttcattatcgtgttggcattcatcgtgtgctggactcctttcttctttgtgcaaatgtggtccgtttgggacgcaaatgcaccaaaagaagcatcagcttttatcattgtgatgctgctcgcctccctgaactcatgctgtaatccttggatttacatgcttttcaccggtcatcttttccatgaattggtccagcggtttctttgttgctcagcatcctatttaaaaggacggcggcttggcgaaacctcagcgtctaaaaaaagtaactccagctcctttgtgttaagccacagaagctccagccagcgcagctgcagccagccctcaactgcctag

SEQ ID NO: 198420 - DNA, 132 bp, synthetic construct
  misc_feature 1..132: note = Description of Artificial Sequence: Synthetic coding sequence
  source 1..132: mol_type = other DNA
atggagggcgccctggccgccaactggagcgccgaggccgccaacgcttcggccgcgccgcctggcgcagaagggaacaggacggctgggcctccccggcggaacgaggccctggccagggtcgaggtgtag

SEQ ID NO: 198421 - DNA, 279 bp, synthetic construct
  misc_feature 1..279: note = Description of Artificial Sequence: Synthetic coding sequence
  source 1..279: mol_type = other DNA
atggagggcgccctggccgccaactggagcgccgaggccgccaacgcatctgcagcacccccgggcgctgagggaaacagaactgccggtccccccaggcgtaacgaggcgctggcgagagtcgaagtggctgttctgtgccttatactcttgttagccttaagtggcaacgcctgtgtgttattggccctgcggacgaccaggcagaagcacagtagattgtttttttttatgaaacacctgagcatagcagatctcgtagtagccgtcttccagtag

SEQ ID NO: 198422 - DNA, 1518 bp, synthetic construct
  misc_feature 1..1518: note = Description of Artificial Sequence: Synthetic coding sequence
  source 1..1518: mol_type = other DNA
atggccagcggccggcgggccccccggaccggcctgctggagctgagagccggggccggctccggagccggcggagaaagatggcagagggtgttgctgtcactggccgaggatgtgctaacagtgtcccctgcagacggtgatcccggtccggaaccaggtgcacctagggaacaggagcctgcacagttgaatggggccgccgagcctggagctggcccccctcagctaccggaagccttgttactccagagacgaagggtcaccgtcaggaaggctgatgctggaggactggggattagtattaagggaggaagggaaaacaaaatgcccattctcatttccaagatattcaaaggactagcagccgaccaaactgaggccctattcgtgggcgacgctatcctgtctgttaatggcgaagatctatcctcagccacacacgacgaagcagttcaggtcttgaagaagaccggcaaagaggttgtgctggaggtgaagtacatgaaggacgtaagcccctattttaagaattcaacaggaggcaccagcgtaggatgggattcccccccagcctctcccctgcaacgacagcccagtagcccgggcccgacaccacggaatttcagtgaagccaagcatatgagtttgaagatggcttatgtgagcaaacggtgcacccccaacgaccccgaaccaagatacttggaaatctgttcagctgatggtcaggatactctgtttctgagggccaaggatgaggcctccgcacgaagctgggctacagccattcaagcccaggtcaacactctcactcccagagtaaaagacgagttacaggctctcctggcagctaccagtactgcaggctcccaagatatcaagcagatcggatggctgaccgagcaacttccgagcggtggcactgcaccaacactcgctctactgacggagaaagagctgttgttgtatctgagccttcctgagacacgcgaggcacttagccgaccggctaggactgccccgctgatagctaccaggttagtgcatagcggcccatctaagggaagcgtgccctatgacgcagagctttcttttgccttgaggaccgggactcgacatggcgtcgatacccatctcttcagcgttgagagcccccaggagctcgctgcctggacccgccagcttgtcgatggttgtcatagagcagccgagggtgtgcaggaggtttctaccgcttgtacgtggaacggtcgtccgtgtagtctcagtgtccacatcgataagggcttcacactgtgggctgccgagcccggcgctgctcgggccgttctcctgcggcagcctttcgagaagctacagatgagttctgatgatggagcttctttgctctttttggactttgggggtgctgagggtgagattcagttggatttgcactcgtgccccaagacgatcgtctttataattcactcatttttgtccgcgaaagtgacccgcctcgggctgcttgcttag

SEQ ID NO: 198423 - DNA, 441 bp, synthetic construct
  misc_feature 1..441: note = Description of Artificial Sequence: Synthetic coding sequence
  source 1..441: mol_type = other DNA
atgggcttcctgcggcggctgatctaccggcggcggcccatgatctacgtcgagtctagcgaggagtcctcagacgaacagcctgacgaagttgaatctccaacccaaagccaggattctactcctgccgaggaacgcgaggatgagggcgcctcggcagcgcagggccaggagcctgaagctgactcgcaggaattggtgcagccaaaaacagggtgtgaactaggcgacggacccgacaccaagcgcgtttgtttacgcaatgaggagcagatgaaacttcccgcagagggacccgagcccgaagccgacagccaggagcaggtccatccaaaaaccggatgcgagcgtggcgacgggccagatgtccaggagttgggcctccccaacccggaggaagttaaaactcccgaagaagacgagggacagagccagccatag

SEQ ID NO: 198424 - DNA, 336 bp, synthetic construct
  misc_feature 1..336: note = Description of Artificial Sequence: Synthetic coding sequence
  source 1..336: mol_type = other DNA
atgagcgagctgctgcgggcccggagccagagcagcgagcggggcaacgaccaagagtcatcccagcctgttggcagtgtcatcgtgcaggagcccactgaggaaaagcggcaggaagaggaacccccaacagacaaccagggtatcgccccctccggcgaaattgagaatcaggccgtgccagctttccagggaccagacatggaggcctttcagcaagagctcgccctcctgaaaattgaggacgaacccggggatggccctgacgtgagagagggtataatgcccaccttcgacctaacaaaggtcttggaggctggcgacgcccagccttag

SEQ ID NO: 198425 - DNA, 195 bp, synthetic construct
  misc_feature 1..195: note = Description of Artificial Sequence: Synthetic coding sequence
  source 1..195: mol_type = other DNA
atgagcgagctgctgcgggcccggagccagagcagcgagcggggcaacgaccaggaaagttctcaacctgtcggcagcgtgatagtgcaggagcccacagaagagaaaagacaggaggaggagccacccactgacaaccagggcatcgccccatctggcgagatcgaaaatcaagctgtcccagctttccagtag

SEQ ID NO: 198426 - DNA, 342 bp, synthetic construct
  misc_feature 1..342: note = Description of Artificial Sequence: Synthetic coding sequence
  source 1..342: mol_type = other DNA
atgagcggccaccagcggacccggagccggagccgggagcggcgggacgatcaggacagcaatcaccccgtgggcgcagtggtggcccaggagctgcccagcaatgatcagctgcagcaagaggagccacccattgagagccaggactatactccagggcaggaacgtgatgagggcgccttggactttcaagtgctcggcttggctgcttacctgtgggagcttaccaggagcaaaactgggggagaaagaggagacggcccaaatgtgaaaggggaattcctgcccaacctcgagcctgtgaagatcccagaagccggcgaggggcagcccagtgtctag

SEQ ID NO: 198427 - DNA, 342 bp, synthetic construct
  misc_feature 1..342: note = Description of Artificial Sequence: Synthetic coding sequence
  source 1..342: mol_type = other DNA
atgagcggccaccagcggacccggagccggagccgggagcggcgggacgaccaggattccaaccatcctgtgggtgccgtggtggcacaagaacttccttcaaacgaccagcttcagcaagaagaacctcccattgagtcccaggattacacaccagggcaggaacgagacgagggcgctctggatttccaggttcttgggctagctgcctacctgtgggagttgacaaggagtaaaactggaggcgaaaggggtgatgggcccaatgtgaagggcgaatttctgccaaatttagaacccgtgaaaataccagaggccggcgagggccagccatcagtgtag

SEQ ID NO: 198428 - DNA, 1458 bp, synthetic construct
  misc_feature 1..1458: note = Description of Artificial Sequence: Synthetic coding sequence
  source 1..1458: mol_type = other DNA
atggccgccgtgtggcagcaggtgctggccgtggacgcccggtacaatgcatacagaacacctacattcccacaattcagaacccagtacatccgcagacgttcccagttgctgcgggaaaacgcaaaggctggccatccccccgctctacgtcgacagtacctgaggctacggggccaattactgggacaaaggtatggccctctgagtgaacccggctccgcaagagcctacagcaattccatagtcaggagctcaagaactacattggatcggatggaagattttgaagatgatccccgggctcttggagcgcgcggacatcgcagaagcgtgtcacgaggttcctatcagctgcaggcacagatgaatcgggcagtctacgaagatcgaccacctggatcagtagtgccaacatccgcagcagaggcctcacgcgctatggccggggatacttccttatccgagaattacgccttcgccgggatgtaccacgtttttgaccaacacgtagacgaggcagtccctcgggtgaggtttgccaatgatgatagacaccgcctcgcgtgctgcagcctggacggttctatatccctctgccagcttgtgcccgccccccctacagtcctcagagtgctgagagggcacacccgaggcgtgtccgacttcgcgtggagcctgtcaaacgacatcctcgtgtctacttcgctcgacgctacaatgcggatctgggcctcagaagatggtcgctgtattcgggaaatccctgacccagattccgccgagttgttgtgctgcacgttccagcctgtgaataacaaccttaccgtagtcgggaacgccaagcacaatgttcacgtgatgaatattagtacaggtaagaaggtcaaaggcgggtcaagtaaattgacaggacgggttcttgcactatccttcgacgccccgggacggttactgtgggcaggagatgaccatggctctgtgttctcctttttgttcgatatggccaccggaaaactcactaaggccaagcgtctggttgtccacgagggatcccccgtcactagcatctccgcgcggagctgggtgtctcgagaagcccgggatcctagcctgctcattaatgcttgcctcaataagcttctgctgtaccgtgtggtcgacaacgagggtactctccaactgaagaggagttttcctatagagcagtccagtcacccggtgcgaagcatcttttgccccctgatgtcgttccgacagggggcctgtgtggtcaccgggtcggaggatatgtgtgtgcacttcttcgacgttgaacgagccgccaaggccgccgtgaataaattacagggacactcagccccagttctcgacgtgtcattcaactgtgatgaatcgctattggcgtcatcagacgcctccggcatggtgatcgtgtggcgacgtgaacaaaagtag

SEQ ID NO: 198429 - DNA, 309 bp, synthetic construct
  misc_feature 1..309: note = Description of Artificial Sequence: Synthetic coding sequence
  source 1..309: mol_type = other DNA
atgagcgcccgggtgcggagccggagccggggccggggcgacggccaggaagctccagatgtcgtcgctttcgtggcgcctggtgaatcgcagcaggaagagcctccaacggataaccaggacattgagcccgggcaggaaagggaaggtacgccccccattgaagagcgtaaagtggagggcgattgccaggagatggatctggagaaaactcgcagcgagcggggagatggctccgacgtgaaggaaaaaactccgccgaatccaaaacacgccaagacaaaagaagctggggatgggcagccctag

SEQ ID NO: 198430 - DNA, 1575 bp, synthetic construct
  misc_feature 1..1575: note = Description of Artificial Sequence: Synthetic coding sequence
  source 1..1575: mol_type = other DNA
atgagcgacaacggcgagctggaggacaagccccccgccccccccgtccgtatgtcttctactatcttcagtacaggtggtaaggatcctctgtcggccaatcattccttgaaacctcttccctctgtgcccgaggagaaaaaacccagacataagattattagcatttttagcggtactgaaaagggctccaaaaagaaggagaaagaacgccccgagatatcaccgccctcagatttcgaacatactattcacgttggtttcgacgcagtaacgggggagtttactggcatgccagagcagtgggcgcgcctcttgcagactagtaatatcacaaagttagagcagaagaagaacccccaagccgtgctggacgtgctgaaattctacgattctaataccgtgaagcaaaaatacttaagcttcactcccccagagaaggatgggttccccagtggcacccctgccctcaatgcaaagggcactgaggctccggccgtggtgaccgaggaggaagatgatgatgaggagaccgctccgccagtgatagccccaagaccagatcataccaagagcatctatacccgcagtgtaattgatcctgttccagcccccgtcggcgatagccacgtggacggcgctgctaagtccctcgataagcagaaaaagaaaacaaagatgactgacgaggagataatggaaaagctgcggacaatcgtgagtatcggagatccgaagaagaaatatacgagatacgaaaaaatcggccagggggcaagcggcacggtgttcacagccactgatgttgccctgggacaagaggtcgctattaagcagatcaacctgcagaagcagccaaaaaaggaacttattattaacgagattctcgtgatgaaggagctgaaaaaccctaatattgtgaactttttggatagctatctggtgggcgatgaactgttcgtagtgatggaatacctcgccggggggagtctgacagatgtggtaacagagacttgtatggatgaagctcagattgctgctgtgtgtagagaatgtttgcaggcactggagtttctgcacgctaaccaggtgatccacagagacattaaaagcgataacgttctgctgggtatggagggcagtgtgaaactgacagacttcggtttctgtgcccagatcaccccagagcagtcaaagagaagcactatggtgggtaccccgtactggatggctcctgaagtggtgaccaggaaggcttatggacccaaggtggacatttggtcacttgggatcatggctattgagatggtggagggagagcccccatacctgaacgagaatcccctgcgagcactgtacctcattgctacaaacgggacacccgaactgcaaaacccagagaagttgagtccaatctttcgggacttcctgaatcgatgccttgaaatggacgtggagaagcgtggtagcgccaaagagcttttgcagcaccctttcctgaagctggccaagcccctctcctccctgacccccttgataatggcggcgaaagaagctatgaagtcaaacagatag

SEQ ID NO: 198431 - DNA, 1680 bp, synthetic construct
  misc_feature 1..1680: note = Description of Artificial Sequence: Synthetic coding sequence
  source 1..1680: mol_type = other DNA
atgagcgacggcctggacaacgaggagaagccccccgccccccccttgagaatgaatagtaacaatcgcgatagttccgccctgaatcattcttctaaacccctaccaatggcccctgaggagaaaaataagaaggcccgtctgaggtccatttttcctggaggtggggataagacaaataagaagaaagagaaagaacggccagaaatatctctgccctctgactttgaacacacaatccatgtgggctttgatgccgtgacaggagagtttacacctgacctctatggcagccagatgtgccccggcaagcttcccgaaggaatcccagagcagtgggcccgtctgctgcagacttccaacatcacaaagctggagcagaaaaagaacccgcaggccgtgttggacgtgctgaaattctacgatagcaaggagacagtgaataatcaaaagtacatgtctttcactagtggggataaatcggcgcacggttatattgctgcgcatcctagttccacgaagaccgcaagtgagcctccgctggcgccccccgtgagcgaagaagaggacgaggaggaagaggaggaggaagacgaaaatgaacctccccctgtcatcgctcctcgccctgagcatactaagagtatttacacacgcagtgtggtggaatctatcgcctcaccggccgtccccaataaagaagtaactcctccaagtgcagaaaatgcaaactcgtcaactctgtacagaaacacggacagacagaggaagaagagtaagatgaccgacgaggaaatactcgagaagcttagaagtatcgtcagtgtcggggacccaaaaaagaaatacacacgcttcgagaagattgggcagggggcctctggaacagtatataccgccttggacattgccacaggccaggaggttgccataaagcagatgaacctgcagcaacaaccgaagaaggagctgataattaatgagatcctcgtgatgcgtgagaacaaaaaccccaatatagtcaactacttagacagctaccttgtcggtgacgagctgtgggtagttatggagtatctggccggcggttctctcaccgacgtggtgaccgaaacctgtatggacgagggtcaaatcgccgccgtctgcagagagtgtctgcaagccctagactttctgcatagcaatcaggtcatccatagggacatcaaatcagacaacattttactgggtatggacggcagcgttaagctgacagatttcggcttttgtgcacagatcacacccgagcagtcgaaaaggtcaacaatggtcgggaccccgtactggatggctccggaggtcgtgactcgtaaagcatatggccccaaagttgatatatggtcgctgggcataatggctattgaaatggtggagggggaacccccttatctgaatgagaaccccctgcgggccttatatctcatcgcaactaatggcactccggaacttcagaacccagagaggctgagcgctgtcttcagggattttcttaatcggtgcctggagatggacgtcgatcgccgtggatctgctaaggagttgctccaacacccgttccttaaactcgccaaaccgttatcaagcctcactcctctcatcatcgccgccaaggaggccatcaaaaatagttccagatag

SEQ ID NO: 198432 - DNA, 1743 bp, synthetic construct
  misc_feature 1..1743: note = Description of Artificial Sequence: Synthetic coding sequence
  source 1..1743: mol_type = other DNA
atgagcgacggcctggacaacgaggagaagccccccgccccccccttacgaatgaacagtaacaaccgcgactcatcagccctgaaccacagcagtaagccactgcccatggctccagaggaaaagaacaagaaagcccggctgcgctcaatctttcctggggggggcgacaagaccaacaagaagaaggagaaggagcggcctgagatctccctgcccagcgatttcgagcacaccatccacgtgggcttcgacgccgtaacaggtgaatttacaaattctccctttcaaaccagccgtccagtgaccgtggccagctcccagtctgaaggcaagatgcccgacctctacggctctcagatgtgtcctggcaagttgccggaaggcattccagagcagtgggcaagattgctccaaacctccaacatcacaaagcttgaacaaaaaaaaaatccccaggcagtgttagatgtgctcaagttctacgacagtaaggagaccgtaaacaaccaaaagtacatgtctttcacttcaggggataaatctgctcacggatacatcgccgcccatccgtcctccacaaaaactgcctcagaaccgcccctagcacccccggtttctgaagaggaagacgaagaagaagaagaggaggaggacgagaatgagcctcctccggttatagccccacgtcccgaacacacaaagagcatttatacaaggagcgtggttgagagtattgcctcacctgcagtcccaaataaagaagtgaccccacctagcgcagaaaacgctaatagctctactttgtacagaaatactgacagacagagaaagaagtcaaagatgacagacgaggaaatcctcgaaaagctgcgctccattgtttctgtgggggaccccaaaaaaaagtatacccgcttcgaaaaaatcggtcagggagcaagcgggactgtgtataccgctctcgatattgcgaccggacaagaggtggccatcaagcaaatgaatctccagcaacagcccaagaaggagctgatcatcaacgaaattctggtgatgagggagaacaaaaatcctaatatcgtaaattatttagactcctatctggtgggtgacgagctttgggtggtgatggaatatctggccggaggatcgcttacggacgtcgtcacagagacatgtatggatgagggacagatcgccgccgtttgtagagagtgtctccaagcgctggatttccttcattcaaatcaggttatccaccgcgacatcaaaagcgataacattcttcttgggatggatggatctgttaagctcacggattttgggttctgcgctcagatcacccctgagcaatctaaacgcagtaccatggtgggcacaccctattggatggcccccgaggtcgtgaccaggaaggcctacgggcctaaggttgatatctggagtctgggcattatggcaattgagatggtcgagggggagcctccctacttaaatgagaatcctctgagggcactgtaccttatcgcaacaaatggtactcccgaacttcagaacccggaacgcctgagcgctgtgtttagggatttcttgaaccgctgtttggagatggacgttgatcggaggggctctgccaaggagttgttgcagcacccctttcttaaactggcaaagccgctctcatctctcaccccactgattattgccgccaaagaggcaattaaaaactcttcacggtag

SEQ ID NO: 198433 - DNA, 1635 bp, synthetic construct
  misc_feature 1..1635: note = Description of Artificial Sequence: Synthetic coding sequence
  source 1..1635: mol_type = other DNA
atgagcgacggcctggacaacgaggagaagccccccgccccccccttacggatgaatagtaataacagagattcatctgccctcaaccattcctccaaacccttgcctatggccccagaggagaagaacaaaaaggcgagactgcgctccatctttcctggaggaggtgataagaccaacaaaaaaaaagagaaagaacgtccagagatatcactcccaagcgactttgagcacactatccacgtgggttttgatgccgtcacaggagagttcactggaatccccgaacagtgggcgcgactcttgcagaccagtaatatcactaagcttgaacagaaaaaaaatccacaggctgttctggacgtgctgaaattctacgactcaaaggaaacggtgaataatcaaaagtacatgtcattcacctcaggagacaagtcagctcatggctatatcgctgcacaccccagctccacaaaaaccgcgtccgaaccgcctttggcccccccagtcagcgaagaagaggatgaggaagaggaggaggaggaggatgagaacgaaccaccacccgtcatcgcaccacgaccagagcacaccaagtccatatatacccgctctgttgtcgaaagcatcgcttcaccagccgtcccaaataaggaggtgactcccccttcagccgagaacgcaaactcatcaaccctttaccgtaataccgacaggcaaagaaagaagtccaagatgactgatgaagaaattctcgagaaactccgctccatcgtgtccgttggtgatcctaaaaaaaaatatacccgatttgagaagatcggtcagggagcctctggcactgtgtatactgcgctggacattgcaacaggccaggaggtggcgattaagcagatgaatcttcagcagcagcccaagaaagagctgatcattaacgagattctggtgatgcgggaaaacaaaaatcctaacattgtgaattatctggactcatatttggtcggggatgagttgtgggtggtgatggagtatctggctggcggttccctgaccgatgtggtaaccgagacatgtatggacgaggggcagatcgcagccgtgtgccgggaatgcctgcaggccctggatttcctgcacagcaatcaggtgattcacagagatattaaatccgacaacatcctactggggatggatggcagtgtcaaactgacagacttcggcttctgcgcccagataactcctgagcaaagcaagcgctcaacaatggtcggaacgccctactggatggcaccagaagtggtgacacgtaaggcctacggcccaaaggttgatatctggtctctagggatcatggctatcgagatggtggagggagaacccccttacttaaatgaaaatcccctgcgcgccttatatcttatcgccaccaacgggacaccagagctccaaaatcccgagcgacttagcgccgtgttccgggacttcctcaacaggtgtctggagatggacgtggaccgcagaggatcagctaaggaactactacaacaccctttcttgaaactggcgaagccactgtcaagcctaacacctttgatcatcgctgccaaggaagccatcaaaaatagttctagatag

SEQ ID NO: 198434 - DNA, 1680 bp, synthetic construct
  misc_feature 1..1680: note = Description of Artificial Sequence: Synthetic coding sequence
  source 1..1680: mol_type = other DNA
atgagcgacggcctggacaacgaggagaagccccccgccccccccctgcgtatgaactccaacaatagggactcctccgcactgaaccatagtagcaaaccattgcctatggcaccagaggagaagaataagaaggcccggctccgatctatctttcccggcggtggcgacaaaacaaacaaaaagaaagagaaggagcgtcccgaaatcagcctgccaagcgacttcgagcacaccatccacgtcgggttcgatgctgtgactggggaattcacacctgacctttatggatcgcagatgtgtcccggcaagctgcctgagggaattcccgaacaatgggctcgattactccagacttctaacattacgaaactggagcagaagaaaaaccctcaggctgtgctggatgtcctgaagttttacgactctaaggaaaccgtgaacaaccagaaatacatgagcttcacatctggcgacaaaagcgctcatgggtacatcgctgcccacccttccagcaccaaaaccgcatcagaaccaccactcgcccctcctgtgagcgaagaggaggatgaggaagaggaggaggaagaggatgagaacgaacccccacctgtcatagcccccagaccggagcacacaaagagcatctatacgcgctctgtggtcgagtctattgccagtccggcagtgcctaataaagaggttaccccgcctagtgccgaaaacgccaactcatctaccctgtatagaaacaccgaccgccagcggaagaaaagcaagatgacagacgaagaaattctcgagaagctaagatctattgtgtcagtaggtgaccctaagaagaagtacaccaggttcgagaaaatcgggcagggcgcaagcgggaccgtgtataccgcgctcgatatcgctacaggccaggaagttgccattaaacagatgaacttacagcagcagccgaagaaagagctgattattaatgagattttagtcatgcgggagaacaaaaatccaaatatcgtgaactacttggacagttacttggtcggcgatgagctgtgggtggtgatggaatacctcgccgggggatcgctcacagacgtcgtcaccgaaacctgcatggacgagggtcagatcgctgccgtgtgccgcgagtgcctgcaggctctggacttcttgcattccaaccaggttatccatcgagacatcaagagcgacaatattctgctgggtatggacggttccgtaaagcttacagatttcgggttctgcgcccagataacaccggaacaaagcaagaggagcacaatggtggggacaccctactggatggcccctgaagtagtgactaggaaagcctacggtccgaaggtcgatatctggtcccttggaattatggccatcgaaatggtggaaggcgagcctccctatttgaatgagaacccacttcgcgccctgtatctaatagcaacgaatggcaccccagaacttcaaaaccccgagaggctcagtgccgtgttcagagattttctgaatagatgcctggaaatggatgtggatcgcagaggaagcgctaaggagctactgcagcatccctttctgaagttggccaagccactgtcatcccttacgccgctgatcattgctgctaaggaggcaattaaaaacagctctcgctag

SEQ ID NO: 198435 - DNA, 1698 bp, synthetic construct
  misc_feature 1..1698: note = Description of Artificial Sequence: Synthetic coding sequence
  source 1..1698: mol_type = other DNA
atgagcgacggcctggacaacgaggagaagccccccgccccccccttgcgcatgaacagcaataaccgggattcctcagcactgaatcacagtagtaagccgcttcccatggcacccgaggagaagaacaagaaagctcgattacggtctatcttcccgggtgggggagataaaactaataagaaaaaagagaaagagcgacctgagatctcacttcctagcgactttgagcacactatacatgtgggattcgatgccgtcaccggcgaattcaccaatagcccattccaaacatctagacccgtcactgtggctagctctcagtcggagggaaagatgggcattccggagcagtgggcaaggctgctgcagacatccaacataactaaattagagcagaagaagaacccccaggcagtgctcgacgtcctcaaattctacgattcaaaggagactgttaataatcagaagtacatgtcttttacgagcggtgataagagcgcacatggttatattgctgcacacccaagcagcacaaaaacagcttcagaacccccattggctcctcctgtgagcgaggaagaggatgaggaggaggaagaggaagaggatgagaatgaacccccccctgtgatcgcccctcgtccggaacacactaagtccatctacacccgctccgttgtcgagtcaatcgcctcacctgcagtgccaaataaggaggtaacgccgccctccgccgagaatgcaaattccagcacattgtatagaaacaccgatcgccagcggaagaagagcaaaatgacagatgaagagattttagagaagctgcggtccattgtttcagtgggagacccaaagaagaagtatacccggtttgagaagattggccaaggcgcttcaggcaccgtgtataccgcccttgacatcgccaccggacaagaggttgcaataaagcagatgaacctgcagcagcagccgaaaaaggagctgatcataaatgaaatcctcgtgatgcgagaaaataaaaaccccaatatcgtgaactatcttgactcatacttggttggagatgagctctgggtggtcatggagtacctggctggtggaagcttgacggacgtggtcacagagacctgcatggatgagggccagatcgctgctgtctgtagggaatgcctacaagcccttgatttcctacactcgaatcaggtgatccatcgagacataaagtccgacaacatattactgggtatggatggatccgtgaagctgactgacttcggcttctgcgcccaaataacaccggaacaatctaagagaagcactatggtggggaccccttactggatggcccccgaggtagtgacaagaaaagcatacggacccaaagttgacatctggagcctaggaataatggctatcgagatggtggaaggcgagcccccttacctcaatgaaaatcccttgcgggcactctatctaatagccactaatggtactccagagctgcagaaccctgaaaggctcagtgccgtgtttcgggattttctgaatcgctgtctggaaatggatgtggaccggcggggtagtgcaaaggagctgctgcagcaccccttcctgaaattggcgaaaccactcagttcactcactcccctaatcattgccgcgaaagaagccataaaaaattcatcccggtag

SEQ ID NO: 198436 - DNA, 1635 bp, synthetic construct
  misc_feature 1..1635: note = Description of Artificial Sequence: Synthetic coding sequence
  source 1..1635: mol_type = other DNA
atgagcgacggcctggacaacgaggagaagccccccgccccccccttgaggatgaattcaaataatcgtgacagcagcgcactgaatcattcctccaagcccctccccatggcccctgaggaaaaaaacaaaaaggcaagactgaggtcaatattccctggcggcggggacaagactaataaaaagaaggaaaaggagcgtccagagatatcattgccctcagattttgaacacacaatccacgtgggcttcgacgccgtcaccggcgaatttacgggaattcccgagcaatgggcgcgcttattacagacatcgaacattaccaaactcgagcaaaagaaaaacccacaggccgtgctcgacgttttgaaattctacgactccaaggagactgtgaataatcaaaaatatatgagctttacgagcggggataaaagtgcgcatgggtacattgctgcccatccatcttctaccaaaaccgctagtgagcctccactagctcccccagtctccgaagaggaggacgaggaggaagaagaagaggaggatgagaatgaacctccacccgttatagctcccaggccggaacacaccaaatcaatttatacccgttcagtcgtggagagtattgcctcccctgcagtgcccaataaggaagtgacacctcccagcgctgaaaacgcaaattcctccactctgtatcggaataccgatagacagagaaagaagagcaagatgaccgatgaagagattctggagaagctccgatctatagttagtgtgggagacccaaagaagaaatacacgcgttttgagaagattggccagggggcttccggtacggtctacaccgccttggatatagcaaccggtcaggaagtggctataaaacagatgaatcttcaacagcaacccaagaaggagctgatcataaacgaaatccttgttatgagagagaacaagaaccccaacatcgtaaattatcttgattcatatctcgtaggcgacgagctttgggtcgtcatggagtacctggcgggtggcagccttacagatgtggttaccgaaacctgcatggacgaggggcaaatcgcagcagtgtgcagagaatgcctgcaggccctggattttctgcattctaatcaggttattcatagggatattaaatcagacaatatcctcttgggaatggacggatccgtgaagctcactgacttcggtttttgcgcccaaataacaccagagcagagcaagcggagcaccatggtgggaactccttactggatggcccccgaggttgttacccgcaaagcctacggccccaaggtcgatatatggtcgctgggtatcatggctatcgaaatggtggagggagaacccccttaccttaacgagaatccgttgcgggccttgtacctgatagctactaatggcaccccggaacttcagaatcccgaacgtctgtccgccgtgtttagggattttctgaaccgctgccttgagatggatgtagaccggagaggttccgctaaagagcttttgcaacacccattcctgaagctagcaaagcctctctcctctcttaccccgctcattatagccgcaaaagaggccataaagaactcctccagatag

SEQ ID NO: 198437 - DNA, 546 bp, synthetic construct
  misc_feature 1..546: note = Description of Artificial Sequence: Synthetic coding sequence
  source 1..546: mol_type = other DNA
atgagcgacggcctggacaacgaggagaagccccccgccccccccttgagaatgaactcaaacaaccgggactcctccgcattgaaccactcgagcaagccacttcctatggctcccgaggagaaaaacaagaaagccagacttaggagtatcttcccgggcggtggtgataaaacaaacaaaaaaaaagaaaaggaacggcccgagatcagcctgccctccgatttcgagcatacgattcacgttggtttcgatgctgtcactggcgaattcaccaactcgccatttcagacgtcacgcccagtaactgtagcatcaagtcaaagcgaaggaaagatgcccgacctctacgggagccagatgtgccccgggaaactgccagaggggattcccgagcagtgggccagactgctgcagaccagtaacattactaagttggagcagaagaaaaatccgcaggccgtcctagatgtcctcaagttctacgatagcaaagagactgtgaacaatcagaagtacatgtcattcacttctggtgataagtag

SEQ ID NO: 198438 - DNA, 1635 bp, synthetic construct
  misc_feature 1..1635: note = Description of Artificial Sequence: Synthetic coding sequence
  source 1..1635: mol_type = other DNA
atgagcgacggcctggacaacgaggagaagccccccgccccccccctgcggatgaattccaataaccgagacagcagtgccctgaaccacagcagcaagcctttaccaatggcccctgaagagaagaataagaaggcacgcttgagatctatcttccctggaggtggggataaaaccaacaagaaaaaagaaaaggaacgccctgaaatcagtctgccctctgattttgagcacaccattcatgtggggtttgacgcagtgacaggagaatttacgggcatacccgaacagtgggcaaggttactccagacatcaaacatcacgaagctggaacagaaaaagaaccctcaggccgttctggatgtgctgaaattttatgattccaaagagacggttaataatcagaagtacatgagcttcacttctggggacaagagtgcgcacggatacatcgcggcccacccatcatccaccaagaccgcttctgaacccccactggcaccccccgtgagcgaagaagaggacgaggaggaagaggaggaagaagacgaaaatgaaccacctcctgtcatagcaccgaggccagagcataccaagtctatatatacaaggtcagtggtggagtctatcgccagccctgccgtgcctaataaagaggtgacgccaccaagcgcagagaacgcgaactcttcaacactctatcggaacaccgaccggcaaagaaagaagtccaagatgaccgatgaggaaatcctcgagaagttgcgctcaatagtctccgtaggggacccaaagaagaagtatacccggtttgaaaaaattggacagggcgcgagcggtacagtgtatacggctctagacatcgcgacaggtcaggaggtagctatcaagcaaatgaacctgcagcagcagcccaagaaagaattgattattaacgaaatcctggtaatgcgggaaaacaagaaccctaacattgttaattacctcgatagctatttggtcggtgatgagctgtgggtggtcatggagtacctcgcgggtggctctctgacagacgtagtaacagaaacctgtatggacgaaggacagatcgccgccgtgtgccgcgaatgtttgcaagcactagattttctccactctaatcaggtgattcacagggacatcaagagtgacaatatcttacttggaatggacgggtccgttaaactcaccgatttcggcttttgtgcccagatcactccagagcagtctaaacggtccaccatggtgggcaccccctattggatggctcccgaggtggtcactcgtaaagcctatgggcccaaggttgatatttggagtttggggattatggccattgagatggtcgaaggcgagccaccatatctgaatgaaaacccactgagggccctgtacttgattgcgacaaatggtacgcccgagctgcagaacccagagcgactaagtgcggtgttccgcgacttcctgaacaggtgcctggaaatggacgtggacaggaggggaagcgctaaggaactgttacagcacccgttcctgaagctcgcaaagcctctgtcaagccttactcctctgattatcgccgctaaagaggccattaaaaacagttcacgctag

SEQ ID NO: 198439 - DNA, 1743 bp, synthetic construct
  misc_feature 1..1743: note = Description of Artificial Sequence: Synthetic coding sequence
  source 1..1743: mol_type = other DNA
atgagcgacggcctggacaacgaggagaagccccccgccccccccctcagaatgaattccaacaatcgggactcttccgctctgaatcatagttccaaaccactgccaatggcgcctgaagagaagaataagaaggcgcggctgcgctcgattttccccgggggaggggataagacaaacaagaagaaggaaaaagagcggccagagatcagtctccctagcgactttgaacatactatccatgtggggttcgacgctgtgacaggagaattcactaactccccatttcagacttctcgtccggtcacagtggcgagttctcagagtgaaggcaagatgcccgatctgtacggaagtcagatgtgtcccggtaagctgccagagggaataccagaacagtgggccaggctgctccagaccagtaatataaccaagctcgaacagaagaaaaaccctcaagcagtcctggatgtattgaaattttatgactcgaaagagaccgtcaataaccagaagtacatgtcattcacttctggagacaagagcgcccacggctacatcgcagcacatccctcatccaccaagacagccagcgagcccccactcgccccgccggtcagcgaggaagaagatgaagaggaggaagaggaggaggatgagaatgaaccaccaccagtcattgcgccccggcctgagcataccaagagcatttacactcgatcagtggtcgagtcgatcgctagccccgctgtacccaataaggaggtgacccccccttcagcggagaatgctaacagttctaccctctaccgaaacaccgaccgacaacgaaagaaatccaagatgacagacgaagagattctggaaaagctgcgcagcatcgtttctgtcggggatcctaagaaaaagtacacgcggttcgagaaaatcggtcagggcgccagcgggactgtatatactgccctggatattgccacaggacaggaggtggctatcaagcagatgaatctgcagcagcaacctaagaaagagctcatcataaatgagattctggtaatgcgggaaaataaaaatccgaatattgtgaactacctggattcgtatctcgttggggatgagctgtgggtcgtgatggaatacctcgcaggcggctccctgacagacgttgtgacagaaacctgcatggacgagggtcagattgccgctgtgtgccgagagtgcttgcaggccctggacttcctgcactcaaaccaggttatacaccgcgatataaagtctgacaatatcctcctgggcatggatgggagcgtgaagcttactgacttcggcttctgtgcgcaaatcacaccagagcagtccaagcgatccacaatggtgggcacaccgtattggatggctcctgaagttgtgacgaggaaagcttacggtcccaaggtcgatatttggagcctcggaatcatggctatcgaaatggttgagggtgaaccaccctacctgaacgaaaatccactacgcgctctttacctcattgctactaatggcactccagagctccagaaccctgagcgactatccgcagtgtttcgagacttccttaatcggtgtttggaaatggacgtcgaccggcggggctctgctaaagaactgctgcagcatccattcctgaagttggcgaaaccactgtcctcattgacgcctctgataatcgcagccaaggaggccatcaagaacagcagtaggtag

SEQ ID NO: 198440 - DNA, 1698 bp, synthetic construct
  misc_feature 1..1698: note = Description of Artificial Sequence: Synthetic coding sequence
  source 1..1698: mol_type = other DNA
atgagcgacggcctggacaacgaggagaagccccccgccccccccctgaggatgaattcaaacaaccgcgactcgtccgccttaaaccattcttcgaagccccttccaatggctccagaggagaagaataaaaaggccaggctccgctcgatctttcctggggggggcgacaaaaccaataaaaaaaaagaaaaagagcgcccagaaatctctctgccctctgacttcgagcatactattcacgtcggctttgatgccgtcacaggagagtttacaaactctccattccagacaagtcgcccggtaaccgttgcctcctcccagagcgaagggaagatgggcatccccgagcaatgggccagattgttacagactagcaatattactaaactggaacaaaaaaagaatccccaggctgttctggacgtgctgaaattctatgatagcaaagaaactgtcaacaaccagaagtacatgtcattcactagtggtgacaaaagtgctcacgggtatatagctgcacacccctccagcacaaagactgcttccgaaccacctcttgcgccaccagtgtctgaagaagaagatgaggaggaggaagaggaggaggatgagaacgaaccacccccagtgatcgcgccacgccccgagcacaccaaatcgatttataccaggagcgtagttgaatctattgcctcccctgcagtgcccaataaggaggttacgccaccaagcgccgaaaacgcaaacagctcaacactgtaccggaataccgaccggcaacgaaaaaaatctaagatgacagatgaggagattctcgagaaactccggtcaatcgtgtccgtgggcgatccaaaaaagaaatatacccggttcgagaagatcggccagggtgccagcggtacggtctacactgcactggatatcgctaccggacaggaagtggctattaaacagatgaacctccaacagcaacctaaaaaggaattgatcatcaatgagattctggtcatgcgcgagaataaaaatcctaatattgtcaactatctggactcttacctggttggtgacgagctttgggtagtgatggaatacctagctggcggttcgcttacagatgtggtgaccgagacttgcatggacgagggtcagatcgcggctgtgtgcagagaatgtctccaggctctggactttctgcatagtaatcaggtgatacaccgggatataaagtcagacaacatactcctgggtatggatgggagcgtgaagctgaccgattttggcttctgtgcccagattacacctgaacaatctaagcgcagcacaatggtggggaccccatactggatggcccccgaggtcgtgactaggaaggcttacgggccaaaagtggatatctggagtctaggtattatggcaattgagatggtggagggcgaaccaccatacttgaatgaaaatccattaagggccctctatctgattgctaccaacggaacacccgagctccagaatccagagaggctgagcgcagtgttccgcgattttctgaatcgttgtctcgaaatggacgtggatcgcaggggcagcgctaaggagcttctgcagcatcccttcttaaagcttgccaagcccctcagctcactgacgccactcatcatagcggcgaaagaagccatcaagaatagtagtcggtag

SEQ ID NO: 198441 - DNA, 2046 bp, synthetic construct
  misc_feature 1..2046: note = Description of Artificial Sequence: Synthetic coding sequence
  source 1..2046: mol_type = other DNA
atgttccggaagaagaagaagaagcggcccgagatcagcgccccccagaactttcagcatagagttcacacaagtttcgatcccaaggagggcaagttcgtcggccttcctccacagtggcaaaacatactcgatacactgcggcgccctaagcctgttgtggaccccagcagaatcaccagggtccaactccagcctatgaaaactgtggtccgcggctccgcaatgcctgtggacgggtatatcagcgggttgctgaatgacattcagaaactgtccgtaatttcgtctaataccttaagaggtcggagccctacttcccggaggcgcgcacaaagcctgggactgctaggagacgagcattgggccacggaccctgatatgtacttgcagtcaccccagagtgagagaaccgaccctcatggcctctacctcagttgcaatggaggcacccccgccggtcataaacagatgccctggcccgaaccacagtcacccagagtcctaccgaatggactggccgctaaagcccagtcactcgggcccgccgaattccagggagcatcacagaggtgcctccagctaggcgcatgccttcaaagcagtccacccggcgcttctccacctaccgggaccaataggcatggtatgaaagccgcgaaacacggaagcgaggaggcccgaccacagagctgcttagtcggttctgccaccggtagaccaggaggagaagggtcaccaagccctaaaactcgcgagtcatctctgaagcgcagactttttcggtctatgttcctttctactgcggctactgccccccccagcagctcgaagcccggaccgccgcctcaatccaagcctaatagtagcttcaggcctccacagaaggataatccaccctccctcgtcgccaaggcccagagcctgccttccgaccagccggtcggcactttttctccacttaccacaagcgacaccagctctccacagaagagtctgaggaccgcgccagctacaggccagttacccggcagatcttcacccgctggaagtccaagaacatggcatgcccagatcagcacatctaacctgtatctgccccaggatcctacagtcgccaagggggcgctagccggggaagataccggggtagtgacccatgaacagttcaaggcggctctgcgaatggtggtggatcagggcgacccacgcctgcttctagattcttacgtcaagataggagagggctcgacaggcattgtgtgtctggctagggaaaaacattctggaaggcaggttgcagtgaagatgatggatctccgcaaacaacaacggagagagttgttattcaacgaagtggtcatcatgagggattatcaacacttcaacgtcgtggaaatgtataaaagctatctggttggggaggaactttgggtcctcatggaattcctgcaagggggagcacttacggacatcgtgagtcaagtgcggctgaacgaagaacagatcgctacggtgtgtgaggccgttctgcaggcccttgcttacttacatgcccaaggcgtgattcatagagacatcaagagtgactctattctcctcacactcgacggtagggtcaaactgtctgactttggcttctgtgcccagatatccaaggatgtacccaaacgcaagtcactcgttgggacgccttactggatggcccccgaagtaatttcacgtagtctttacgccaccgaggtggatatatggagcttaggcatcatggtgatcgagatggtggacggggaaccgccttacttctctgacagtcccgtccaggctatgaaaagactaagagactctcctccacccaagttgaaaaatagtcataaagtatctcctgtcctgagggactttctggagaggatgcttgtcagagatcctcaagagcgagccaccgctcaagagcttttggatcacccgtttctgctacagacagggcttccagaatgccttgtgcctctaattcagctgtatagaaagcagactagtacttgctag

SEQ ID NO: 198442 - DNA, 2046 bp, synthetic construct
  misc_feature 1..2046: note = Description of Artificial Sequence: Synthetic coding sequence
  source 1..2046: mol_type = other DNA
atgttccggaagaagaagaagaagcggcccgagatcagcgccccccaaaatttccaacaccgggtccatacaagcttcgaccctaaagaggggaaattcgtgggactcccccctcagtggcagaatatcctggacactctgcggcgccccaaacctgtggtcgaccctagcaggataacacgcgttcagctgcagcccatgaaaaccgttgtgcggggctccgcaatgccagtggacggttatataagtggtctgctcaacgacattcagaaacttagtgtaatatctagcaataccctgcggggtcggtccccgacctctagacggagagcccagtctttgggcttgctcggcgatgagcactgggccactgacccagacatgtacctacagtccccacaatccgagagaacagaccctcacggcctttacttgtcttgcaatgggggtactccagctggtcataagcagatgccgtggcccgagcctcaatccccgcgggtcctccccaacggactggcagctaaagcacagtcactgggacctgcagaattccagggcgcatcccagcggtgcttgcaacttggcgcctgcttacagagtagcccaccaggcgcatcaccaccgaccggcaccaaccgacacggaatgaaagctgccaagcatggcagcgaggaagcccggccacagtcttgcctagtcggttccgctaccggccggcccgggggcgaagggtccccttcccccaagactagggaaagcagccttaaacgcagactctttcggtcgatgttcctgtcaacagctgctacagccccccccagctcttcgaagcccggtccaccacctcagtcaaagcccaacagttcattccgaccccctcaaaaagataacccaccaagtcttgttgcgaaagcgcagtccctaccgagtgaccagcccgtgggaacattttccccattaacaacttccgacacctcgagcccccagaaatcgttaaggactgctcctgccaccggtcagctccccggcagaagttcacctgcaggaagcccccgtacctggcacgcccagatcagcacatctaatctgtatcttccacaggaccctaccgtcgcaaagggcgccttggctggcgaggacactggagtggtgactcatgaacagttcaaagctgccttacgcatggttgttgaccaaggagatccccggctccttctcgactcctatgtgaagataggggaaggctcaacgggtattgtatgtctggcacgcgagaagcattcaggtcgccaggtcgcagtcaaaatgatggacctgcgtaagcagcaacgccgggagctgctcttcaacgaagtggtgataatgcgcgattaccagcattttaatgtggtggaaatgtacaagtcatacttagtaggagaagaactgtgggtcctgatggagttccttcaaggtggcgcactcaccgatatcgtctcacaggtgcggctgaacgaggaacagattgccactgtctgtgaagccgtgctgcaggctctggcatacctccacgcacagggcgtcatccatcgcgacatcaagagcgattccattctgctgacgttggatggcagagtcaagctttcggactttgggttctgcgctcagatttctaaagacgtgcctaagcgaaaatcactggttggaaccccttattggatggctcctgaagtcatcagtcggagcttgtacgcaaccgaggttgacatctggagtttgggaatcatggtgatcgaaatggttgacggcgagcctccatatttttctgattctccagtgcaagccatgaagcgtctgcgggattccccacctcccaaactaaagaactctcataaagtctctcctgtactgcgcgattttctggaacggatgcttgtgcgcgatccacaggagcgagcaaccgctcaggaactgctggaccatccttttctcctacaaacggggcttcccgagtgtctggttccactgattcagctctatagaaagcagacctccacctgctag

SEQ ID NO: 198443 - DNA, 2046 bp, synthetic construct
  misc_feature 1..2046: note = Description of Artificial Sequence: Synthetic coding sequence
  source 1..2046: mol_type = other DNA
atgttccggaagaagaagaagaagcggcccgagatcagcgccccccagaatttccagcatcgagtacacacgagttttgacccaaaagaaggaaaattcgtcggacttcccccccagtggcaaaatatcctggataccctgagacggccaaagcccgtggtagatccgtctcggatcaccagagttcaacttcagcccatgaagactgtggtgcgaggcagtgcgatgccagtggacggctatatctctgggcttctcaatgacatccagaagctatccgttatatcgagtaataccctaagagggaggtcacctaccagtcggcgaagggctcagagcctgggcttgcttggcgacgaacattgggctaccgatcctgacatgtacttgcaatctccacagtccgagagaacagatccccacggactatatttgtcgtgcaatggaggaacccctgctggtcataagcagatgccgtggccagagccgcagtcccccagggttcttcctaatgggttagctgcaaaggcacaatcactcggacccgcggaatttcagggcgcttctcagcgctgtctgcaacttggcgcttgtttgcagagctcaccccctggggccagcccaccaacagggactaatcgccacggcatgaaagccgcaaaacatggctccgaggaagccaggccacagtcttgtctggttggttctgcaacaggcaggcccggtggagaaggttcacccagtccaaagacccgcgagtcttctctcaaaaggaggctatttcgaagcatgttcttgtccaccgccgcaacagcgcccccatcatctagtaagcctggcccccccccacagagcaagccaaactcctcttttcgaccaccccaaaaggacaaccctccatcactcgttgctaaggcacaatctcttccgagcgaccaaccagtggggacattcagcccgttgactacctctgatacctcttctccacagaagtccctccgaacggcccccgccaccggacaactacccggtcgcagctccccggctggttcccccagaacctggcatgcccaaatctccactagcaacctttatcttccccaggatcccactgtggcgaagggcgcattagcgggcgaggacaccggcgttgtgacacacgagcagttcaaagcagccttgaggatggtggtcgaccaaggcgatccccgcctactcttggactcttacgttaaaattggagaagggtctaccggcatcgtctgcctggcccgcgaaaaacactccgggcgccaagtggccgtgaagatgatggacctacggaaacagcagagaagagaactgctcttcaacgaggtggtcatcatgagagactatcagcacttcaacgtggtcgagatgtacaaaagttatttggtcggagaagaactgtgggtgttaatggagtttttgcagggtggagcgctgaccgacatcgtatcccaggttcgcctgaatgaggaacagatagctactgtgtgtgaggctgttttgcaggctctagcatacctccacgcacagggcgttatccacagagatattaagtcagacagcatcctcctgacccttgatgggcgcgtcaagttgtccgacttcggcttctgtgcccagatctcaaaggatgtacccaaaagaaagtccctggtggggactccatactggatggccccagaagtcatctcaagatccctgtacgccactgaagtcgacatctggtctctgggcatcatggtcatagagatggtcgacggtgagcctccctacttcagcgacagccctgtacaagcaatgaagcggttacgcgactcgcccccaccgaaattgaagaactcccacaaggtttctcctgtgctccgagatttcctggagcgcatgctggttcgcgacccccaggaaagggctaccgcccaagagttgctcgaccatcccttcctcctgcagacgggactcccagagtgcctagttcccctcatccagttgtatcgtaagcaaacctcaacttgctag

SEQ ID NO: 198444 - DNA, 369 bp, synthetic construct
  misc_feature 1..369: note = Description of Artificial Sequence: Synthetic coding sequence
  source 1..369: mol_type = other DNA
atgttccggaagaagaagaagaagcggcccgagatcagcgccccccagaatttccagcatcgcgttcacacaagctttgatcccaaagaagggaaattcgtcggattgccaccccaatggcagaacattctggacacgcttaggcgccctaaacctgtcgtggaccctagccgaatcactagggtgcagctgcagccaatgaagaccgtggtgcgcggctccgcgatgcctgtggacggctatatctcaggacttctgaatgacatacagaagttgtccgtcatctcttccaacaccttaagaggacgatctcccacatctcgtcggagagcccaaagtttgggattactgggggacgagcactggtag

SEQ ID NO: 198445 - DNA, 372 bp, synthetic construct
  misc_feature 1..372: note = Description of Artificial Sequence: Synthetic coding sequence
  source 1..372: mol_type = other DNA
atgttccggaagaagaagaagaagcggcccgagatcagcgccccccagaatttccagcatcgcgtgcacacctcattcgacccgaaagagggcaaattcgtaggacttccgccacaatggcaaaacatcctcgatacgcttcggagaccgaaacctgtggtggatcctagtaggataaccagagtacaactgcagccaatgaagacagttgtccggggttccgctatgccagtcgatggctatatcagcgggcttctgaacgatatacagaagctgtctgttatttcttcaaacaccctgcgaggaagatctccaaccagtcgtcgtcgcgcccagtctctgggactcttaggagacgaacactgggcttag

SEQ ID NO: 198446 - DNA, 330 bp, synthetic construct
  misc_feature 1..330: note = Description of Artificial Sequence: Synthetic coding sequence
  source 1..330: mol_type = other DNA
atgttccggaagaagaagaagaagcggcccgagatcagcgccccccagaacttccagcatcgcgtgcacaccagctttgaccccaaggaggggaagttcgtcggtctgcccccccaatggcaaaacattctggatacactgcggaggcctaaacctgtcgtggacccatctcggataaccagggtgcagctacaaccaatgaagaccgtggtgagaggctccgcaatgccggtcgatggctatatttcaggacttttgaatgatatccagaagctctcagtcatctcctcaaataccttgagaggacgatctcccactagcagaaggtag

SEQ ID NO: 198447 - DNA, 339 bp, synthetic construct
  misc_feature 1..339: note = Description of Artificial Sequence: Synthetic coding sequence
  source 1..339: mol_type = other DNA
atgttccggaagaagaagaagaagcggcccgagatcagcgccccccagaacttccagcatcgggtgcacacctctttcgatcctaaggaaggtaagttcgtgggtcttcctccacagtggcagaatatcttggataccttgcgacggccaaagcctgtcgtcgacccctcccgaattacacgcgttcagctgcagcccatgaaaaccgtggtgaggggctcagctatgccagtagatgggtacatcagcggacttctgaatgatattcagaagctgtcagtgatttcttctaacacactgagagggagatcacccactagtagaagaagggctcagtag

SEQ ID NO: 198448 - DNA, 2046 bp, synthetic construct
  misc_feature 1..2046: note = Description of Artificial Sequence: Synthetic coding sequence
  source 1..2046: mol_type = other DNA
atgttccggaagaagaagaagaagcggcccgagatcagcgccccccagaactttcagcatcgagtacatactagcttcgaccccaaggaaggcaaatttgttggattgccccctcagtggcagaacatccttgatacgctgaggagaccgaagccagtcgtggacccatcaaggattacccgagtgcagttacagcctatgaagactgtagtccgcggtagtgcaatgccagtcgacgggtacatctcaggcctcctaaacgacatccagaagctgtctgtcatttcaagtaataccctgcgcggccgttcacccacctctcgccggcgggcccaatctctcggattgcttggggacgagcattgggcgactgaccccgacatgtatcttcagagccctcagagtgaaagaacagatccacatgggctgtatctcagttgcaacgggggcacacctgccggccataaacagatgccttggcccgaaccccagagccctagggtgctccccaacgggctcgccgcaaaggcccagagcctgggacccgccgagtttcaaggagcctcccagaggtgcctgcagctgggagcctgtctccagagctcccccccaggggcgtcacctcctaccggcacaaatcgccacggcatgaaggccgcaaagcacggctctgaggaagcccgcccccagtcctgtctggttggcagcgctaccggtcggccgggcggagagggttccccttcacccaagacacgcgaaagctctctgaaacgcaggctgtttagaagcatgttcctttccactgccgcaacagctcccccctcttcttctaagcccgggccgcccccgcagtcgaaacctaacagctcctttaggcccccccagaaggataacccaccctcccttgttgcgaaggcccagtcattaccctctgatcaacctgtggggaccttttccccgcttactacctccgacacctcctcacctcagaaatccctgcgaaccgctccagcgactgggcaattgccaggccggtcatcccccgccggatctccccggacctggcacgcccagatcagtacaagcaacctttacctcccacaggaccccaccgttgccaaaggcgcgctcgcaggagaagatacgggggtagttacccatgagcagttcaaagctgctcttcgcatggtcgtggatcaaggcgatccacgtttgcttttggactcttatgtgaagattggagaaggctccaccgggatcgtttgtttagcaagggagaaacacagtggtcgccaggtggcggtcaaaatgatggacctacggaagcagcagcgtagagagctactgttcaacgaagtcgtgattatgagagactaccagcatttcaatgtggtggaaatgtataagtcttacttggtgggcgaagagctctgggtgttgatggagttcttacaggggggcgctctgacagacatcgtctcacaggtgcggctgaatgaagaacaaatcgctacagtttgtgaagctgtattacaggccctagcttacctgcacgcccagggcgtgatccacagggacatcaagtccgatagcattcttctgaccctggatggtcgcgtaaaactaagtgacttcggcttctgtgcacagatcagcaaggatgttcctaagagaaaaagcctggtggggacaccatactggatggcaccggaggtgattagccggtccctgtacgccaccgaggtcgatatttggtcactgggaatcatggttatagagatggttgatggggaacctccctatttcagtgacagcccagttcaagcaatgaagcggctgagagatagccccccgcctaaactgaaaaatagtcataaggtcagccccgtcctccgggacttcctagaaagaatgctggtcagagatccccaggagagagccacagcacaggaactcttggaccacccgttcctgctgcagactggcctaccagaatgtttggttccgctgatccaactttaccgcaagcaaacctctacctgctag

SEQ ID NO: 198449 - DNA, 855 bp, synthetic construct
  misc_feature 1..855: note = Description of Artificial Sequence: Synthetic coding sequence
  source 1..855: mol_type = other DNA
atgttccggaagaagaagaagaagcggcccgagatcagcgccccccagaactttcagcatagagtacacacaagcttcgatccaaaagagggcaagttcgtgggcctgccacctcaatggcagaatatccttgatacactcagacggcctaagccagtcgtagacccttctcggattacacgagtccaactccagcctatgaagacagtggtgaggggctcggctatgcctgtggacgggtacatcagtggcctgctaaatgacattcagaagctcagcgtcatttcaagcaatacactccgggggaggtctcccactagccgaaggcgagcgcagtctctcgggctcctgggagatgagcattgggcaaccgatcccgatatgtacttgcagagcccacagagcgaacggaccgacccccacggcctatatctctcctgtaacggggggacacctgctggacacaagcagatgccttggccagaaccacagtccccaagagtgctgccgaatgggttagcagctaaggcccagtctttaggtcccgctgaattccagggagcatctcagaggtgcctgcagcttggtgcatgtctccagtcgtccccaccgggtgccagcccaccaaccggaacaaacagacacggaatgaaggcagccaaacatggctcagaagaggctcgtcctcagtcctgtctcgttggatctgccacaggtcgccccggcggggaggggtctcctagccccaagacgcgcgaaagttcgctgaagcgacgtctctttcgcagcatgttcctgtccaccgcagccactgccccaccaagctctagcaagccgggacccccacctcagtag

SEQ ID NO: 198450 - DNA, 318 bp, synthetic construct
  misc_feature 1..318: note = Description of Artificial Sequence: Synthetic coding sequence
  source 1..318: mol_type = other DNA
atgttccggaagaagaagaagaagcggcccgagatcagcgccccccagaatttccagcatcgtgttcatacgtcttttgatcccaaagaaggaaagttcgtaggactgccccctcagtggcagaacatacttgatactcttcggcgtccgaagcctgtggtggatccctcacgaattacacgcgttcagttacaacccatgaagaccgtggtccgaggcagcgccatgcctgttgacggatacatttcaggtcttctcaacgacatccagaaactgtccgtgatttcctccaatactcttagaggccgtagcccttag

SEQ ID NO: 198451 - DNA, 441 bp, synthetic construct
  misc_feature 1..441: note = Description of Artificial Sequence: Synthetic coding sequence
  source 1..441: mol_type = other DNA
atgatcaacatgggcgacagccacgtggacaccagcagcaccgtgtctgaggctgtggccgaggaagtgagcctttttagtatgacggacatgatcctgttttctctgattgtgggactcctgacatattggttcctatttcgcaaaaaaaaagaggaggttccagagtttacaaagattcagacccttacttcgagtgttagagagtcctcctttgtggagaagatgaaaaagactgggcggaacatcatcgtgttctacggatcccagaccggaactgcagaggagttcgcgaatcgactgagtaaagatgcccaccgatatggaatgcgcggtatgagcgccgatccggaggagtacgatttggctgacctgtctagcctccctgaaattgataatgcactggtggtgttttgtatggccacatacggtgagggatag

SEQ ID NO: 198452 - DNA, 519 bp, synthetic construct
  misc_feature 1..519: note = Description of Artificial Sequence: Synthetic coding sequence
  source 1..519: mol_type = other DNA
atgatcaacatgggcgacagccacgtggacaccagcagcaccgtgtccgaggccgtagccgaagaggtgtctcttttctctatgacagacatgattttgttttctcttatagtcggtctgctgacatactggttcctttttcgcaagaagaaagaggaagtacccgaatttacaaagattcaaaccctgacatcaagcgtccgggagagttcgtttgtggagaaaatgaagaagaccggaaggaacatcatcgttttctatggttcacagacggggacagctgaggagttcgcaaatcgcctctctaaagacgctcatcggtacggcatgcggggaatgagtgccgatccagaggagtacgatctggcggatcttagttctctccccgaaatcgacaatgcgctagtggtattttgtatggcaacctacggggagggcgatcccactgataatgctcaggacttctacgattggctccaggaaaccgatgtggacctgtccggggtaaaattcgcatag

SEQ ID NO: 198453 - DNA, 189 bp, synthetic construct
  misc_feature 1..189: note = Description of Artificial Sequence: Synthetic coding sequence
  source 1..189: mol_type = other DNA
atgatcaacatgggcgacagccacgtggacaccagcagcaccgtgagtgaggccgtggccgaagaagtgtcgctgttctcgatgaccgatatgatcctatttagtctcattgtgggactgcttacctattggtttctgttccgcaagaagaaggaagaagtcccagagtttaccaagatccagacctag

SEQ ID NO: 198454 - DNA, 1107 bp, synthetic construct
  misc_feature 1..1107: note = Description of Artificial Sequence: Synthetic coding sequence
  source 1..1107: mol_type = other DNA
atgggcaagtacgtggacaagcggctggagcagctgggcgcccagagaatcttcgagctcgggctcggcgacgatgatggtaacctggaagaggactttatcacctggcgggagcagttctggcccgctgtgtgcgaacattttggggttgaggctaccggagaggaatcatcaatccgccaatacgagctggttgtgcataccgatatcgatgccgcaaaagtgtacatgggagaaatggggcgcttaaagagctacgagaatcagaaaccccctttcgacgccaaaaatccatttttagcggcggttacgaccaataggaagttgaaccagggtactgaacggcatctcatgcatctcgagctggacattagtgacagcaagatacggtatgagtcaggtgatcatgtggccgtctatcccgctaacgatagcgccctagtcaaccagctgggcaagattctgggcgccgatctggacgtcgtcatgtcactcaacaacctggatgaagagtcgaataagaagcacccttttccctgccccacctcttaccggacagctttaacttattacctggatataaccaatccaccaaggactaatgtcctttacgaattggctcagtacgcttcggagccatccgagcaggaattgctcaggaagatggcttcctcttccggtgaggggaaagagttgtacctcagctgggtagtggaagccaggcggcacatcttggcaatactgcaagactgtccaagtttgaggccacccatagatcatctttgcgagctactccctaggctccaggcacggtattatagcatagcctcaagttccaaggtgcaccctaactctgtccatatatgcgcggtggtggtagagtacgagacaaaagcagggagaatcaataagggggtcgcaactaattggctgagggccaaggagcctgccggcgagaacggaggccgtgctctcgctgtgcctaccagcacctccgtggggatgcatggcacctggccaggcatgtgcagaacacccagtaccacaagctggctgagctcaggtccttggagcactaggagaagatggaccacttccagaaattag

SEQ ID NO: 198455 - DNA, 120 bp, synthetic construct
  misc_feature 1..120: note = Description of Artificial Sequence: Synthetic coding sequence
  source 1..120: mol_type = other DNA
atgatcaacatgggcgacagccacgtggacaccagcagcaccgtgagtgaagccgtggccgaggaggtgtcgctcttttctatgaccgatatgatcctattctctctgattgtcggatag

SEQ ID NO: 198456 - DNA, 501 bp, synthetic construct
  misc_feature 1..501: note = Description of Artificial Sequence: Synthetic coding sequence
  source 1..501: mol_type = other DNA
atgatcaacatgggcgacagccacgtggacaccagcagcaccgtgtccgaggccgtggctgaggaggtatccttgttcagcatgacagacatgattctgttcagcttaattgttgggctgctcacatactggtttctgtttaggaagaaaaaggaggaggtacccgagtttactaaaatccagaccctgactagttcggtcagggagagctccttcgtagagaagatgaagaagactggtagaaatattatcgtcttttacggatctcagactggtacagctgaagagtttgccaaccggctgagcaaagacgctcacaggtacggcatgagaggcatgtccgctgacccagaggaatatgacctagccgatcttagcagtctgcctgagatagacaatgccctggttgtattctgtatggcgacctatggcgagggggatccaacggacaacgcacaggacttttacgactggttgcaggagacagacgtcgacctgtag

SEQ ID NO: 198457 - DNA, 567 bp, synthetic construct
  misc_feature 1..567: note = Description of Artificial Sequence: Synthetic coding sequence
  source 1..567: mol_type = other DNA
atgatcaacatgggcgacagccacgtggacaccagcagcaccgtgagtgaggcagtggctgaggaagtcagtctgttcagcatgaccgatatgattctcttttctttgattgtgggccttctaacttactggttcctattcagaaaaaaaaaggaggaagtgcccgaattcactaagatccagaccctgacatcatcggtccgggagtccagttttgtcgagaaaatgaagaaaaccggacggaacatcatagtattttatggcagtcagactgggacagctgaagaattcgccaatagactaagcaaggacgctcaccggtatggaatgaggggaatgagcgcggatcccgaggaatacgacctggccgacctgtccagcctgcccgaaatcgataacgctctggtcgtcttctgcatggccacatacggggaaggcgatccaaccgacaacgcccaggatttctatgactggctgcaggaaacagatgtggacctatctggcgtgaaatttgcagtattcgggctcggcaacaaaacttatgagcatttcaacgccatgggctag

SEQ ID NO: 198458 - DNA, 189 bp, synthetic construct
  misc_feature 1..189: note = Description of Artificial Sequence: Synthetic coding sequence
  source 1..189: mol_type = other DNA
atgatcaacatgggcgacagccacgtggacaccagcagcaccgtgagcgaagcagtggcggaagaggtttcactgttcagcatgaccgacatgatcctgttcagtcttatcgttggcttgctcacctattggttcttattccgcaaaaagaaagaagaggtcccagaatttacaaaaattcagacatag

SEQ ID NO: 198459 - DNA, 1722 bp, synthetic construct
  misc_feature 1..1722: note = Description of Artificial Sequence: Synthetic coding sequence
  source 1..1722: mol_type = other DNA
atgggcagccggtggcccgccgtgcccccctggggcctgcagatccatgtttctgagcgtcagccgtcccggccccctccctgcccacagcagccaggtcaggccacttgcgagaccttgagcagcgcacccgaccctagtacgacgaggatgtcgcccccttgtccgcagccccagagtgcccctggcggtatcggttgttggaggctgaaggtgttcggcctgggcaacaaaacttacgaacacttcaatgccatgggaaagtatgtggataagaggctggagcagctgggagcccaacggatttttgaactaggattgggggatgacgatggcaatctggaagaagacttcatcacttggagagagcaattctggcctgctgtttgtgaacactttggcgtggaggctactggcgaagagtcttcaatcaggcaatatgaactcgtcgtgcatactgacatcgacgccgcgaaggtgtatatgggagagatgggacgcctgaagtcttatgaaaatcagaaaccaccattcgatgctaaaaacccttttctcgcggccgtaacaacaaatcggaaattaaaccaggggactgaacgccacctcatgcacctcgagttagatataagcgactctaaaatccgttatgaatctggcgatcacgtggctgtctaccccgctaatgattcggcactggtaaatcagttaggaaaaattctcggcgccgaccttgacgtggtgatgtccttaaacaatctggacgaggaatcaaacaaaaagcacccgttcccttgtcctacttcttatagaaccgccttaacctattatctggacattacaaacccccctagaactaatgtattgtatgagctagcccaatacgcatcagagccatcggaacaggagctactcaggaaaatggccagcagcagcggcgaagggaaggagctttacctcagctgggtcgtggaggcaaggagacatattctcgccatcttgcaagattgcccaagcctccggccacctatcgaccatctctgcgagttacttccacggctgcaggccagatactactccattgcatcctcctctaaggttcacccaaacagcgttcatatatgcgccgtagtagtggagtacgagactaaagcaggcagaattaataagggcgtagccacaaactggttgcgcgccaaagaacccgccggagagaatggcggacgtgccctagtgccaatgttcgtgcgaaagtctcagttcaggctgccctttaaggccacaacacccgtgattatggtcgggcccggcacaggggtcgccccttttatagggtttattcaggaaagggcatggctgcggcagcaggggaaagaggtcggtgaaaccctgctgtactatggatgtagacgatcggatgaagactacctataccgggaagagttagcccagtttcatagagatggggcgcttacgcagttgaacgtcgccttctccagggaacagtcccacaaggtgtacgtgcaacaccttctcaaacaagatagagagcacctctggaaattgatagaaggaggggctcatatctatgtatgcggcactccttccagctgccccggaatgcacggaacatggcccggtatgtgtcgcacaccatctaccacgtcttggctgagctctggaccctggtccactcggcgcagatggacaactagtaggaattag

SEQ ID NO: 198460 - DNA, 423 bp, synthetic construct
  misc_feature 1..423: note = Description of Artificial Sequence: Synthetic coding sequence
  source 1..423: mol_type = other DNA
atgatcaacatgggcgacagccacgtggacaccagcagcaccgtgagtgaagccgtcgccgaggaggtctccctgttttcaatgactgacatgattttgtttagcctaattgtcggcctgctgacttactggtttttgtttaggaagaagaaggaagaggtgccagagtttaccaagattcaaactctcacttcttcggtccgcgagtcctcctttgtcgagaagatgaaaaagactgggagaaatatcatcgtattttatggaagtcagaccgggaccgctgaggaatttgccaacagattatccaaagatgctcatcgctatggaatgcgtgggatgtcagctgatcccgaggaatacgacctggccgatctatcttctcttccggagattgataatgctctagtggttttctgtatgtag

SEQ ID NO: 198461 - DNA, 2043 bp, synthetic construct
  misc_feature 1..2043: note = Description of Artificial Sequence: Synthetic coding sequence
  source 1..2043: mol_type = other DNA
atgatcaacatgggcgacagccacgtggacaccagcagcaccgtgagcgaagccgttgccgaggaggttagcctgttttctatgactgacatgatactcttcagccttatcgtgggacttctaacgtactggtttttgttcagaaagaagaaagaagaggtccctgagtttaccaagattcagaccctgaccagttctgtaagagagagcagcttcgtggaaaagatgaagaaaaccgggagaaatatcatcgtgttttatggttcccagaccggaactgctgaagaattcgcaaatagactcagtaaagacgcgcataggtatggtatgcgaggaatgagcgcagatccggaagagtatgatctggctgacctgtccagcctgcctgagatcgataatgccctggtggtcttttgtatggcaacatacggcgagggtgatcccaccgacaacgcccaggacttttacgactggctccaggaaacagacgtggacctgagtggtgtcaagtttgcggtattcggactcggcaataaaacgtatgaacattttaacgccatggggaaatacgttgataagcggctggaacagcttggggctcagcggatctttgagttaggcctgggtgacgacgacgggaatctggaggaggacttcataacctggagggagcaattttggcctgctgtgtgcgagcacttcggagttgaagctacaggtgaagaatctagcatacgtcagtacgagctagtcgttcatactgatattgacgccgccaaagtttacatgggcgagatgggccggctcaaatcctacgaaaatcagaagccaccattcgacgctaagaaccctttcctggccgctgtgactaccaaccggaagctcaatcaaggcacggaaagacacttaatgcacttggaactcgacatctccgactcaaagattaggtacgaaagcggggaccacgtggctgtgtaccccgcgaatgatagcgcattggtcaaccagctcggtaaaatcctgggcgcggacctggacgtcgttatgtctttgaacaatttggacgaggagtccaataagaaacatccttttccctgtcccacaagctaccgtaccgccttaacatactatcttgacatcactaatccaccccgcacaaatgtgctgtatgagctagctcagtacgcctcagaaccctccgaacaagaattgctccgaaaaatggcttccagttccggggagggcaaggaactctatctgtcatgggtggtggaggctcgccgacacatcctcgctatcctgcaagactgtccttctctcagaccacccattgaccacttatgtgagctgttgccacgactccaggcccgatattattctatagcctctagttcaaaagtgcaccccaacagcgtccatatatgcgctgtggtagttgaatatgagactaaggcaggacgcattaacaaaggtgtcgccactaactggctgcgcgctaaagagcccgctggtgaaaacgggggccgtgctttggtgcctatgttcgtccgcaagtcgcagttcaggctgccctttaaggcaaccacacctgtaattatggtcggtcctggcaccggagtcgcgccttttatcggcttcatccaggagcgggcctggcttaggcaacaagggaaggaggtgggcgagactctcctttattatgggtgccgccgctccgatgaggactacctttacagggaagaattggctcagtttcaccgtgatggtgcactcactcagttgaacgtcgctttctcgcgtgagcagtcacacaaagtgtatgttcaacacttgttaaagcaggatcgggagcacttgtggaagctgatcgagggtggggctcacatatacgtatgtggtgacgcaaggaacatggctagggacgtacagaatacattctatgatatcgtggccgaacttggagccatggaacacgcccaggcggtcgactatattaaaaagttaatgactaaagggagatactcactcgatgtttggagttag

SEQ ID NO: 198462 - DNA, 1467 bp, synthetic construct
  misc_feature 1..1467: note = Description of Artificial Sequence: Synthetic coding sequence
  source 1..1467: mol_type = other DNA
atgccccggaccagcaccaccggctgccggcggcagacctggatctccctgggatcctccagccgcctcgaggaggactttataacatggcgcgagcaattttggcccgctgtctgtgagcattttggagtggaggcaacaggggaggagagctccataagacagtacgagctcgtggtccacactgatatcgacgccgcgaaagtgtacatgggcgaaatgggccgccttaaaagctacgagaaccagaaacctccctttgatgccaagaatccattcttagccgctgtgacaaccaacaggaaactaaatcagggaaccgagaggcaccttatgcatctcgaacttgacatctctgactctaagatcagatatgaaagcggagaccacgttgccgtatatcccgccaacgattccgctctcgtgaaccagctgggcaagattttgggggccgatctcgatgtggtgatgagtcttaataacctggacgaggagtcaaataaaaaacatccatttccgtgcccgactagttataggacagcgttaacctactatttggatatcacgaacccccctcgtaccaacgtgctttatgagctcgctcagtacgcttctgagccctccgaacaggaactactgaggaagatggcttcttcatcaggcgaagggaaggagctatacctgtcatgggtcgtcgaagctcggaggcacattctggccattctgcaggactgtccttctctgcggccccccatcgatcatctctgtgagctgctgcccagattacaggcccggtattactccatagcgtcaagttcaaaggtccatcctaattcggtacatatctgcgcagttgtggtcgagtacgagactaaagcagggagaattaacaaaggagtggctactaattggctccgggccaaagaaccagccggggagaacggaggtagagctctggtgcctatgttcgtccgtaagtctcagttccgattaccctttaaagcgaccacccccgttatcatggtgggcccaggaactggcgtagctccctttatcgggttcatccaagagcgcgcttggttgaggcagcaaggcaaggaagtgggggaaacgctgctatattacggatgccgacgctcagacgaggattacctgtatagggaagagctggcccagttccatagggacggagcactgacacagctcaacgttgcattctctcgcgagcaatctcacaaggtttacgtgcagcacctactcaaacaggatagggaacacctgtggaagctcattgaggggggcgcccacatctacgtctgtggagacgcacggaatatggctcgagacgtgcagaatactttctacgacatagtggcagaactgggtgcaatggagcacgcccaggccgttgactacatcaagaagctgatgaccaagggaagatactcactcgacgtgtggtcttag

SEQ ID NO: 198463 - DNA, 402 bp, synthetic construct
  misc_feature 1..402: note = Description of Artificial Sequence: Synthetic coding sequence
  source 1..402: mol_type = other DNA
atgctgagccccgaggccgagcgggtgctgcggtacctggtggaggtcgaagagctggccgaggaggtcctggcagataagagacagatagtagatctcgataccaagaggaaccagaatagggaaggcctccgcgctctgcagaaagatctctccttgtccgaggatgttatggtatgcttcgggaatatgttcatcaagatgcctcaccccgaaacaaaggaaatgattgaaaaagatcaggaccaccttgataaggagattgagaaattacggaaacagctcaaggttaaagtcaacaggctgtttgaagcccaaggtaaaccagagctaaaaggcttcaacctcaatcccctcaaccaggatgaactcaaagctctgaaggtaattctgaagggttag

SEQ ID NO: 198464 - DNA, 1605 bp, synthetic construct
  misc_feature 1..1605: note = Description of Artificial Sequence: Synthetic coding sequence
  source 1..1605: mol_type = other DNA
atgaagttcaccctgggcctgggcagccgggcctggcgggtgagctgggagggagcggctgccgcggctgcgggacccggtgcaggaggcagcgccctgagatgccgcgcacagcgggtgtctagcccgcgcctgggaaggcgtgggtcccgactgagtggcgcattgcccctttgcctaagcaggggcggagggggcgcacaggcattgcctgattgcgcaggtccctcccccggacatcctggccacccaggcgcacggcagctggccgggcctctggccatggaacaaacgtacggggaggtcaatcagttgggcggtgtgttcgtcaacggccgtcccttgcctaatgcaattcggctgcggatcgtggagttggcccagttgggaatccggccatgcgacatctctcggcagttaagggtgagccacgggtgtgtgtcaaaaatactggcacgctataacgagactgggtccatcctgccgggcgcgattggcggctctaaaccccgcgtcaccactccgaatgtcgtgaagcatataagggattataagcaaggcgaccctggcatatttgcttgggaaatccgagaccggttgttggcggacggcgtctgcgataagtacaacgtcccttccgtgtcctccatatccaggattctccgaaacaaaattgggtcccttgctcagccaggaccttatgaggcaagcaaacaaccgccaagccagccgaccctcccatataaccacatctaccagtacccctatccaagcccggtctcaccaaccggggcaaaaatggggagccatcctggcgttcccggcaccgctggtcatgttagcattcctaggtcttggccaagcgcccattctgtatcaaatatcttagggatacgaacatttatggagcagacaggtgccttggctggtagtgaaggtaccgcttactctccaaaaatggaggactgggccggggtgaacaggactgcgtttcctgccacacctgctgtcaacgggcttgagaagcctgctctggaggcagacatcaagtatacgcaaagcgcctcaaccctctccgcagtgggggggtttctgccggcctgcgcctaccccgcttctaaccaacatggtgtgtactctgctcctggggggggctacctcgcgccgggccctccatggcctcccgcccaaggcccaccgctcgccccacctggcgctggcgtggccgtgcatggcggagagcttgccgcagcaatgacctttaagcatcctagtcgagagggttccttaccagcaccggcggcaagacctaggactccgagcgtagcttacaccgactgcccaagcagacctaggccgcctcgggggagcagcccacgcacccgcgccagaagagaacgccaggctgatccgggggctcaggtgtgtgctgcagcgcccgccataggcaccggcagaattggcggactggccgaggaggaagctagcgcaggacccaggggggcccgtcctgccagccctcaggctcaaccttgcttgtggcctgatcctccccatttcctctactggtccggcttcctaggctttagtgagcttggtttttag

SEQ ID NO: 198465 - DNA, 1185 bp, synthetic construct
  misc_feature 1..1185: note = Description of Artificial Sequence: Synthetic coding sequence
  source 1..1185: mol_type = other DNA
atggacatgcactgcaaggccgaccccttcagcgccatgcaccccggccacggcggcgtaaatcagttaggcggcgtgttcgtaaacggccgcccactgccagacgtagtccgtcaaagaattgtggagttggcacatcagggggtgagaccctgtgacatctccaggcagctgcgcgtttcccatggctgcgtctcgaagatccttgggagatactacgaaaccgggagtataaaacccggagtgattggcggtagcaaacctaaagtggctactcccaaggttgttgacaagattgctgaatataagcgccagaatcccactatgttcgcatgggaaattcgggatcgcctcctggccgagggtatttgcgacaacgataccgtccccagtgtgtccagcatcaaccgcatcatcaggactaaggtccagcaacctttccaccccactccagacggtgctggcaccggagtgaccgcccctggccataccattgtaccctcaactgcgagcccaccagtatccagtgcgtcaaacgaccccgtgggcagctacagtataaatggcatactagggattccacgttccaacggcgagaagaggaaaagggatgaagacgtgtcggagggatcagtgccaaacggcgattctcagtcgggtgttgatagcctgaggaaacacctccgagcggacaccttcactcagcaacagttggaggcccttgatcgcgtgttcgagagacctagttatcccgacgtgttccaggcctcagaacacatcaaaagtgagcagggcaatgagtattccctgcccgccctaaccccaggccttgatgaagtgaagagtagtctgagcgcctccactaatccagaacttggaagtaacgtttcgggcacacagacctatccagtggttacggggagagatatggctagtactacactccctggatatcctcctcacgtcccgcccaccggccaaggctcctaccccacgtctacgctagctggcatggtgcccggcagcgagttttctggcaatccttacagccacccccaatacaccgcgtacaatgaggcttggcggttcagcaacccagccctgctgtcttctccttattactactcggctgcaccacgaggatctgcacccgccgccgccgcagccgcatacgacaggcattag

SEQ ID NO: 198466 - DNA, 1191 bp, synthetic construct
  misc_feature 1..1191: note = Description of Artificial Sequence: Synthetic coding sequence
  source 1..1191: mol_type = other DNA
atggacatgcactgcaaggccgaccccttcagcgccatgcaccccggccacggaggcgtgaaccagctgggcggggtatttgtcaacgggcggccactccctgatgtggtccgacagcgtattgtggagcttgcccaccagggcgtaagaccatgcgacatatccaggcaacttcgtgtctcacacggctgcgtgagcaagatcctgggtagatactacgagactgggagcatcaagccgggagtaatcggcggatccaagcccaaggtcgctactcctaaagtggtcgacaagattgcagagtataagaggcaaaatcccactatgttcgcctgggaaatcagagatagactgcttgctgaaggcatctgcgacaatgataccgtgccctcggtaagcagcataaacaggattatacgaaccaaggttcagcagccatttcaccccacacctgacggggctgggacaggtgtaacagcgcctggacacaccattgtaccatcgaccgcctcaccacccgtctcatctgctagcaacgatcctgtgggcagttactctatcaacggcatactcggaatacccaggtcaaacggtgagaaaaggaaacgggatgaagacgtgtctgagggatccgtaccaaacggggactcccagtcaggtgtggacagtttgagaaagcatttgcgcgccgatacttttactcaacagcagctcgaggctctcgaccgagtgttcgaacgaccatcatatccggacgtgttccaggcctctgagcacataaaaagtgaacagggcaatgagtactcattacctgcccttactccgggcttggatgaagtgaaatcatctctgtcagcgtccacgaatccggagctcgggtctaatgtcagcggcacacagacatatcctgtggttacgggccgcgacatggcttccacaacattgcccggctatcccccacatgtgccacccacaggtcagggctcctaccctacttctaccctcgcaggtatggttccggaagccgccgtaggccccagtagcagtttgatgtccaaaccgggtagaaaactggctgaggtaccaccctgcgtccagcctaccggcgcttccagccctgccactcgcaccgctaccccctctacacgccccaccactcgtctcggagactccgcaacaccaccctattag

SEQ ID NO: 198467 - DNA, 990 bp, synthetic construct
  misc_feature 1..990: note = Description of Artificial Sequence: Synthetic coding sequence
  source 1..990: mol_type = other DNA
atgttcgcctgggagatccgggaccggctgctggccgagggcatctgcgataatgacacagtcccctccgtctcctcaattaatcgcatcatcagaactaaagtgcaacagccatttcacccaacgcccgacggcgccgggactggcgtaaccgcccccggtcatactatcgtaccatcgacagccagccctcctgtgtcatcagcatccaatgaccccgtggggtcatatagcattaatgggatcctggggatccccaggtccaacggagaaaaacgtaagcgagatgaggtcgaagtttacacggaccccgcccacatcaggggcggcggcgggcttcacctggtgtggacccttcgggacgtgtctgagggctccgtaccaaacggtgattcgcagtcaggtgtcgactccctccgtaaacatctacgcgcagacacctttacacagcaacaactggaggccttggatagggtgttcgaaaggccctcctatccggatgtgtttcaggcgtctgagcacattaagagcgagcagggaaatgagtactccctgccagctttgacacccgggctcgacgaagtgaaatcatctctgtctgccagtactaatccagagctgggttccaacgtgtccggtacacagacctatcccgtggtaacagggcgggacatggcttcgaccactttgcccgggtatcctcctcatgtgcctcccaccggccaggggagttatcccacatctacacttgctggcatggttcccgggagtgaattcagcgggaacccttatagtcacccgcaatatactgcctataacgaagcatggcgtttttctaatccagcactgctgtcctctccttactattattcagcagcacctagaggatcacttcccctcctcccacttcctatgaccgcaaccagctaccgtggagaccatatcaaacttcaagccgactcatttgggctccatattgtgcccgtctag

SEQ ID NO: 198468 - DNA, 1260 bp, synthetic construct
  misc_feature 1..1260: note = Description of Artificial Sequence: Synthetic coding sequence
  source 1..1260: mol_type = other DNA
atggacatgcactgcaaggccgaccccttcagcgccatgcaccccggccacgggggggtgaaccagctgggtggtgtgttcgtgaacgggagaccactaccagatgttgttagacagaggatcgtagagttagctcatcaaggcgttcggccatgtgatattagccggcaactccgagtgtcgcacggatgcgtgtccaagattctgggcaggtactatgagactggatccattaagcctggtgtcattgggggtagcaaacccaaggttgcaaccccgaaggtggtggacaaaattgctgaatataaaaggcagaatcctacaatgttcgcttgggaaatccgggatcggctgttagcagagggcatctgcgacaacgacacggtgccttccgtgtcctccattaatcggatcatacgcacaaaggtgcagcaaccctttcatcctacaccagatggcgccggcactggagtgaccgcacccgggcacactatagtcccttccacagcttcaccccccgtcagttcagcttcaaatgatcctgttggatcatactcgatcaacggaattctgggcatccccaggtctaacggagagaagaggaagcgtgatgaagttgaagtgtacacagaccctgcccatatacgaggcggaggaggcttgcatctggtctggacactgcgtgacgtgagcgagggctccgtgcctaacggtgactcgcaatccggcgtggacagcttacgaaaacaccttagggccgatacattcacccagcaacagctggaggccctggaccgcgtcttcgaacggccttcgtatccagatgtcttccaggccagcgaacatatcaagagcgagcaaggcaacgagtattcgctgcctgccctgactcctggtttggatgaagtcaagtcctcacttagcgcttccacaaaccctgagctgggctccaatgtgtccggaacacagacgtatcccgtggttacaggaagggacatggcttctaccaccttgcccggttatccgccacatgttcccccgacgggtcaaggctcttatcccacaagcaccctagcaggtatggtgcctgaggctgccgtgggaccatcctcttcactgatgagcaaacctgggagaaagctggccgaggtgcctccttgcgtgcagcccaccggggccagctcacccgctacacggaccgcaaccccctcaaccagacccacaacaaggctcggagactctgctacccctccctactag

SEQ ID NO: 198469 - DNA, 645 bp, synthetic construct
  misc_feature 1..645: note = Description of Artificial Sequence: Synthetic coding sequence
  source 1..645: mol_type = other DNA
atggacatgcactgcaaggccgaccccttcagcgccatgcaccccggacatggcggcgtaaatcagctcggcggggttttcgtgaacggcaggcctctgccagatgttgtacggcagagaattgtagagcttgcccaccagggtgtcagaccctgcgatataagtcggcagctgcgagtgtcccatggctgtgtgtcaaagatacttgggcggtactacgagacgggttctatcaagcctggagtcattggcggcagtaagcccaaggtggcaactcctaaggtggtagacaagattgcagaatataaacgccaaaatcctactatgttcgcgtgggagatccgcgatagattgctcgccgagggtatctgcgataacgacaccgtgccatcagtctcttccataaatcggattatcaggaccaaagttcagcagccctttcacccaacgccggacggcgctggcacaggggtgacggcaccgggccacactattgtgccctcaacggcgtctcccccagtgtcttctgcaagcaatgatcccgtggggtcttacagtattaacggcattctgggcatcccccggtccaatggcgaaaaacggaagcgggatgaagtggaagtgtacacggatcccgctcactag

SEQ ID NO: 198470 - DNA, 1254 bp, synthetic construct
  misc_feature 1..1254: note = Description of Artificial Sequence: Synthetic coding sequence
  source 1..1254: mol_type = other DNA
atggacatgcactgcaaggccgaccccttcagcgccatgcaccccgggcatggaggagtaaatcagttaggaggcgtgttcgtaaacggtcgccctctaccggatgttgtaagacagcgaatagtggagctggctcatcagggcgtgcggccctgcgacatctctaggcagctgcgcgtgagccacggctgtgtgagcaaaatcctgggccggtactatgagaccgggtctatcaagcctggagtcatcggtgggtccaagccgaaggtagccacaccaaaggtggtggacaaaatcgccgagtataagagacagaacccaacaatgttcgcttgggagattcgtgacagactgctggccgaaggaatttgcgacaatgatacagtgccgagtgtgtcttccattaatcgtatcattaggacaaaagtccagcagccttttcacccaactccagatggggctgggaccggcgtcacagcacctggccacaccatcgtcccttcaacggcgtcccctccagtgagttcggctagtaacgatcccgtcggctcttactctatcaacggaatcctcgggattccacggagtaatggcgagaaacgaaaaagagacgaggtggaggtttacacagatcctgcccacatccgcggagggggaggcctgcatctggtgtggaccttgagggatgtgtccgaaggcagtgtgccaaatggtgacagccagtctggagtagactccctgcggaagcacctgagggctgatacctttacgcagcaacaattagaggccttggatcgagtgtttgagcgcccgtcttacccggacgtgttccaggcctcagagcacataaaaagtgagcaagggaacgaatattcgctgcccgctcttaccccgggcctggatgaggtgaagagcagtctttcagcctccactaatcctgagttaggctcgaatgtgtccggcacccagacttaccccgttgtaacaggccgcgacatggcctctaccaccctgcccggctatcccccacacgtaccaccaaccgggcagggatcttacccgactagtactttagcggggatggtgccgggctctgagttctcaggaaacccttacagccatccacagtacaccgcttacaacgaagcgtggcgtttctccaaccctgcgctgctgtcatccccatattattacagcgctgcccccaggggatccgcaccagcagccgccgccgcagcttacgatagacactag

SEQ ID NO: 198471 - DNA, 621 bp, synthetic construct
  misc_feature 1..621: note = Description of Artificial Sequence: Synthetic coding sequence
  source 1..621: mol_type = other DNA
atgaccaccctggccggcgccgtgccccggatgatgcggcccggccctggccaaaattacccccggtctggcttccctctcgaggtcagcacaccactgggccagggacgcgtgaatcagttaggcggagtgtttatcaacggccggccccttcccaaccatatacgccacaagatcgtggagatggcccatcacggtatcagaccatgtgtcatttcacggcaacttagggtgtcccatgggtgtgtgagtaaaatcttatgtcggtatcaggagaccgggtccattagacccggcgccatcgggggctcaaaacccaaacaagtgaccacaccggatgtggagaaaaagatcgaagagtataagagagagaaccccggtatgttttcttgggagatccgagataagctattgaaggacgctgtgtgcgataggaataccgtccccagcgtgtcctcgatttcacgtatcctgagatccaaatttggaaagggggaggaagaggaagccgatctcgagaggaaggaagcagaagagagtgaaaagaaggccaaacactccatcgacggcattctgtccgaacgcggaaaagcgcttgtcagcggtgtgagctctcactag

SEQ ID NO: 198472 - DNA, 1224 bp, synthetic construct
  misc_feature 1..1224: note = Description of Artificial Sequence: Synthetic coding sequence
  source 1..1224: mol_type = other DNA
atgaccaccctggccggcgccgtgccccggatgatgcggcccggccccggacaaaattacccacggtctggcttcccactggaggtctccactcctttgggccagggaagggtgaatcagctcggaggagtgtttattaacgggcgccccctcccaaaccatattcgacacaaaatcgtagagatggcacaccacggaatcagaccttgcgtcatttcccggcagctgcgggtgagtcacgggtgtgtgtcaaagatcctgtgccggtatcaggagactgggtccattcgccccggcgccattggaggatccaagcctaagcaggtgactaccccggatgtggaaaagaaaattgaggagtataagcgtgaaaatcctggaatgtttagctgggagatccgtgacaaactcttgaaagacgctgtctgtgacagaaatactgtaccctcagtgtcatccatttcaagaatactgaggtcgaagttcggaaaaggcgaggaggaggaagcagacttggagcgcaaggaagcagaagaaagtgaaaaaaaggccaaacattccattgacggcattctgtctgagagagcctccgcgccccaaagtgatgaagggtcagacattgacagtgagcctgatctccctctgaagagaaagcaacggcgctctaggaccaccttcacagccgaacagcttgaggagctggaaagagcattcgaaagaacccattatcctgatatctataccagggaggagctggcccagagagccaaactgactgaggcccgagtacaggtctggtttagcaacaggcgcgcccggtggcgcaaacaagcaggcgccaaccagctaatggcatttaaccaccttattccaggtggttttcctcccacagcaatgccaactttgcccacctaccaactctcggagacaagttaccaacctaccagcattccgcaggccgtatcagacccttcgtcaaccgtgcaccggcctcagcctttaccaccatccaccgtgcatcaatccacaatacctagtaatcccgactcaagcagtgcttattgcctacccagtactagacatggctttagttcatacaccgactctttcgtgcctccttctggcccgagcaaccctatgaacccaactatcgggaatggactatcaccccaagttccattcattatctcaagccaaatcagcctcggtttcaaatccttctag

SEQ ID NO: 198473 - DNA, 1212 bp, synthetic construct
  misc_feature 1..1212: note = Description of Artificial Sequence: Synthetic coding sequence
  source 1..1212: mol_type = other DNA
atgaccaccctggccggcgccgtgccccggatgatgcggcccggccccggccaaaactacccccgaagtggattccccttggaagtaagcacacccttgggccaggggcgcgtcaatcagctcgggggggtcttcatcaatggaaggccacttcccaaccacatccgtcacaaaatcgtggagatggcgcaccacggaattcggccttgcgtcatatcacggcagctccgcgtttcccacggctgcgtcagtaagatactgtgccggtaccaggagaccggcagtattaggcctggggccattggcggcagcaaacctaagcaggtgacgacaccggatgtggagaaaaagatcgaggagtacaagagagagaatcctggtatgtttagctgggagattagagacaaactcctgaaagatgctgtgtgtgataggaacacggtgccctccgtaagcagcatctcacggattttgcggagcaaattcggcaagggtgaggaggaggaggccgacttggagcgtaaggaggctgaggaatctgagaagaaggccaaacattctattgacggcattctgagcgaacgcgcctcagctccccagtcagacgaagggtcggatatcgattcggaacctgacctgcccctgaagcgcaagcagcggcgtagccggaccacgttcacggccgagcagcttgaggagctggaacgtgctttcgaaaggacccattatcccgatatctacaccagggaagaacttgcccagcgggccaaattgaccgaggccagagtgcaggtctggtttagtaaccgacgggccaggtggagaaagcaggccggtgccaaccagctgatggctttcaatcatctcatccccgggggcttcccgcccaccgcaatgccaactttgccaacgtatcagctgtccgaaacctcttaccagcctacttccattccccaggcagtaagtgatcctagcagcacagtgcacaggccacagcccctgccgccaagcaccgtgcaccagagtaccatcccttccaaccccgattcctccagcgcatactgtcttcccagcacgcgccatggcttttctagctacacagactcctttgtgcccccttccggcccatctaaccccatgaatcccacgatcggaaacggcctttcccctcaagtgcctttcatcattagctctcagatcagccgaaaatag

SEQ ID NO: 198474 - DNA, 1440 bp, synthetic construct
  misc_feature 1..1440: note = Description of Artificial Sequence: Synthetic coding sequence
  source 1..1440: mol_type = other DNA
atgaccaccctggccggcgccgtgccccggatgatgcggcccggccccggccagaattacccccggtctgggttccccctagaagttagcactccgctgggtcaggggagggtgaaccaactggggggtgtgtttataaatggcagaccgttacctaatcacatccgacataaaattgttgaaatggcccaccacggaattcgtccatgcgtaattagtcgccagctgcgtgtaagccatggctgcgtatccaagatcctctgccggtatcaggaaacaggatctatccgccccggagccatcggcggctcaaaaccaaagcaggtgacaacacccgacgtggagaaaaagatcgaggaatataagcgggagaacccaggcatgtttagctgggagatcagagacaaacttctgaaggacgctgtatgcgacaggaataccgttcctagtgtgagctccatttcgcgcatcctgcgttccaaattcggcaaaggcgaggaagaggaagctgaccttgagaggaaggaggccgaggaaagtgagaaaaaagctaagcactcaattgacgggatcctgagcgagagggcatctgccccccaatcagacgaaggcagcgacatagactccgagcccgatctcccgctgaagcgcaaacagcggcgatcaaggaccacgtttactgccgaacagctggaagaactggaacgggcgtttgagcgcacccactaccccgacatttacacccgggaggaacttgcccagagggccaaattgacagaggctcgggtccaggtgtggtttagcaaccgacgcgcccgttggcgcaagcaagcaggagccaaccaacttatggccttcaaccaccttattccaggcgggttccctccaactgccatgcccacgttgccaacgtaccagctaagtgagacttcttatcagccgacttcaatccctcaggcggtaagcgatcctagttctactgttcatagaccccagcctttaccaccctctaccgtgcaccagtccaccattccgtccaaccctgatagctccagtgcttactgtctcccctctactcgccacggcttcagctcgtacacagactcttttgtccccccaagcggcccctccaaccccatgaatccgactatagggaatggactatctcctcaggtgatgggtctcctgacaaatcacggtggcgtgccgcatcaacctcagactgactacgcactgagtccattaaccggcgggctcgagccgacgactaccgttagtgcatcctgctcccagcgtctcgaccacatgaagtccctcgatagtctccctacctcacagtcctactgcccacctacctattccaccacaggatatagcatggatccggtgactggctatcagtacggacagtacggacaatctaagccatggaccttttag

SEQ ID NO: 198475 - DNA, 1518 bp, synthetic construct
  misc_feature 1..1518: note = Description of Artificial Sequence: Synthetic coding sequence
  source 1..1518: mol_type = other DNA
atgaccaccctggccggcgccgtgccccggatgatgcggcccggccctgggcagaactatccccgtagtgggtttccactggaagtgtccaccccactcggccagggacgcgttaaccagctgggcggggtttttattaacggcagaccactgcctaaccatatccggcacaagattgtcgagatggcccaccacgggatcaggccatgcgtcattagccggcagcttagggtgtcacacggctgcgtctcaaagattctgtgcaggtaccaggagactggcagcatacggccaggtgccatcggtggttcaaaacctaagcaagtgacaacccctgatgttgaaaaaaagattgaagagtacaagagagagaaccccggtatgttctcctgggaaattagagataaactcctgaaggacgctgtctgcgataggaatacagtcccctctgtgagctcgatcagccggatcttacgaagcaagttcggcaagggcgaagaggaagaggctgacctcgaacgcaaagaagcagaagagagtgagaagaaagcgaaacatagtattgacggtatactatcagaaagagcctccgctccccagtcagatgaagggagcgacatagattccgagccagacttaccgctcaaacggaaacaacggcgttcacgtacaaccttcaccgcagagcaattagaggaactggagcgcgctttcgaacgaactcattatcccgatatttataccagagaggaactggcccagagggccaagctgaccgaggcccgagtgcaagtatggttttccaaccgacgagcccgctggaggaaacaagctggcgctaaccaactaatggcctttaaccacctcattcctggcggcttccccccaactgccatgcccaccctaccaacctaccagctcagcgagacgtcctatcagcctacctcaatcccccaggcagtttccgatccatccagtacagtgcatcgaccacagcctctcccaccctcaacagtgcaccagtctaccattccatccaaccctgatagttcatcagcctactgcttgccttctacacgccacggattctccagttacacagacagctttgtcccccccagcggaccttccaacccaatgaaccctacgattggaaacgggttgtctcctcaagtgatgggactcctcaccaaccatgggggggtgcctcatcagcctcaaaccgattatgctctgtctcctttaacgggaggtttagaaccaaccacaaccgtcagcgccagctgtagccagaggttagatcacatgaagtcgctcgactctcttcccacttctcaaagttactgccccccaacatactccacaaccggctacagtatggatcccgtgacgggttatcaatatggacagtatggccagagcgcgtttcactatctaaaaccagatattgcgtggtttcagattctgctgaacacttttgataaatcaagcggcgaggaagaagatcttgaacagtag

SEQ ID NO: 198476 - DNA, 1455 bp, synthetic construct
  misc_feature 1..1455: note = Description of Artificial Sequence: Synthetic coding sequence
  source 1..1455: mol_type = other DNA
atgaccaccctggccggcgccgtgccccggatgatgcggcccggcccggggcagaattatcctagatccggcttcccgttggaagttagtacgccgctgggtcagggcagagttaatcaactcgggggtgtcttcatcaacggtcggccactcccgaaccacataagacacaagatcgttgaaatggcccatcacggaattagaccctgtgtgatctccaggcagttgagggtatctcatggctgtgtctctaagattctgtgccgataccaggaaacgggttccatcagaccgggggctattggcggatcaaaacccaagcaagtgaccacccctgacgttgaaaagaaaatcgaagaatacaagcgcgaaaatcccggtatgttttcctgggaaatccgagacaaactgttgaaggatgctgtctgtgaccggaacacggtaccatctgttagtagtattagtcgcattctcagatcaaaatttggcaaaggtgaggaagaagaagctgacctggagagaaaagaagccgaagagagcgaaaagaaagccaaacactctatcgacgggattctgtccgaaagggccagtgcccctcagtccgacgaggggagtgacatagatagcgaacctgatttgcctttaaagagaaagcagagacgcagccgtacgaccttcacagccgagcaactggaagaactggaacgcgcttttgaacggacacactatccggatatttacaccagagaggaactggcacaacgcgccaagctgacagaggcccgtgtgcaagtctggttctcaaacagacgcgcgagatggcgcaagcaggccggtgcaaatcaattgatggcattcaatcatcttatccctgggggattcccacccactgcaatgcctacgctccccacataccagctatctgagactagctatcagccgacctccatcccccaggctgtatctgatccatccagcaccgtccatcgccctcagccacttcccccttccactgtgcaccaatcgacaatcccgtcaaatcccgacagcagttcagcgtattgcttaccttccacacggcacggcttctccagttacactgatagcttcgtacctccctcaggaccttcaaacccaatgaaccctaccattggaaatgggcttagcccgcaagtaatggggttgctcaccaatcacggtggagtcccacaccagccacagacagattacgctctatctcccctaacgggcggactcgagcccaccacaacagtgtcagcttcctgtagtcagaggctggaccacatgaaaagccttgacagcctccctacatcccagagctactgccctcccacttacagcaccacgggatactctatggatccggttaccgggtaccagtatggacagtacggccagtccgccttccactacctgaaaccagatatcgcttag

SEQ ID NO: 198477 - DNA, 1452 bp, synthetic construct
  misc_feature 1..1452: note = Description of Artificial Sequence: Synthetic coding sequence
  source 1..1452: mol_type = other DNA
atgaccaccctggccggcgccgtgccccggatgatgcggcccggccccggacaaaattatccacgctccggcttccccttggaagtgtccacccccctgggtcagggacgggtgaaccagttggggggagtcttcattaacggccgccccctacccaaccacatcagacataagattgtcgagatggctcaccatgggatcagaccatgtgttatttcccggcaacttagagtcagtcatggttgcgtgtcaaaaatactgtgcagataccaggagacaggatcaataaggccaggcgctatcggcgggtcgaaacctaaagtcactacccctgatgtcgaaaaaaaaatcgaggagtacaaacgggagaaccccggcatgttctcttgggagatcagagacaaattgctgaaagacgccgtgtgcgatcgcaacaccgtgccctccgtctctagtatcagtcggatacttaggtctaagtttggaaagggcgaggaggaggaggccgacctggaaaggaaagaagctgaggaaagcgaaaagaaagcgaagcattcaattgacggtatattgagtgagcgggcatccgcccctcagagcgatgagggttccgatattgattcagagcccgatctcccccttaagcggaagcagcggagaagtagaactacgttcactgcagagcaattggaggagctggaacgtgcgtttgagagaactcattaccctgacatatatacaagagaagaactggcccaaagggccaagttgacagaagccagggtccaggtgtggttcagtaaccgacgggcccggtggcgcaaacaagccggcgctaaccagcttatggcttttaatcacttgatcccaggcggatttccacccacggctatgcctacactgcctacttaccagctcagtgagacatcctatcagcctacctccatacctcaggccgtctccgatccctcttctaccgttcatagacctcagccactcccaccctccaccgtccaccaaagcaccattccatccaaccccgacagctcttcagcttactgtttgcccagcactaggcacggattctcctcatacactgattctttcgtgcctcctagcgggcctagcaatccaatgaacccaacaataggaaacggccttagtccacaggtcatgggactcctgacaaaccacggcggtgtgcctcaccaaccccagacagactacgcactgtctcctctgaccggaggtctggaacctaccactaccgtgtccgcatcttgttcacaacgcctggatcatatgaaatccctcgactccctcccaacatcccagtcttactgccccccaacatattctaccacagggtatagtatggaccccgtgaccgggtatcaatatggtcagtatgggcaatctgcgtttcattacctcaagcccgatattgcatag

SEQ ID NO: 198478 - DNA, 648 bp, synthetic construct
  misc_feature 1..648: note = Description of Artificial Sequence: Synthetic coding sequence
  source 1..648: mol_type = other DNA
atgaccaccctggccggcgccgtgccccggatgatgcggcccggccctggccaaaattaccctcgatctgggtttccactggaagtgtccacacctctgggccaggggcgcgtgaaccaactggggggtgtcttcataaacggaagaccactgccgaatcacatccgtcacaagattgtcgagatggcccatcacggcatccggccttgcgtcatttcgagacagctaagggttagccatggatgcgtgtccaagatactgtgcaggtatcaagaaaccggctcaatccgtcccggcgccatcggaggatctaagcctaaacaggttacaacacccgacgtggagaaaaaaatcgaggagtataagcgagaaaatcccggcatgttctcttgggagattagagacaaactcctgaaagacgcagtctgcgaccggaacactgtcccgtcggtgagcagcatctctcgcattctgaggtcgaaatttggcaaaggtgaagaggaagaagctgacctggaacggaaggaagctgaggaatccgagaaaaaagccaaacattccattgacgggatcctgtcagaacggggtaagcggtggcgcctgggcagacggacgtgctgggttacctggcgagcctctgcgtcttag

SEQ ID NO: 198479 - DNA, 822 bp, synthetic construct
  misc_feature 1..822: note = Description of Artificial Sequence: Synthetic coding sequence
  source 1..822: mol_type = other DNA
atgcaccaggacggcatcagcagcatgaaccagctgggcggcctgttcgttaatggacgacccctccccctcgacacccggcagcagatcgtgagactggccgtgtcagggatgagaccatgcgacatctctcggattctgaaagtgagcaatggttgtgtctcaaaaattttgggacgctactatcgcacgggtgttctggagccgaagggcataggggggtctaaacccagactcgctactccacctgtggtcgcaagaattgctcaactcaaaggggagtgtccagccttgtttgcctgggagatccagcgccagctgtgcgctgagggcctgtgtacccaggacaagacaccatccgtttcctcaatcaacagagtgctcagagctctgcaggaagaccaaggtctgccatgcacacgcctgagatcccccgctgtgcttgccccagcagtgcttacacctcacagcgggagtgagacaccccgggggacccacccaggcactggccatcgcaaccggactatcttctccccctcgcaggccgaggcgctggaaaaggaatttcaaagagggcagtaccccgactctgttgctagaggcaagctggctacggccactagcttgccagaagatacagtgagagtgtggtttagtaaccggagagctaagtggaggagacaggagaagctcaaatgggagatgcaattgcctgccgttccatggcagtgcgctcactcttcccctgcctgcccaggaaccaccggatcactccttctgtccgctgtgctcggcaactcgaccagaaaggtgtccgagtag

SEQ ID NO: 198480 - DNA, 1032 bp, synthetic construct
  misc_feature 1..1032: note = Description of Artificial Sequence: Synthetic coding sequence
  source 1..1032: mol_type = other DNA
atgaaccagctgggcggcctgttcgtgaacggccggcccctgccccttgatacaagacagcagatcgtcagacttgccgtgtctggcatgcggccatgtgacattagtcgtattcttaaagtgtctaatggatgcgtctctaagattttgggccgctactatcgcactggagttctggagcccaaagggataggcggatctaagccaagactggccactccacccgtggtggcgcggattgcgcaactgaagggagagtgcccagccctattcgcctgggagatacagcgacaactctgcgccgaaggcctgtgtacccaggacaaaaccccttctgtgtccagtatcaacagggttctgcgcgccttacaggaggatcaaggcttgccctgcacccggctacgcagccccgctgttcttgcaccagcagtcctgactccccatagcggaagtgagactcctaggggaacccatccggggacaggtcacaggaatcgaaccatttttagtccatctcaagcagaagccctcgaaaaagagttccagcgggggcagtaccctgacagcgtggctcggggcaaactggctacagccactagtctgcccgaggataccgtaagggtgtggttttcaaacagacgggctaaatggaggcgacaggagaagctgaaatgggaaatgcagcttcccggagcatctcaaggactgacggtgccgagggtcgcaccgggaattatttccgcacagcagagtcctgggtcagtgcctacagcggcattgcccgcactcgagcctctcggacccagttgctaccaactgtgttgggctaccgcccctgagaggtgtctatctgacacacctcctaaagcatgtctcaagccctgctggggccacctgcctccgcagcccaactcactggacagcggcttgttgtgcttgccatgcccttcctcccactgtcacctcgccagtctgagcggcagtcaagcattgttgtggcccggctgcccactcctgtatggcctcgaatag

SEQ ID NO: 198481 - DNA, 1047 bp, synthetic construct
  misc_feature 1..1047: note = Description of Artificial Sequence: Synthetic coding sequence
  source 1..1047: mol_type = other DNA
atgcaccaggacggcatcagcagcatgaaccagctgggcggcctgtttgtcaatggtagacccttgcctctcgatactaggcaacagatcgtccgtttagcagtgtccggtatgcgaccttgcgatatctctcgcatcctaaaagtctcgaatggatgtgtttcgaaaatcctaggtcggtactaccggacaggcgtgctggagcctaaaggaattggcggaagtaaacctaggctcgccaccccccccgtggttgcacggattgctcagctcaaaggtgagtgtcccgcactgttcgcttgggagatccagcggcagctgtgcgccgaaggcctttgtactcaggacaaaactccttcggtgagctctatcaaccgcgtgctccgtgcattgcaggaggatcagggattaccatgcactcgcctgcgaagtcctgccgtactggcgccagcagtgttgacccctcactccggcagtgaaactccccgcggaacacatcccggtaccggtcatagaaaccgaaccatattctcaccctcccaggctgaagcacttgagaaagagtttcagagaggacagtatcccgattcagtggcaaggggcaagctggccactgctacctctcttccggaggatacagtccgggtgtggttctctaataggcgggcaaaatggagaagacaggagaaacttaaatgggagatgcagttgccaggtgcaagccagggactgactgtacctcgcgtagcacctggcatcatcagcgcgcagcagtctcctgggtctgtccctactgctgccttgcccgcattggaaccacttggtccttcatgttaccagctgtgttgggccacagctccagagcgctgcttgtcagacacaccacccaaggcttgcctgaagccgtgctgggattgcggcagctttctactgccagtcatcgctcctagctgtgttgacgtggcatggccgtgcttggacgcctcccttgcacatcacctgattgggggagcaggcaaggctactcccacccacttcagccattag

SEQ ID NO: 198482 - DNA, 1563 bp, synthetic construct
  misc_feature 1..1563: note = Description of Artificial Sequence: Synthetic coding sequence
  source 1..1563: mol_type = other DNA
atggccgccctgcccggcaccgtgccccggatgatgcggcccgccccaggccagaactatcctcgcactggcttcccgctggaggtgagcacacctctcggccaggggcgtgttaaccagttgggaggggtttttatcaacgggcgtccactgccaaatcacatccgccataaaattgtggagatggcccaccacggaatccggccgtgcgtgatatcaaggcagctccgcgtcagccatggctgtgtaagcaaaattctttgtcggtaccaagagacgggctctatccggccgggagcgatcggcggttctaaacctcgacaggtcgctacacctgatgttgagaagaaaatagaggagtacaaacgcgaaaaccctggtatgtttagctgggagatccgcgatagactgctcaaagatggacattgcgacagatctaccgtgccttccggcttagtctcctcaatttcacgcgtgctgcgaatcaagttcggcaagaaggaagaggaagatgaagctgataaaaaggaagacgacggcgagaaaaaagctaagcactctatagatggtatattaggcgataagggaaaccgcctggatgaggggagcgatgtggagagtgaacctgacctgcccctgaaacgcaaacaaaggcggtcgcggaccacatttactgccgagcagctggaggagttggagaaggcctttgagcgtacccattaccccgacatttatacccgcgaggagttggcacagcgaaccaaactcacagaagccagagtgcaagtctggttcagtaaccgaagggcgcggtggagaaagcaagccggcgccaatcagctagcagcctttaatcatcttctgccaggaggtttcccccctaccgggatgcctacattacccccttatcagctcccggatagtacttaccccacaacgaccatctcacaggatggcggaagcacagtgcataggccccagccactgcctccatctaccatgcatcagggagggttggccgcagctgcagccgcggccgacacgtcttccgcatatggcgcacgacacagcttctcatcgtattccgatagttttatgaacccggcggccccaagtaaccatatgaatcccgtgagcaacgggctcagtccccaggtgatgagtatactaggaaatcctagcgcagtgcccccccagccccaagccgattttagcattagccctctgcacggcggcttggacagtgctaccagtattagcgcgagctgcagccagcgggccgactccataaaacctggtgattcattgcccacaagccaagcttactgcccacccacctattctacaacagggtactccgttgatcctgtcgccgggtaccagtatggccagtacggccaaagcgagtgtctcgtgccgtgggctagccccgtgcccataccgtcacccactccacgagcctcttgcctttttatggaatcctataaggtggtcagtggctggggtatgtccatctctcagatggagaagctcaaatcctctcagatggaacagttcacatag

SEQ ID NO: 198483 - DNA, 1557 bp, synthetic construct
  misc_feature 1..1557: note = Description of Artificial Sequence: Synthetic coding sequence
  source 1..1557: mol_type = other DNA
atggccgccctgcccggcaccgtgccccggatgatgcggcccgcccccgggcagaattaccccaggaccggcttcccactcgaggtttctacccccctgggacagggcagggtgaatcagctgggtggcgttttcatcaatggcaggccactgccaaatcatattagacacaaaatcgttgaaatggctcatcatggaatccgaccttgtgtaatctctcgacagctgagagttagccacggctgtgttagcaagattctttgtcggtaccaagagaccgggtctatccggcctggggcgattggaggctcgaaaccgaggcaggttgcgacccctgacgtcgaaaaaaaaattgaagagtataagcgcgaaaaccccggcatgttctcttgggaaattcgcgatcgcctgttgaaagacggccattgtgataggagcacggtgcctagcgtgtcaagcataagcagagtccttcgcattaaatttggcaaaaaagaggaggaagacgaggctgacaaaaaggaggacgacggcgaaaagaaggcaaaacactcaatcgatggtatcctgggcgataaaggcaatcggctggacgagggatcagacgtcgaatcagaaccggacctgcctctgaagcggaaacagaggcgcagcagaacaacgttcaccgctgaacagctggaagaactcgagaaggcatttgagcgaacccactacccagacatttataccagagaggagctagcacaaaggactaaacttactgaggcacgagtgcaagtgtggttcagtaacaggcgcgcccgatggcggaagcaggctggcgcaaaccagttggcagcctttaatcatctactacccgggggtttcccgccaactgggatgcctacactgcctccataccagctgcccgactcaacatacccaacaactacaatcagtcaggacgggggctcaacagtgcatcgcccgcagcctctgcccccgagcacaatgcaccagggcggattggcggccgcagccgcagctgctgatacctcttcggcatatggtgcacggcatagcttcagttcttactctgactccttcatgaaccccgctgcaccatcaaaccacatgaatcccgtaagcaatggcctttctcctcaggtgatgagcatcctggggaacccaagcgcggttcccccgcagccacaggcagatttctctatttctcctctgcacggaggtctggatagcgcaacatctatcagtgcatcgtgctcgcagcgggcagattcgatcaagcccggggactccctgccaaccagccaagcctactgtcctccgacatattccacgacggggtattcagtggaccccgtggccggctatcagtatggacaatatggccaaagcgagtgcctggtgccatgggcatcccctgtgccaattcctagcccgacacctcgcgcgagctgtctctttatggaatcatacaaggtggtgagtggctgggggatgagcatcagtcagatggagaagctcaagtcatcacagatggagcagtttacatag

SEQ ID NO: 198484 - DNA, 1518 bp, synthetic construct
  misc_feature 1..1518: note = Description of Artificial Sequence: Synthetic coding sequence
  source 1..1518: mol_type = other DNA
atggccgccctgcccggcaccgtgccccggatgatgcggcccgcccctggacagaactaccccagaaccggctttcctttggaggtctctacacccctgggacagggccgtgtgaatcagctaggtggtgtctttattaatggacgccccctccctaatcacataaggcacaagattgtcgaaatggctcaccacggaatacgcccttgtgttatctcaaggcagctaagagtgtcccatggctgtgtctccaagatcctgtgtcggtatcaggagaccgggtcgattagacccggagccattggagggagtaagccgcggcaggtggccacccccgacgtggaaaagaaaatcgaggagtacaagcgcgagaatcccgggatgttttcctgggagatccgagaccgacttctaaaagatggacactgcgacaggtccaccgttccctctggattagttagttccatctcacgcgttctgcgcatcaagttcggcaaaaaggaggaagaagacgaagctgataagaaggaagacgacggcgaaaaaaaagcgaagcactcaattgacggtattctcggcgataaggggaacagactcgacgagggctcagatgtggagtctgaaccagatctacccctgaagcggaagcagcgcagatcccgcactacttttaccgcggagcagcttgaagagctcgaaaaagccttcgagcgaacacactatcccgacatttacacacgggaggagcttgcccagagaactaagctgacagaggctcgggtgcaagtctggttttcgaatcgaagggctcgttggaggaaacaagccggggccaaccagttagcagcgtttaaccatcttctccctggcgggttcccacctactggaatgccaacactgcccccataccagctgcctgacagcacttaccctacgactaccatttcgcaggatgggggctctaccgtgcataggccgcaaccattgcctccaagtaccatgcaccagggaggcttagcggcggcagcagctgcagcagacacatcatctgcctacggtgccagacattccttctctagctacagtgactcattcatgaatcctgccgcccccagcaaccatatgaacccggtcagcaatggattaagcccccaggtcatgagtattctgggcaatcccagcgccgtaccgcctcagccacaagcagatttctccatatctccactgcacggaggcctggactctgctacctcaatctccgcgtcctgcagccagcgggcggacagcattaagccaggagatagcctgcctacatcacaggcatactgtcctcccacatacagtaccaccgggtattccgtggaccccgtggccggctaccaatacgggcagtacggccagaccgcagtggactacctagccaagaacgtgtccctgagtacccagaggcgaatgaagcttggagaacacagcgcagtactcggcctgctaccggtggagaccggacaggcatattag

SEQ ID NO: 198485 - DNA, 1026 bp, synthetic construct
  misc_feature 1..1026: note = Description of Artificial Sequence: Synthetic coding sequence
  source 1..1026: mol_type = other DNA
atggagcccgccttcggcgaggtgaaccagctgggcggcgtgttcgtaaatggccgccctcttcccaacgctattcgccttagaatcgttgagctggctcaactgggcattcgcccctgtgatattagtcgccaactgagagtgtcacacggatgtgtaagtaaaatcctcgcccggtacaatgagactggatccatccttcctggggctatcggcgggtccaagcctcgagtgaccaccccaactgtcgtaaagcacatccggacatacaaacagcgggacccaggaattttcgcctgggaaattagggatagacttctcgctgacggcgtgtgcgacaaatacaatgtgccttccgttagtagtatttccaggattctgcgcaacaagatcggcaacctggcacaacaaggccattacgattcctacaaacaacaccagcccaccccgcagccagccttgccttataatcacatttacagctacccatcgcccatcaccgccgctgcagcaaaagtacccacacctcctggggtgcctgcaattccagggtccgtcgccatgccacgaacttggccatcgagtcacagcgtgacggacatcctggggattcgctctatcactgatcaagtaagcgacagctccccttaccactcgccaaaagtggaggaatggagcagcctgggacgcaacaactttcccgcggcagctccacatgcggtgaatggcctcgagaagggagccctagaacaagaggccaaatacggccaggcccccaacggcctccccgcggtgggctcctttgtatctgctagttccatggctccatacccaacccctgcccaggtttcgccttacatgacctattccgctgcaccttctggttatgtcgctgggcacggatggcagcatgcaggcggcacaagtctctcaccgcacaattgtgatataccagcttccctggcctttaagggaatgcaagcagcccgcgaaggtagtcacagtgtgaccgcatctgctctttag

SEQ ID NO: 198486 - DNA, 1026 bp, synthetic construct
  misc_feature 1..1026: note = Description of Artificial Sequence: Synthetic coding sequence
  source 1..1026: mol_type = other DNA
atggagcccgccttcggcgaggtgaaccagctgggcggcgtgttcgtgaacggcagacctttgccaaacgccatccggctccgaatagtcgagctagctcagctgggcatccggccatgcgatatcagcagacaactaagggtatcgcacggttgcgtgtccaaaatccttgctcggtacaatgaaaccggctcaattttgcccggcgcgattggaggtagcaaaccccgcgtgactacgccaaccgtggttaaacatatccgcacctacaagcagcgagatcccggcatctttgcctgggaaataagagacagattactcgccgacggagtgtgcgataagtataatgttccaagcgtgtcttctatatccagaattttgcgcaataagattggcaacctggctcagcaggggcactacgattcttacaagcagcaccaaccgacaccccaaccggctttgccatataatcacatctactcttacccttcccccattacggccgccgcagcgaaggtccccacccctcctggcgtgcccgcaatccctggaagtgttgcaatgcccagaacctggcctagttcccactctgtgactgacattctgggcatcagaagcataaccgaccaagtttcagacagctctccgtatcactctcccaaggtggaggagtggtcatctcttggccgcaataactttcctgcagctgcaccacacgctgtgaatggcctcgagaagggcgcgctcgagcaagaggctaaatatggccaagccccgaatggcctgcctgcagttggcagtttcgtctcggcgagctccatggctccgtatcccacgcctgctcaagtgtccccctacatgacctatagtgcggccccatctgggtatgttgcagggcacggctggcagcacgcaggaggaacgagtctctccccgcataactgcgacatacccgcctcgctggccttcaagggaatgcaggccgctcgggaagggagccactccgtgaccgcatctgcattgtag

SEQ ID NO: 198487 - DNA, 183 bp, synthetic construct
  misc_feature 1..183: note = Description of Artificial Sequence: Synthetic coding sequence
  source 1..183: mol_type = other DNA
agcgacagcagcccctaccacagccccaaggtggaggagtggagctctctgggcagaaataacttccccgccgcggcaccccacgccgtgaatggacttgaaaagggcgcacttgagcaagaagccaaatatggacagatccaaaacttcttcctgctcatgatcagccggctgaagttctag

SEQ ID NO: 198488 - DNA, 912 bp, synthetic construct
  misc_feature 1..912: note = Description of Artificial Sequence: Synthetic coding sequence
  source 1..912: mol_type = other DNA
atgggccggcccctgctgctgcccctgctgcccctgctgctgccccctgctttcttgcaaccaagtggatccacggggtcaggacctagctatctctacggagtgacccaacctaagcacctgagtgccagtatggggggctctgtggaaattccatttagcttttattacccatgggaactggctaccgcaccagatgtaagaatttcttggcgccggggacacttccaccgccagtctttctactccaccaggccgccctctattcacaaagactatgtgaaccggctttttttgaactggaccgaaggacagaaaagcggctttctacggatctccaatctgcagaagcaggatcaatccgtttacttttgccgcgtggaactggatacgagaagctcaggacgccagcagtggcagtccatagaaggaaccaaactgagcattacccaagcggtcaccaccacaactcaaagaccctcttccatgactaccacttggcggctgtcttcgacgacaacaacaaccggtctgagggtgacccagggcaaaaggaggtccgatagctggcacatttctttagaaacggctgtgggagtcgccgtggccgtcactgtcctgggtattatgatactcgggcttatctgcctgctcagatggcgcagaaggaagggtcaacaacgtactaaggcaaccactcccgcaagggagccatttcagaacactgaagagccctacgaaaacatcaggaacgaaggccagaatactgatcccaagttaaatccgaaggatgacggcatcgtctatgcctcactggccctgagtagttcgacttccccccgagccccaccctcacaccggcctttgaagtccccgcagaacgaaaccctctactccgttttaaaagcctag

SEQ ID NO: 198489 - DNA, 693 bp, synthetic construct
  misc_feature 1..693: note = Description of Artificial Sequence: Synthetic coding sequence
  source 1..693: mol_type = other DNA
atgggccggcccctgctgctgcccctgctgcccctgctgctgccccccgcctttctccagccatcgggctccactggctctggcccaagctatttatacggcgttacacaaccaaaacacttgtctgccagcatgggtgggtctgtcgaaatacccttttccttttattacccttgggaacttgcgacagcccccgacgtgcgaattagctggcgacggggtcactttcatcggcagagtttctacagcacacgcccaccaagcatccataaggattacgttaaccgcctgtttcttaattggaccgagggtcaaaagtctggtttcctacgcatctcaaacctccaaaagcaggatcaatccgtatacttctgccgcgtcgagctcgacacgagatcctcagggcgacagcagtggcagagcattgaagggaccaaactgtcgattacccagggacagcagagaacaaaggctacaacccctgcacgggagcctttccagaatactgaagaaccatatgagaatatccgaaacgaggggcagaacactgaccccaaactcaaccctaaagatgacggaatcgtatatgcctctctggctttgtccagtagcacctcccccagagcacctccgtcccatagacccctgaagagtcctcaaaatgagacactgtactccgtcttgaaggcctag

SEQ ID NO: 198490 - DNA, 528 bp, synthetic construct
  misc_feature 1..528: note = Description of Artificial Sequence: Synthetic coding sequence
  source 1..528: mol_type = other DNA
atgggccggcccctgctgctgcccctgctgcccctgctgctgccccccgcctttctgcagccgagcgggagcaccgggtccggcccgtcatacctttacggtgtgacccagcccaaacacctgtcagcttccatggggggcagtgtggaaattccttttagcttctattacccctgggaactggccaccgctcccgatgtgcggatctcctggagacggggccatttccacagacagagcttctactctactagacctcccagtatccataaggattatgtaaaccgcttgttcctgaattggaccgaggggcagaaaagtggatttctgcgaatctctaatctgcaaaagcaggatcaatctgtatatttctgcagggtcgagctcgacacccgctcttccggtaggcagcaatggcagagcattgaaggaactaaactctctatcacccaggggaatccatcaaaaacccagcggtcacacatgcggatttcagggatgaaggataagatccagataccatcttag

SEQ ID NO: 198491 - DNA, 492 bp, synthetic construct
  misc_feature 1..492: note = Description of Artificial Sequence: Synthetic coding sequence
  source 1..492: mol_type = other DNA
atgggccggcccctgctgctgcccctgctgcccctgctgctgccccccgcctttctgcaaccatcaggatccacggggagcggcccgtcttatctctatggcgtgactcagcccaagcatcttagcgctagcatgggagggtctgtggagattccattctccttctattatccatgggagcttgccacagctcccgacgtacgtatttcatggcgaagggggcattttcacaggcagtctttctatagtacacgacccccctctattcataaggattacgttaaccggttgtttctcaactggactgaagggcagaagtcagggttcttacgaatcagcaatctccagaagcaagatcagagcgtttacttttgtagagtggagctggatacacggtccagcgggcgccagcaatggcagagcatcgagggaacaaagttatccattactcaggggcaacagcggaccaaggcaactacgccagccaggtag

SEQ ID NO: 198492 - DNA, 684 bp, synthetic construct
  misc_feature 1..684: note = Description of Artificial Sequence: Synthetic coding sequence
  source 1..684: mol_type = other DNA
atgggccggcccctgctgctgcccctgctgctgctgctgcagcccccagcttttttacagcccggcggctcaacgggaagcggcccatcatacttatatggcgtcactcaaccaaaacacctgagcgcctcaatgggaggcagtgtagagattcccttttccttttactacccatgggagctggccatagtgcctaacgtccgcatcagttggagacgtggacactttcacggacagagcttttactcgacgcggccacctagtatacacaaggattacgtgaatagactcttcctcaactggactgaagggcaggagtctggattcctaagaataagcaatctccgaaaagaagatcagagtgtttatttttgccgggttgagctcgatactagacgctcaggccggcaacaattgcagagcataaaggggaccaagctgacgatcacacaagcagtgaccacgaccacgacttggcgccctagctcaactacaaccatcgcaggccttcgtgtgacagagagcaaaggtcactctgagtcatggcacctgtcacttgacactgccatccgagtggccctcgctgtagccgtcctgaagacagtgattctgggacttctctgtctgttgcttctgtggtggcgaagacggaaaggtagccgggcgcctagcagcgatttttag

SEQ ID NO: 198493 - DNA, 999 bp, synthetic construct
  misc_feature 1..999: note = Description of Artificial Sequence: Synthetic coding sequence
  source 1..999: mol_type = other DNA
atgggccgggccagctacggcggcagccccgtgggccaccagagctcatctgatcaccccagagcaaaaacttgtcgtagccctgtgcgcgacggaccacgcactctgtgtggagtccctactgtggctctgagtcttcacttccttcgcgaggcttctagcggatccagaacatgcgggcgtcggacaagtctgtgcacttctgcgaagtccagttggacttatcggtctgctctgagacagcctttacacagggccccgctgctaccagggcagctgtgttggagtccccgtcctcttgagaagaacaaggccatgggtcggcccctgctactgccactgctgctgctcctacagccacctgcattccttcagcctggtggatccacaggaagtgggccctcttacctctacggagtgacgcagcccaaacacttgtccgcttcaatgggtggaagcgtggagatccctttttcgttttactacccatgggagctagccatagtccccaacgtccgcatcagttggagaaggggccattttcatggccaatcattttattccacacgaccgccttcgattcataaggattacgtaaatcgcttgttcctgaactggaccgaggggcaagagtccggattcctgcgtatttccaacttaagaaaggaagaccaatccgtgtatttctgccgcgtggagctcgacacacggcgctccgggcgtcagcagttgcagagcatcaaaggtacaaaactgacaatcactcaagctgtcactacgactactacctggaggccttcttcaactaccactatagctgggttaagggtgactgaatccaagggccactccgaaagctggcacctgagtctggatacagccattagagtggctctggccgtcgcggtccttaagacggtcatactgggattgctttgcttactgttgctctggtggcgccggaggaagggctcacgtgcccctagttccgatttttag

SEQ ID NO: 198494 - DNA, 384 bp, synthetic construct
  misc_feature 1..384: note = Description of Artificial Sequence: Synthetic coding sequence
  source 1..384: mol_type = other DNA
atgggccggcccctgctgctgcccctgctgctgctgctgcagcccccagcctttctgcaacccggtgggtctacaggcagtggccccagctacctatacggtgtgacccagccaaagcacctgagtgccagtatgggcgggtccgttgaaatcccctttagcttttactacccgtgggaactggcaattgtacctaacgtcaggatctcctggagaaggggtcatttccacggccagtctttttactccacccggccacccagcatccataaagattatgtgaatcggctgttcctgaactggactgaaggccaagagagcggttttctacgcatctccaacttaaggaaagaggatcagtcagtgtatttttgccgggtttag

SEQ ID NO: 198495 - DNA, 684 bp, synthetic construct
  misc_feature 1..684: note = Description of Artificial Sequence: Synthetic coding sequence
  source 1..684: mol_type = other DNA
atgggccggcccctgctgctgcccctgctgctgctgctgcagccccctgcattcctgcaacctggcggtagtaccggaagcggccccagttatctctatggtgtgacgcaaccaaagcacctgagcgcttccatgggggggtctgtcgagattcctttttctttttactacccctgggaactcgccatcgttcctaatgtccgcatcagttggcggaggggacatttccatggccagagcttctatagcacccgccctccatccatacacaaagactatgtgaatcggttgtttctgaattggacggaggggcaggagagtgggttcctaagaatctctaatctccggaaggaagaccagagcgtctacttctgcagggttgagcttgatacccgccgctctgggcggcagcaactgcaatctatcaaaggcactaagctgaccattacacaagccgtcacgaccacaaccacctggagacctagtagtacgacaactatcgccggactgagggtcactgagagcaaaggccatagtgagagctggcatctttcactagacacagctattcgcgtcgccttggccgtggctgtgctgaaaaccgtcatcctgggcttgctttgcctgttgttactgtggtggaggcgccggaagggatcccgcgcccccagttcagatttctag

SEQ ID NO: 198496 - DNA, 384 bp, synthetic construct
  misc_feature 1..384: note = Description of Artificial Sequence: Synthetic coding sequence
  source 1..384: mol_type = other DNA
atgggccggcccctgctgctgcccctgctgctgctgctgcagccccccgcttttctgcagccgggggggtccactgggtccggccctagttacctctacggggtcacacagcccaagcacttgagcgcatctatgggagggagcgtcgagatccccttcagcttttattacccatgggagctggcaattgtgcctaacgttcgcatctcctggaggagagggcattttcacgggcagagtttctactctaccaggccgccctcaatccacaaggactacgttaaccgacttttcttaaactggaccgagggtcaagagtcaggctttctgcgcatctcgaacttacgaaaagaggaccaatccgtgtatttttgtagagtttag

SEQ ID NO: 198497 - DNA, 183 bp, synthetic construct
  misc_feature 1..183: note = Description of Artificial Sequence: Synthetic coding sequence
  source 1..183: mol_type = other DNA
atgggccggcccctgctgctgcccctgctgctgctgctgcagcccccagcctttcttcagccaggtctgtgcgagcctgctttgagcgaacttgacagagggagcggcgagagactccctcaggatctgaagcctgctgaaggaggtcctgtgtgcgtcttccttccctcaagggccggctag

SEQ ID NO: 198498 - DNA, 366 bp, synthetic construct
  misc_feature 1..366: note = Description of Artificial Sequence: Synthetic coding sequence
  source 1..366: mol_type = other DNA
atgggccggcccctgctgctgcccctgctgctgctgctgcagccccctgcattcttgcagcctgggggctctacaggctcaggcccgtcatatctctacggcgtcacccaaccgaagcatctaagcgccagcatgggcggctctgtggaaattccttttagcttttactacccatgggaactggcaatcgttcccaacgttagaatttcatggcggcggggtcatttccatggtcaatcattttattctacaaggccgcctagcatccataaggactatgtaaatagactgtttcttaattggactgagggacaggagtccgggtttctgagaatttccaacttacgcaaggaagaccagagctag

SEQ ID NO: 198499 - DNA, 384 bp, synthetic construct
  misc_feature 1..384: note = Description of Artificial Sequence: Synthetic coding sequence
  source 1..384: mol_type = other DNA
atgggccggcccctgctgctgcccctgctgctgctgctgcagccccccgctttcctccagccaggggggagcacgggttccggcccttcatatctgtatggagtgacgcagccaaaacacctgtctgcttctatgggcggctcagtggaaatccctttctctttctattacccatgggaacttgccatcgtgcccaacgtacgcatctcctggaggcgcggccactttcatggtcagtcattttatagtactcggcccccctccatacataaggattacgtcaatcgattgttcctgaattggacagaggggcaagagtcaggcttcctgcggatatccaatctccggaaagaggatcagagtgtctacttttgcagggtatag

SEQ ID NO: 198500 - DNA, 684 bp, synthetic construct
  misc_feature 1..684: note = Description of Artificial Sequence: Synthetic coding sequence
  source 1..684: mol_type = other DNA
atgggccggcccctgctgctgcccctgctgctgctgctgcagccccctgccttcctgcagcccggagggtctacaggctccggtccaagctacctgtacggcgtaacacagcccaaacacctgagcgcaagtatgggtggctcagtggagatccctttctccttctattacccgtgggaactcgctatcgttcctaacgttcgaattagctggcgccgcggccacttccacggccaaagcttttattccacccgtccccctagtattcataaggattatgtgaatcgtctcttccttaactggacagagggtcaggagtcgggttttttacggatttccaatttgcgcaaagaggaccagagcgtatatttctgtcgggttgaattagacacccggcgctccgggcgccagcaactgcaaagtataaaaggaactaaactgacgataacccaggccgtgacaactaccactacctggaggcccagttccaccacaaccatagcgggtcttcgtgttactgagtcaaagggccattctgaatcatggcacctatctttggacacagcaattagggtagcgctggccgtggccgtgctgaagaccgtaatcctgggactactctgcctgctgcttctgtggtggcggaggcgcaaggggtctagggccccttcgagtgatttttag

SEQ ID NO: 198501 - DNA, 450 bp, synthetic construct
  misc_feature 1..450: note = Description of Artificial Sequence: Synthetic coding sequence
  source 1..450: mol_type = other DNA
atgggccggcccctgctgctgcccctgctgctgctgctgcagccccccgctttcctgcagcccggactttgcgaaccagctctcagtgagctggacagaggatccggcgagaggttgccccaagacttaaagcccgccgaaggtgggcctgtttgcgtatttctccccagtagagccggtcaccccgagatccgggaggccgctgtggcggtgcaccagggcgaccagacacatcaccaccccgggtgccataaccatcaccacctggaggcccagcagcacaaccaccactctcggcctcagggacacaggaagcaaagagccctacggattatggcccctaaatctggacattgccaccagggatgcataggatgtcgctgtgcgcagaattgtcatttcggcacggccgtgccccccccccccgtagtcgaggagaaggaaagatag

SEQ ID NO: 198502 - DNA, 816 bp, synthetic construct
  misc_feature 1..816: note = Description of Artificial Sequence: Synthetic coding sequence
  source 1..816: mol_type = other DNA
atgggccgggccagctacggcggcagccccgtgggccaccagagctcgtccgaccacccaagggctaagacctgccgctctcccgttagggacggtccacggaccctgtgcggcgtgccaactgtggctttgtccctgcatttccttcgcgaagcgtctagtggatccagaacttgtggacgtagaactagtctttgcacatccgctaaatcttcctggacatacagatcaggccgactcagttggcagagtattaaggggacccacctcaccattacccaggctctcaggcagccactccaccgcgctcccctactccctggtcagctatgttggagtccccgccctctggaaaagaataaggcaatgggccggccgctcttgcttcctttgctgctgttgctgcagcctcccgctttcctgcaacccgggctgtgtgagccggctttgtcagaactagacaggggcagtggggagaggctgccccaggatctgaaaccagcagaaggggggcctgtttgcgtatttctgcctagtcgagctggtcatccagagatccgcgaggccgcggtcgccgttcaccagggagaccagactcatcatcatcctggctgtcacaatcatcatcatctagaggcacaacagcataatcatcacagtagaccacaaggtcatcgaaaacaacgagctctgcggattatggcaccgaagtctgggcactgtcatcaggggtgtatcggctgccgttgcgcccagaattgtcactttggtaccgctgtacccccaccccccgttgtagaagagaaggaacggtag

SEQ ID NO: 198503 - DNA, 684 bp, synthetic construct
  misc_feature 1..684: note = Description of Artificial Sequence: Synthetic coding sequence
  source 1..684: mol_type = other DNA
atgggccggcccctgctgctgcccctgctgctgctgctgcagccccccgcattcctgcagccaggaggaagcactgggtcagggccttcatatttgtatggagtcactcagcctaaacatctgtccgccagtatgggcggctccgtcgagatcccttttagcttttactatccatgggagctggcaatcgtgcctaacgttcgcatctcttggcggcgcgggcacttccatggccaatctttctattccacaagacccccttcaatccacaaggattacgtcaaccggctgtttctgaactggacagaaggccaggaatctggattcttgcgcatcagtaatctgaggaaagaagaccaatctgtctacttttgcagagtggagttggatacccggcggtctggccggcagcagctacagagtattaagggaacaaaacttaccattacccaagctgtgaccaccacaaccacttggcgcccttcctccacgactacaatagctggcttgcgtgtaaccgaaagtaaaggccattccgagagctggcatctgagtctggacacagcaatacgggtggccttggcggtggcagtcttgaaaactgtcattctgggcctgctctgcctcctgcttctatggtggagacgccgcaaagggagtcgcgcccctagttccgatttctag

SEQ ID NO: 198504 - DNA, 327 bp, synthetic construct
  misc_feature 1..327: note = Description of Artificial Sequence: Synthetic coding sequence
  source 1..327: mol_type = other DNA
atgggccgggccagctacggcggcagccccgtgggccaccagagctctagcgatcacccgcgcgccaaaacctgtagatctcctgtgcgcgatgggcctcgcaccttgtgtggggtgcctaccgtggccctctcattacacttcctgagggaagctagttcaggcagtcggacatgcggaagaagaacttcactgtgcacgtcggcaaaaagctcttggacctataggtcgggcaggctgagctggcagtccatcaaagggacccacttaaccatcacacaggccctccgccagccgctccacagggcccccttactaccagggtag

SEQ ID NO: 198505 - DNA, 384 bp, synthetic construct
  misc_feature 1..384: note = Description of Artificial Sequence: Synthetic coding sequence
  source 1..384: mol_type = other DNA
atgggccggcccctgctgctgcccctgctgctgctgctgcagccccccgcctttctgcagccgggcgggtccaccggcagcggaccaagttatctttacggagtgacccaaccaaaacacctgagcgcaagtatgggagggtctgtagaaatccccttctccttttactatccatgggaactggcgatcgtccccaacgtgagaatctcctggcgccgaggtcactttcacggtcaatctttctactctacccggcccccgtctattcacaaagactacgtgaacagactctttctgaattggaccgagggacaggagagtggtttcctcagaattagcaaccttcgaaaagaggatcagtctgtgtatttttgccgcgtctag

SEQ ID NO: 198506 - DNA, 738 bp, synthetic construct
  misc_feature 1..738: note = Description of Artificial Sequence: Synthetic coding sequence
  source 1..738: mol_type = other DNA
atgaccagcagctacggccacgtgctggagcggcagcccgccctgggcggccgactggattccccaggaaacctggataccctgcaggcaaagaagaatttcagcgtgtctcatcttctcgacttggaagaggccggcgacatggttgccgctcaggcagatgaaaatgtcggggaagctggccgaagccttctggaatcaccaggtctgacatctgggtccgacacccctcagcaagacaacgatcagctgaattcggaagagaagaagaagaggaagcagcggaggaaccgaactacctttaattcaagccaactacaagccttagagcgggtcttcgagaggacccattatcccgacgcatttgtccgggaagacctggctcgtcgggtgaatttgaccgaagctcgcgtgcaggtgtggtttcaaaatcgccgcgccaagttcagacggaacgaacgcgccatgctggctaacaaaaatgcttcgcttttgaagagttatagcggggatgtgactgctgtggaacaacccattgttccaaggccagctccaagaccaacagactatctcagttggggcacagcctccccgtactcagcaatggccacatattctgcaacttgcgccaataatagccctgcccagggcataaacatggcgaattcaatagccaatttgcgactcaaagcgaaagaatactccctgcagcgtaatcaggtgcctactgtcaattag

SEQ ID NO: 198507 - DNA, 654 bp, synthetic construct
  misc_feature 1..654: note = Description of Artificial Sequence: Synthetic coding sequence
  source 1..654: mol_type = other DNA
atgaccagcagctacggccacgtgctggagcggcagcccgccctgggcgggaggctcgacagtccaggaaatctcgacacgctgcaagcaaagaagaactttagcgtgtcacaccttctggatttggaagaggccggtgacatggtggctgcgcaagccgatgagaacgtgggagaggccggcaggagtctgctggaaagccctgggctgacatccggaagcgatacaccacagcaggataacgatcagctcaattcagaagagaagaagaagcgcaaacagaggaggaatagaacgacttttaactcgtctcagttgcaggccctggagcgagtttttgagagaacacactacccggacgccttcgtgagagaggacttggcacgacgggtgaacctcaccgaagcccgcgtccaggtctggtttcagaatcggagggctaaattccgtaggaacgaaagagccatgttagccaacaaaaacgcaagtctgttgaaaagctattcaggtgacgtgactgctgtcgaacagccgattgtacctagacctgccccccgcccgaccgattacctgtcttggggaacggcgagcccttaccgctctagtagcctgcctcgctgttgccttcacgagggcctgcacaatggattttag

SEQ ID NO: 198508 - DNA, 762 bp, synthetic construct
  misc_feature 1..762: note = Description of Artificial Sequence: Synthetic coding sequence
  source 1..762: mol_type = other DNA
atggacagcgccgccgccgccttcgccctggacaagcccgccctgggacctggaccaccccccccaccacctgccctagggcctggggactgcgcccaggcacggaaaaacttttctgtgtctcacctgctggatctcgaagaagttgcagccgctgggaggctggctgcacggcccggcgccagggccgaggcccgggaaggagccgctagagagcccagcgggggatcaagcggcagcgaagctgccccacaagacggagagtgcccctcccccgggcgcggatccgccgctaaaaggaaaaaaaagcaacggagaaacaggaccacctttaactcatcccagctccaggctctggagagggttttcgaaaggacccactaccctgacgctttcgtgagggaagaactggcccgcagggttaatctgagtgaggcgcgggtgcaagtttggtttcagaaccggagggccaaatttcgccgaaacgagcgggccatgctcgctagccggtctgcctcactgctcaaaagctattcccaagaagcggccattgagcaaccagtggccccccggcccacagcactgtcgcctgattacctctcctggaccgcctcttcaccctacagcaccgtccccccttattcgcccggcagtagcggaccagctactcctggtgtaaatatggcaaattccatcgcgagtctgcgattaaaagccaaggagttctcactgcaccattctcaggtgccgacagtgaattag

SEQ ID NO: 198509 - DNA, 855 bp, synthetic construct
  misc_feature 1..855: note = Description of Artificial Sequence: Synthetic coding sequence
  source 1..855: mol_type = other DNA
atggactacagctacctgaacagctacgacagctgcgtggccgccatggaagcatccgcctacggtgattttggcgcctgctctcaaccaggaggcttccagtacagtcctctgagaccagcttttcccgcagccggccccccttgccccgcactgggctctagcaactgcgccctgggcgcgctccgagatcaccagcctgccccctacagtgccgtgccatataaatttttccccgaaccctccgggttgcacgagaaaagaaaacagaggagaatcagaaccacctttaccagtgcacagcttaaggaactcgagcgagtttttgctgagacccactatcccgacatttataccagggaagaacttgctctgaagatcgatttaacagaggcacgtgttcaggtctggttccagaatagacgagccaagttccggaaacaggaacgggccgccagcgctaaaggagcagctggtgctgcaggggcaaagaagggagaggctcgatgcagcagtgaagacgatgattccaaggagagcacttgcagtcccacccccgacagcacagctagtttgcctccacccccagctccgggcttggccagtcctcggctgagtccaagtcccttgcctgtcgctctaggatccggcccaggccctggccctggaccgcaacctctgaagggggccctgtgggcgggcgtggctggtggaggcggcggggggccaggggccggcgctgcagagctactgaaggcttggcagccggctgagagcgggccagggccgttcagcggagttctgagcagcttccatcgcaaacccggccctgctctgaaaaccaatctgttttag

SEQ ID NO: 198510 - DNA, 1800 bp, synthetic construct
  misc_feature 1..1800: note = Description of Artificial Sequence: Synthetic coding sequence
  source 1..1800: mol_type = other DNA
atgaagctgctgaagctgaccggcttcatcttcttcctgttcttcctgaccgagagtctgaccctgccaacccagcccagagacattgaaaatttcaactcgacacagaaattcatagaagataacatcgaatacattactatcattgcctttgcacagtacgtgcaagaagcaactttcgaagagatggaaaagctggtcaaggatatggtggagtataaggaccgttgtatggccgataaaaccttgcctgaatgctccaagttacccaataatgtgcttcaggagaagatctgcgccatggagggattgccccaaaagcataacttcagtcactgttgcagtaaagtagatgcccagagacgcctatgttttttctacaataagaagtctgacgtcgggtttctccctcccttccccactctggatcctgaagagaaatgccaagcgtacgagtcgaaccgggaaagtctcctaaatcacttcctgtacgaagtcgctcgacgcaatcctttcgtgttcgctccaacacttttgacagtagccgttcacttcgaagaggtggccaaaagttgttgcgaggagcagaataaggtgaattgcctacagactagggccattccagtcacccaatatcttaaagccttctccagctatcagaaacacgtgtgtggggctctcctgaagttcgggaccaaggtggttcacttcatctatatagccatcttgtcacaaaaatttccaaagatcgagttcaaagaattaatcagtttggtggaggacgtgagcagcaactatgacggatgctgtgaaggagatgttgttcagtgtatccgcgacacgtcaaaagttatgaaccacatatgttctaaacaggactctatcagtagcaaaatcaaggagtgctgcgaaaaaaaaatcccagagagaggacagtgcataatcaattccaacaaggacgatcggcccaaggacctgtctctccgcgaagggaagttcacagatagcgagaatgtgtgccaagagcgcgacgccgaccctgatactttcttcgcaaagttcacatttgagtattctcggagacaccccgacctttccattcctgagctgcttaggatcgtccagatctataaggacctcctgcggaactgttgtaacactgagaacccgcccggctgttacagatatgccgaggacaaattcaacgagaccaccgaaaaatcgctcaagatggtacagcaggaatgcaaacacttccagaacctggggaaggacggactcaaataccactatttaatccggttaacaaagatcgcacctcagctttccactgaggagctcgtgagcctcggcgagaagatggtcacagctttcaccacatgctgtaccttgagtgaggaatttgcctgtgtggacaatttggccgatctcgtatttggcgaactgtgtggagtgaatgagaatcgcactataaacccggcagtggatcactgttgcaagaccaacttcgcctttcggcggccttgctttgagtccctcaaagccgacaagacctacgtgccaccacctttttcccaagatctgtttacctttcatgctgacatgtgccaatctcagaacgaagaattgcagaggaagaccgaccggtttctggtcaatctggtaaagctgaagcacgaactcacagacgaagagttgcaaagcctcttcactaacttcgctaacgtggtggataagtgctgcaaagcagaatctccagaagtgtgtttcaacgaggagtcccctaaaattggcaattag

SEQ ID NO: 198511 - DNA, 945 bp, synthetic construct
  misc_feature 1..945: note = Description of Artificial Sequence: Synthetic coding sequence
  source 1..945: mol_type = other DNA
atggacgccttcaagggcggcatgagcctggagcggctgcccgagggtctgcggccccctccccccccaccacatgacatggggcccgccttccacctggctcgacccgcggacccccgcgaaccactggagaatagtgccagcgagtccagcgacacggaactgcctgaaaaggaaagaggcggagagccgaagggacccgaagactccggcgccggcggtacagggtgcggcggcgctgacgacccggcaaaaaagaagaagcaaagaagacagaggacccactttactagtcagcaactgcaggagctggaggcgactttccagcgaaatcggtacccagatatgagcatgagagaggaaattgccgtttggactaatttgacggaaccccgagtgagagtctggtttaaaaacagacgtgccaagtggagaaaacgagagaggaatcaacagctcgatctctgcaagggcggctacgtgccacaattctccgggttggttcaaccatatgaagacgtatacgctgcaggctactcctataacaattgggcagcgaaaagtctggctcctgcacccctttcaacaaaaagttttactttctttaattcgatgagccccttatccagccaaagtatgttctccgcgccatcaagcatctcaagtatgacgatgccttccagcatgggaccgggagcagtacccgggatgcctaatagtggactcaacaacatcaataatctgactggctccagcctcaattctgccatgagtccaggtgcctgtccttatggaacccccgcctcaccctactccgtgtaccgagacacttgcaatagctccttggcgtccctacggttgaagtccaagcagcactcaagcttcggctacggagggctgcagggacccgcctccggactgaatgcctgccagtataattcatag

SEQ ID NO: 198512 - DNA, 345 bp, synthetic construct
  misc_feature 1..345: note = Description of Artificial Sequence: Synthetic coding sequence
  source 1..345: mol_type = other DNA
atggacgccttcaagggcggcatgagcctggagcggctgcccgagggtttaaggcctcccccgccgcctccacatgatatggggccagcgttccacttggccaggcctgctgaccctcgcgagccactagaaaacagtgcgtcagaaagctcagacaccgagttgccggaaaaagagcgtggcggggaacctaaagggccagaagactccggtgctggtgggacggggtgtggcggagctgacgacccagccaaaaagaaaaaacagaggcgacagagaacccactttacaagccagcagctgcaggagttggaggccactttccaaaggaatagatatccatag

SEQ ID NO: 198513 - DNA, 945 bp, synthetic construct
  misc_feature 1..945: note = Description of Artificial Sequence: Synthetic coding sequence
  source 1..945: mol_type = other DNA
atggacgccttcaagggcggcatgagcctggagcggctgcccgagggtttgcggccgccacctcctccgcctcatgatatgggcccggctttccatctggcgcggcccgctgacccgagggaacccctggagaatagtgcctccgaatcttctgataccgagcttcctgagaaagagcgcggaggcgagccaaaggggccagaggactctggtgcaggagggaccggctgcgggggcgccgacgaccctgctaaaaagaaaaaacaacggcggcaacgcactcactttactagccaacagttacaggagcttgaggctactttccaacggaacagataccccgatatgtcgatgcgcgaggagattgcagtctggaccaacctcaccgagccgagggttcgagtgtggtttaaaaaccgccgcgcgaaatggcggaagcgagaacgtaaccagcagcttgacctctgcaaaggtgggtacgtacctcagttttcaggcctggttcagccgtatgaggacgtatacgccgccggttactcctacaacaactgggccgcgaagagcttggcgcccgccccgctgtctaccaaatccttcacgttcttcaattctatgtctcccttatcttcccagagcatgttcagcgctccctcttctatcagctctatgacaatgccgtccagcatgggtccgggtgccgtgcctggcatgccaaacagtggtcttaataatattaataacctcaccggatcgtcactgaactctgccatgtcccccggcgcttgtccatatgggactcctgcctccccttacagcgtttatcgcgacacctgcaatagttccctcgcatcactgaggctgaagtcaaagcagcattcatcatttgggtacggggggctgcaagggcccgcatcgggactgaacgcgtgccagtataattcatag

SEQ ID NO: 198514 - DNA, 396 bp, synthetic construct
  misc_feature 1..396: note = Description of Artificial Sequence: Synthetic coding sequence
  source 1..396: mol_type = other DNA
atggacgccttcaagggcggcatgagcctggagcggctgcccgaggggttacggcctcctcccccacctccccacgacatggggccagccttccacttagctcgtccggctgatcctagggagccactggaaaactcagcctccgagagtagcgacactgagctgcccgagaaagagcgcggcggggaacctaaaggtccagaggactccggtgccggtggaacgggttgtgggggagccgatgaccccgcaaagaagaagaaacagagacgtcagcggactcactttacatctcagcagctgcaggagctggaggctaccttccagcgcaaccgataccctgatatgagcatgagggaggaaattgccgtttggacaaatctcacggaaccctag

SEQ ID NO: 198515 - DNA, 975 bp, synthetic construct
  misc_feature 1..975: note = Description of Artificial Sequence: Synthetic coding sequence
  source 1..975: mol_type = other DNA
atgaactgcatgaagggccccctgcacctggagcaccgggccgccgggaccaaactgtcggccgtgtcctcttcctcttgtcaccacccccagccactggcgatggcgtctgtgttagctccaggccagccaaggtcactagactcaagcaaacacagactggaggtgcatactataagtgatacatcctcaccagaagccgcagaaaaagacaaaagtcagcaagggaagaacgaggacgtgggcgccgaggacccatctaagaaaaagagacagaggaggcagcggacccacttcacctctcaacaattgcaagaactcgaagcaacgtttcaaagaaacaggtatccagacatgagtacacgggaagaaatcgctgtgtggaccaatctgaccgaggcgagggtacgggtctggtttaaaaacaggcgggcaaaatggagaaaacgggaacggaaccagcaggccgaactatgtaaaaacggctttggcccccagtttaatggactgatgcaaccatacgacgacatgtatccgggatacagctacaacaactgggctgcgaaggggctgacatcagcaagcctgtctaccaaatccttcccattctttaattctatgaacgtcaatccgcttagctcccagtccatgttcagtcctcctaattccatcagttccatgagcatgagttcctcaatggtccctagtgccgtgactggtgtgccggggtccagtctgaattcgctgaataatctcaataacctctcatccccgagcctgaactctgccgtgccaacaccagcatgtccctatgcccctccaactccaccatacgtgtatagagacacatgcaatagcagtctcgcatccctgcgcctcaaagccaaacagcacagctctttcggctatgctagcgtgcagaacccggctagtaacctgtccgcttgccaatatgcagtggacaggccagtttag

SEQ ID NO: 198516 - DNA, 954 bp, synthetic construct
  misc_feature 1..954: note = Description of Artificial Sequence: Synthetic coding sequence
  source 1..954: mol_type = other DNA
atggagaccaactgccggaagctggtgagcgcctgcgtgcagctgggagtccagccggctgccgtcgaatgtctattttcgaaagatagcgaaatcaaaaaggtcgagttcacagatagccccgagagcaggaaagaggcagcctctagtaaattttttccgagacagcaccccggggcaaacgaaaaggataaatcccagcagggtaaaaacgaggacgttggcgccgaagatcctagtaagaagaaaaggcagaggaggcagaggacccattttactagccagcagctgcaggaactggaggccacgtttcagaggaatcggtatccagatatgagcactagggaagaaatcgcagtctggaccaatttgactgaagctagagtgagggtttggtttaagaatcgaagggccaaatggcggaagagagagaggaatcagcaagctgaattgtgcaagaatggttttggcccgcagttcaatgggctgatgcagccttacgatgatatgtaccctggatactcttacaataactgggcagctaagggactgacgagcgccagcttgtccacaaaatcctttcctttctttaactctatgaatgtgaacccgctgtcgtcacagtcaatgtttagcccgcctaatagtatctccagcatgtcgatgagttcatcaatggtgccctcggcagtcaccggcgttcccggatccagcctcaattcactcaataatctgaataaccttagtagcccaagccttaactccgccgtaccaacccctgcttgcccttatgcgccgcctacaccaccctatgtataccgtgatacctgtaattccagtctcgcttccctgcgattgaaagctaaacagcattccagtttcggctacgcctctgtccagaatcccgcaagcaatctttccgcctgtcagtacgccgtggatagaccagtgtag

SEQ ID NO: 198517 - DNA, 816 bp, synthetic construct
  misc_feature 1..816: note = Description of Artificial Sequence: Synthetic coding sequence
  source 1..816: mol_type = other DNA
atggagaccaactgccggaagctggtgagcgcctgcgtgcagctggaaaaggacaagtcccagcagggtaagaacgaagatgttggtgccgaggatccgtcaaagaagaagcgccaacggcggcaacgcacacattttacctctcagcaacttcaggagctggaggctacatttcagcgcaaccgatacccagacatgtcaactcgcgaagaaattgccgtctggactaatctgactgaagctagggtgagggtgtggtttaagaacagacgcgcgaaatggagaaaaagagagaggaatcagcaggctgagctatgcaagaacggattcggcccccagttcaacgggctaatgcaaccctacgacgacatgtaccctggctacagttacaataattgggctgctaagggcctcacctccgcttctcttagtactaaaagttttccattttttaactctatgaatgttaatccactgtccagccagagcatgtttagcccaccaaattccattagtagcatgtctatgtccagcagtatggtgcccagcgcggtaacaggcgttccaggaagtagccttaactcactgaacaatctcaacaacctctcttccccgtcacttaactcagctgtgcctaccccagcttgtccgtatgcaccacccaccccaccatatgtttaccgtgacacttgcaattcatcgcttgcgtcgctgcgactgaaggctaagcaacactcatcttttggatacgccagcgtccagaacccagcatctaacctgtccgcctgtcagtatgccgtagaccgccccgtatag

SEQ ID NO: 198518 - DNA, 954 bp, synthetic construct
  misc_feature 1..954: note = Description of Artificial Sequence: Synthetic coding sequence
  source 1..954: mol_type = other DNA
atggagaccaactgccggaagctggtgagcgcctgcgtgcagctgggagtgcagcctgctgcagtggagtgtcttttttctaaggactctgagataaagaaggtggagtttaccgacagtcccgagagccgaaaagaggccgcgagtagtaaatttttcccccggcagcatccaggggcaaacgagaaggataaatcgcaacagggcaaaaacgaggacgtcggtgcagaggacccctccaaaaagaagaggcaacgacggcaacggacccacttcactagtcaacaactccaggagttggaagccaccttccagcggaatcgctaccctgatatgtccaccagggaagagatcgccgtctggacaaatctgactgaggccagggtccgagtctggttcaagaaccgccgagccaaatggagaaaaagagaacggaatcaacaggcagaactgtgtaagaatggttttgggccccagtttaatggacttatgcagccctatgacgatatgtaccctgggtatagctacaataactgggccgccaaggggctcacttcagccagcctttctaccaagtcattcccctttttcaactccatgaatgtaaaccctctctcctcccaaagcatgttttccccccctaacagcattagctctatgtctatgtccagtagcatggtgccaagcgcagtgacaggtgtccctgggtccagccttaacagcttgaacaacttgaacaatctatccagccccagcctgaacagtgctgtgccaacacctgcttgtccgtatgcccctcctactcccccgtacgtgtatagggacacatgtaattcttcgcttgcaagcctgcgcctgaaagctaagcagcactccagtttcggctatgcatcggtacagaacccggcctccaatttgtctgcctgccagtacgccgttgaccgccctgtatag

SEQ ID NO: 198519 - DNA, 873 bp, synthetic construct
  misc_feature 1..873: note = Description of Artificial Sequence: Synthetic coding sequence
  source 1..873: mol_type = other DNA
atggagaccaactgccggaagctggtgagcgcctgcgtgcagctgggtgtccagcctgcagccgtggagtgcctttttagcaaggactccgagatcaagaaggtggagtttacagacagcccagagagtagaaaagaagcagcctcttctaagttcttccctcgccagcatccgggcgccaacgagaaggacaagagccagcagggcaaaaatgaggatgtaggcgccgaagacccttccaaaaagaaaaggcagcggcggcagagaacccacttcaccagtcagcaacttcaggagctggaggctacttttcaacgcaatcgataccctgacatgtccactagagaggagatcgcagtttggacaaacctaaccgaggccagggtgagggtttggtttaagaatcgacgcgctaagtggcggaaacgggaacgtaaccagcaggcagagctgtgcaagaatgggttcgggccccaatttaacggcctgatgcagccttacgatgacatgtaccccggatattcctacaacaattgggcagctaagggattaaccagcgcatctctcagcactaaaagcttcccgttttttaatagtatgaatgtaaatcccctgtcctcccagagcatgttttcgccacccaattcaatcagtagtatgagcatgtcctcctccatggttcccagtgcagtgaccggagtgcccgggtcgtcactgaactcactcaataatttgaacaatttgtcatctccatccctgaactcagccgtgcccactccagcatgtccttatgcccctcctaccccaccttatgtgtacagggatacttgtaattccagcttggcttctctcagactcaaagctaagcaatag

SEQ ID NO: 198520 - DNA, 357 bp, synthetic construct
  misc_feature 1..357: note = Description of Artificial Sequence: Synthetic coding sequence
  source 1..357: mol_type = other DNA
atggagaccaactgccggaagctggtgagcgcctgcgtgcagctggaaaaggacaagtcccagcaaggtaagaacgaggatgtgggggccgaggatcccagtaaaaaaaaaagacagaggcgccagcgcacccattttacatcacagcaactgcaagaactggaggccactttccagcggaatagataccccgacatgtccacaagagaggaaatcgccgtttggacaaacctcacagaggcccgtgtccgggtgtggttcaaaaaccgaagggccaagtggcgaaagagggaacgaaaccagcaggctgagctgtgtaaaaatgggttcgggccacagttcaacggcctgatgtag

SEQ ID NO: 198521 - DNA, 909 bp, synthetic construct
  misc_feature 1..909: note = Description of Artificial Sequence: Synthetic coding sequence
  source 1..909: mol_type = other DNA
atggagttcggcctgctgagcgaggccgaggcccggagccccgccctgtccttgagcgacgccggcacaccacatccacagcttccagagcatgggtgcaagggtcaggagcacagcgactccgagaaggccagcgcatcattacccgggggttctcccgaggacgggagtttgaaaaaaaaacagcgtagacagagaacacatttcacaagtcagcaactccaggagttggaagccacttttcagagaaataggtaccccgatatgagcacgcgggaggagatcgcagtgtggactaatctgacggaggccagggtgcgggtgtggttcaaaaaccggagagccaaatggagaaaacgtgagcggtcacaacaggctgagttgtgcaagggaagttttgccgcacctttaggaggtctcgtccccccttacgaggaggtatatccaggttattcatacggtaactggccgccgaaggcccttgcccctccactggctgctaaaacgttcccattcgcctttaattccgtgaatgtcgggcctctggcctcacaaccggtgttttctcctccatcgtcgattgccgctagtatggtgcccagtgcggcggccgcccctggaaccgtaccaggtcccggcgcccttcagggcttaggcggcggcccaccggggctggctccagcggcagtgagctcaggtgctgtgagctgtccctacgcctcagctgccgccgctgccgctgcggccgcaagttccccttatgtttaccgcgatccctgcaattctagtctggcctctttgcgcctgaaggcgaagcagcatgccagttttagctatccagccgtccacggccccccccccgccgcgaatctatctccatgtcagtatgcagttgagcggcctgtgtag

SEQ ID NO: 198522 - DNA, 909 bp, synthetic construct
  misc_feature 1..909: note = Description of Artificial Sequence: Synthetic coding sequence
  source 1..909: mol_type = other DNA
atggagttcggcctgctgagcgaggccgaggcccggagccccgccctaagcctttctgacgctggaaccccccatccacagcttcctgaacacggctgcaaagggcaggaacactctgattctgaaaaggccagtgcatctttgcctggcgggagcccagaagatggtagtctgaagaaaaagcaacgccgacagcgcacgcattttacatcacagcaactgcaggagctggaggcaacttttcaacgcaaccgctacccagacatgtcgactagggaggaaatagctgtgtggaccaacctcaccgaagccagggtcagggtgtggttcaagaatcgcagagcaaagtggcgtaagcgggagcgatctcagcaagcagaactgtgcaaggggagttttgcagcccccttaggaggactggtgcctccatacgaggaggtgtacccaggctattcctatggtaactggcctccaaaagcactcgctccccccctggccgccaaaacattcccgttcgccttcaacagtgtgaatgtgggccccctagctagccagccagtgttctcacccccctcatctatcgcagcttccatggttccatcagcggccgcggccccaggcactgttccgggcccaggagcactgcagggtcttggcggggggccaccaggcctagcccctgcagcggtcagttctggggcggtgtcttgtccatacgcatctgcggcagctgccgctgccgccgctgcctcctcaccgtacgtgtacagagacccctgcaatagcagcctcgccagtctccgtctgaaagccaagcagcatgcttctttctcctaccccgccgtgcacggcccacctcctgctgctaacctttcaccatgccaatatgctgttgaacgacctgtctag

SEQ ID NO: 198523 - DNA, 1179 bp, synthetic construct
  misc_feature 1..1179: note = Description of Artificial Sequence: Synthetic coding sequence
  source 1..1179: mol_type = other DNA
atggagctggtggccggctgctacgagcaggtgctgttcggcttcgccgtgcatccagagccagaggcttgtggtgatcatgagcagtggacattagtggcagattttacccaccatgctcacacagcgtcattaagtgccgttgcggtgaacagccgttttgtggtgactgggtccaaggacgaaaccatacatatatatgatatgaagaaaaagatcgaacacggcgcgctcgtgcatcactcagggaccattacctgtctcaaattttacggtaatcgccaccttataagtggggctgaggatggcctaatctgcatctgggacgccaagaagtgggagtgtttgaagtcaatcaaggcccacaagggtcaagtcacttttctctcaatacacccctccgggaagcttgccctcagcgtggggactgacaaaactctgcgcacgtggaatctggtggagggacgttccgcttttataaagaacatcaaacagaacgctcacattgtcgaatggtctccaagaggcgaacaatatgtcgtaattatccagaacaagattgatatataccagcttgacaccgctagcatctctggaaccatcacaaacgagaaacgcattagctctgtgaagttcctctcggagtccgtgctggccgtggctggcgacgaggaagtaattcgattttttgactgtgacagtctggtttgtctatgcgaatttaaagctcatgaaaaccgagttaaagatatgtttagtttcgagatccccgagcatcacgttattgtgtcagcatcctctgacgggttcattaaaatgtggaaactgaaacaagacaagaaggtgcctccttcactgctttgtgagattaatacaaatgctcggctaacctgtctgggcgtatggcttgataaggtggccgacatgaaagaatccttaccgcccgccgcagagccatccccggtgagtaaggagcagagcaaaataggtaagaaggaaccgggagacacggttcacaaggaagaaaagcggtccaaacctaacacaaagaagcgaggcttaaccggggactccaagaaggcaaccaaagagtccggccttatcagtactaagaaacggaagatggtggagatgctcgaaaaaaagagaaaaaagaagaaaattaagacaatgcagtag

SEQ ID NO: 198524 - DNA, 3372 bp, synthetic construct
  misc_feature 1..3372: note = Description of Artificial Sequence: Synthetic coding sequence
  source 1..3372: mol_type = other DNA
atgagcggcaccagcagccacgagagcttctacgacagcctgagcgacatgcaggaagaatctaagaataccgacttttttccagggctgtctgccttcctaagccaggaggagatcaataagtctttggacctggcccgcagagcaatcgccgactcagaaacagaagatttcgattcagaaaaggaaatttcccagatattttcgacaagtcctgcctctctttgtgagcacccctcacataaggaaactaagctgggagaacatgccagcaggaggccacaggacaacaggtctacccccgtgcagccactggcagaaaaacagacaaaaagcatcagctctcctgtctctaagcgaaaaccagctatgagcccactgctcacaaggccttcgtacatcaggtctttacgaaaagccgaaaagcgcggagcaaagacaccttccaccaacgtgaagccaaaaaccccccaccagcgcaaaggaggacctcagtctcagctgtgtgacaaggccgcgaacctcatcgaggagctgacctcgatatttaaggccgccaaacccagaaacagaagtcccaacggtgagtcctcttcccctgattccggatatctgagtcctaaaaatcagccttccgctctgctgagcgcatctgcttcacagtcaccaatggaggaccagggcgagatggagagggaagtcaaatctccgggtgcacggcattgttatcaagacaaccaggatctggcagttcctcacaatcggaaaagccacccacagcctcatagcgcattgcactttcccgccgcccctcgctttatacaaaagttaagaagccaagaggtggctgaaggtagccgggtttatctagagtgtagggtgacaggcaatccaaccccgcgtgtgcgctggttttgcgaggggaaggaacttcacaacacacccgatattcagatccactgcgagggaggagatttgcacaccctcattatcgccgaggctttcgaagacgacacgggtaggtacacgtgtttggctaccaatcccagcgggtctgacaccacgtctgccgaagtatttatcgaaggagctagttctactgacagcgattccgaaagcctggccttcaaaagcagagccggagccatgccacaggctcagaaaaaaactaccagtgtgagtctcaccataggctcctcttctcccaagactggcgtgacaaccgccgtgatccagcctctgagcgttcccgttcagcaggttcactcacctacatcctatctgtgtcgaccagatggaactacaactgcatacttccctccagtgttcacaaaggagttacaaaacaccgccgttgcggagggccaagtggtggtgctagaatgccgggttagaggggccccgccgctccaagtgcagtggttcaggcagggttcagagatccaggatagccccgactttcgcattctacaaaagaagcctcgatccactgctgaacccgaagaaatctgcactctggtcattgcagagacttttccggaagacgccggcatctttacatgttctgccaggaacgactatggatctgccacaagcacagcacagttagtcgtcacctccgccaacactgaaaactgtagctacgagtcaatgggggagtctaacaatgaccacttccagcatttccccccaccccccccaatcctggagacttcatcactggagctggcctcgaagaagccgagtgagattcagcaggtcaataacccagagctcgggctctctagggctgctctgcagatgcagttcaatgcagccgagagagagactaatggggttcatccctccaggggcgtgaacggcctaattaacgggaaggctaactctaataagtccctgcctactcctgctgtgttactttcccccaccaaggagcctcctcctctgctcgctaaacctaagctgggcttccctaaaaaggctagccggaccgccagaatcgcttccgacgaggaaattcagggcactaaggatgctgtgatccaggacctcgaacgcaagcttaggtttaaagaggaccttctgaacaatgggcagcctcggctaacctacgaggaacgaatggcacgccggttactcggtgcagatagcgccactgtctttaacatccaagaacctgaggaggagacagccaaccaagatattgggtcaccccatgccagcgtgggcagccccctagatggacagaaggagtacaaagtctctagctgcgagcagaggctcatctctgagatcgaataccggttggagagatccccggtagatgagtcaggcgacgaggtgcagtatggagatgtccccgtcgagaacgggatggcgccgttctttgaaatgaagctcaaacactacaagatttttgaaggtatgccagtgacatttacatgtcgcgtggcagggaaccctaagcctaaaatctattggttcaaagatggcaagcagatttcaccaaaatccgaccactatacgattcagcgcgatctagacggcacttgcagcctacatacaaccgcgtccaccctggacgacgatggcaattacaccatcatggccgctaatccccagggaaggataagttgcacaggccgtctgatggtgcaggctgtgaaccaaaggggcaggagccccaggtcaccgagcgggcaccctcacgtgaggagaccaaggtcccgatcccgagactcgggcgacgaaaatgaacctatccaggaacgctttttcagaccgcacttcctccaggccccgggcgatctgactgttcaggagggaaagctgtgccgcatggactgtaaagttagcggcctacctactcctgatctctcgtggcagctggatggtaaacccgtgcgacctgattctgctcacaaaatgcttgtcagagaaaatggcgtccactccctcatcattgaacctgtgactagcagggacgctgggatatatacatgtattgctaccaaccgcgctggccaaaactccttttcgttggaacttgtagtggccgccaaggaggcccacaaaccacccgtcttcatagaaaagcttcagaataccggggtggccgatggatatccggtacgcttggaatgtagagtgctgggcgtgcctccccctcagattttctggaaaaaagaaaacgagtctttgacacacagtacagacagagtatctatgcaccaggacaaccatgggtacatttgcctgctaatccagggtgctaccaaagaagacgccggatggtatacggtttccgccaagaatgaagcaggcattgtgtcctgtaccgctagactggacgtctacattagccgacactag

SEQ ID NO: 198525 - DNA, 2019 bp, synthetic construct
  misc_feature 1..2019: note = Description of Artificial Sequence: Synthetic coding sequence
  source 1..2019: mol_type = other DNA
atgagcgccctggccagccggagcgcccccgccatgcagagcagcgggagcttcaactacgcccggcccaaacagtttattgccgcacaaaacctaggacctgccagcggccatggcacccccgcttcctctccctctagcagtagcctgcccagtcccatgagcccaaccccacgccagttcggacgggcccccgtacccccttttgctcagcctttcggagctgagcctgaagcgccctggggaagcagttctccctccccaccgccgcccccgcctccagtcttttcgcctactgcagcgttccctgtgccagacgtgttccccctgcccccacctccacccccactccctagcccaggacaggcatcccactgtagttctccagctacccgttttggtcattctcagaccccagctgcattcctgagcgctctcctgccctcgcagccacctccagctgccgtgaatgcgctggggctcccgaaaggtgtgacaccggcagggttcccaaagaaagcaagccgcacggcccgcatcgcatctgatgaggagatccaaggcaccaaagatgctgtgattcaggatctggagcggaaactgcggtttaaggaagatctcctcaataatggacagccaaggttaacgtacgaagaaagaatggctcgtagactgctcggggctgacagtgcaacagtgtttaacattcaggaaccagaggaggagactgccaaccaggaatacaaagtttcttcctgtgagcagcgtcttattagcgagatcgagtatcgcttggagcgaagcccggtggacgaatcaggggacgaggtgcaatatggtgacgtgcctgtagaaaacggcatggccccctttttcgaaatgaaactcaaacattacaaaatcttcgaggggatgcccgtcaccttcacctgtagggtcgcgggtaatcccaaaccaaagatttactggttcaaggatggcaagcaaatttctcccaagagcgaccactacacaatacaaagagatctggatggcacctgttcactccacactaccgcctcaactcttgatgacgacggcaactacaccatcatggctgcgaacccacagggccggatttcatgtacaggcaggctcatggtgcaggccgtaaatcagcgtggccgctctcccaggagtccaagcgggcatccccacgtccgccggcccagatcccgctcaagggatagcggcgatgaaaatgaaccaatacaggaaagattcttccgacctcattttctccaggcccccggtgatcttacagtgcaagaggggaaactgtgcaggatggactgcaaagtttccggcttaccaacccctgatcttagttggcagctcgacggaaagccagtgagacctgattcagcccacaagatgctcgtccgcgaaaacggcgtccacagtctcataatcgaacctgttacttccagggacgctggcatttatacttgcattgcgaccaacagagcggggcagaacagtttctcactggagttagtcgtggcggcaaaagaagcacacaagcctcccgtgtttatcgaaaagctgcagaacacaggggtggctgatgggtatcctgtaaggcttgagtgccgagtgttgggggtgccccccccccagatcttttggaaaaaggagaatgagtctctcacacatagtaccgatcgggtttctatgcatcaggataaccacggatacatctgtctgctcattcagggcgcaactaaggaagacgctgggtggtacaccgtgtcagctaagaatgaggccggcatcgtcagctgcactgctaggcttgatgtatatacccaatggcatcaacagagccagagcacaaagccaaagaaagttcgcccaagtgcctctcggtacgccgccctcagtgatcaagggctggatattaaggccgccttccagcccgaggcgaatccctcgcaccttaccctgaacaccgccctcgtcgagtcagaagatttatag

SEQ ID NO: 198526 - DNA, 2334 bp, synthetic construct
  misc_feature 1..2334: note = Description of Artificial Sequence: Synthetic coding sequence
  source 1..2334: mol_type = other DNA
atgccccaggcccagaagaagaccaccagcgtgagcctgaccatcggttcgtcatccccaaagactggagttaccacagcagtcatccagcccctcagcgttcctgtccagcaggtgcacagtcctacatcttatctctgtaggccagacggtactacaaccgcttatttccctccagtgttcaccaaggagcttcagaacaccgctgtggcagagggacaggttgtggtcttggagtgtagagtgcgcggcgcccctcctctccaagtacaatggttccggcagggatcagaaattcaggactctccagactttcgcattctacagaagaagcctaggtcgactgcggagcctgaggaaatctgcacattggtcattgccgagacgttccctgaggacgccgggatcttcacttgctcggcgagaaatgattacgggtcagcaacctccaccgctcagctggtggtaaccagcgccaacactgaaaattgttcttacgagtcaatgggagagtctaacaatgaccatttccagcactttcctccacctcccccaattctagagacaagcagtcttgagcttgcctccaagaagccatccgaaatccagcaagttaacaaccccgagctgggtctcagcagagccgctctgcagatgcagtttaatgccgccgaacgagaaacaaacggagtgcatccaagcagaggggtgaatggcctgataaatgggaaagcgaacagtaataaatcattacctacacccgccgttctcctcagtcctaccaaagaacctcctccccttctggccaagcccaagttgggcttccctaagaaagcctcccgaaccgcaagaattgcctctgatgaagaaatccagggcaccaaagatgccgtcatccaggacctagagagaaaactgcgctttaaagaagacttgctcaacaacggtcaaccacggctgacttacgaggaacgcatggctcgcaggctgctgggtgccgattcagcaactgtgtttaatatccaggagccagaggaggaaaccgccaaccaggaatataaggtgtccagttgcgaacaacgccttatcagcgaaattgaataccgccttgaacggtcacctgtggatgaaagtggggacgaagtacaatatggagatgtccccgttgagaatggcatggctccattctttgaaatgaagctgaagcattacaaaatttttgaggggatgcctgtaacttttacatgccgggtggccggaaacccaaagccaaagatttattggtttaaagatggcaagcagatcagccctaaaagcgaccattataccatccagcgcgatcttgatggtacatgctcactacatacaacggcctccaccctagatgacgatgggaactatactatcatggccgctaatccccagggaaggatttcttgtaccggacgccttatggtgcaggccgtgaatcagcgcggaagaagcccgcgatccccatctggccacccacacgtgaggcgaccgagatcccggtcccgcgattctggcgatgagaatgaaccgattcaggagaggttctttcgtccccacttcctgcaggcccctggcgatctgactgtccaagagggaaaattgtgtaggatggactgtaaggtgtcaggcctcccaacacctgatctcagttggcagcttgatgggaaaccagttcgacctgactcagcacacaaaatgctcgtccgtgagaatggagtgcactctctcatcatcgagccggtgacctcccgcgacgccgggatctatacatgcattgccaccaatcgcgcaggacaaaattcgttcagtctcgagcttgtggtcgcagctaaagaagcccacaaaccccctgtgttcatcgaaaagctgcagaataccggtgttgctgacggataccctgttagactggagtgtcgggtgctaggggttccacctccccagatcttttggaaaaaagagaatgagtctctcacgcacagcaccgatcgcgtgtctatgcaccaagataaccatggctatatttgcctactgattcaaggggctactaaagaggatgccgggtggtacacagtgtctgccaaaaacgaggccggaatcgtcagctgcacagcccgcctagatgtgtacacccagtggcatcagcaatctcagtcaacaaagccgaagaaggtgaggccatctgcatcacggtacgcagctcttagcgaccagggacttgacatcaaagccgcctttcagccggaggcgaacccaagtcatctgactcttaatacagcattagttgagagtgaagatctgtag

SEQ ID NO: 198527 - DNA, 3321 bp, synthetic construct
  misc_feature 1..3321: note = Description of Artificial Sequence: Synthetic coding sequence
  source 1..3321: mol_type = other DNA
atgagcggcaccagcagccacgagagcttctacgacagcctgagcgacatgcaggaagaatccaaaaatactgacttttttccgggattaagcgcctttctgtctcaagaagaaatcaataaatccttggacctggccagacgggcgatcgctgactccgagacagaagacttcgactcagagaaagaaatctcccagattttctcaacgtccccagcaagtctgtgcgaacatccaagccataaggaaaccaaattaggtgaacatgctagtcgccggccacaggacaatagatccactcccgtgcagccacttgccgagaagcaaacaaaaagcatctctagcccagtaagcaagcggaaacccgcaatgtctccactacttacgaggccctcatacatcagatccctgcggaaggccgaaaagcgaggggccaaaacccccagtacaaacgttaaacccaaaaccccacaccagaggaagggcggaccccagagtcaactgtgcgacaaggcagcaaatctgattgaggaattgactagtatctttaaagctgctaaaccacgaaatcgatcccctaatggagagagttctagtcctgactcaggctacttgtcccccaaaaaccagcctagcgccctcctgtccgcctctgcaagtcaatcccccatggaagatcagggcgaaatggagcgcgaggttaagtctcccggggctcgccattgctatcaagataatcaagacctggctgtgccccacaatcggaaaagccatccccagccccatagcgctcttcacttccctgcagctccgcgctttatacagaagctgcgcagtcaggaggttgccgaaggatcccgtgtgtacctggagtgccgtgtgactggaaatccaacaccccgagttcgctggttctgtgagggcaaggaattgcataacacccccgacattcagattcactgtgaggggggagacctgcataccctcatcattgccgaggcttttgaggacgacaccggacgctacacttgcctcgcaaccaacccctctgggtccgataccacatcggcagaggtatttatagagggggcttcttccacagacagtgactccgagtccctcgcatttaagagtagggcaggggctatgccccaagcacaaaagaagacgacaagtgtgtctctgacaatcgggtccagttctcctaagactggtgtgacaacagcagtcatccagcctctgtcggttccggtgcaacaggtgcatagccccacatcatatctgtgtaggccagacggcaccacgaccgcctattttccacccgtatttactaaagagctccagaataccgccgtggccgaaggacaggtagttgtgctcgagtgcagggtgaggggagccccacccctgcaggtacagtggttccggcagggctcggagattcaagactcacctgactttcgcatcctgcagaaaaagccacgaagcactgctgagcccgaggaaatctgcactctagtaattgccgagacttttcccgaagacgcaggaatcttcacttgttccgcccggaatgattatggtagcgcaacaagcaccgcccaactggtggtaacatccgctaacactgaaaactgcagctacgagtctatgggagagtcaaacaatgaccacttccagcatttcccacctcccccccccatcctggagacttcctctctggagcttgcgtctaaaaagccgtctgagatccagcaggtgaacaaccccgagttaggactgtcccgagctgctctgcagatgcagttcaacgcggcggagcgtgagaccaacggagtgcacccttcgcgcggtgtgaacggcctgattaatggcaaagcgaattccaataagtcgcttcccacccctgccgtcctactcagtcctacaaaagaacctcctcccttactggccaagccaaaactcggctttccaaaaaaggccagccggactgctagaattgcgtccgatgaagagatccagggcacaaaggacgcagtgatacaggatctggagcggaagctcagatttaaagaggacctgctgaataacggtcagccacgtctgacttacgaagaacgtatggcacggaggttactcggggctgattccgcaaccgtgtttaacatccaagagcccgaggaagaaaccgccaaccaggaatataaagtctcttcgtgtgaacagcggctgatcagcgaaatcgagtaccgcctagaacgctctcccgtcgatgaatcaggagatgaggttcagtacggggatgtcccggtggagaacggtatggctccgttctttgagatgaaattaaagcactataagatatttgaaggcatgccggtaacattcacctgcagagtggcaggcaaccctaaacctaaaatttattggttcaaggacggaaaacagatctcacctaagtctgatcattacacaattcagcgagatctggacggtacctgttccctgcatactaccgcctcaacgctggacgatgacgggaactacaccatcatggcagctaatccgcagggtagaatctcttgtaccggaagattgatggtgcaggcggtcaatcaaagaggacggagccctcggtcaccctcggggcacccccacgtgcggaggccacgtagtcggtctagagactcaggggacgagaacgaacctattcaggaacggttcttccggccgcacttcctacaggctcctggtgatttgaccgtgcaggagggcaagctgtgcagaatggactgtaaagtttccggcctcccaacccccgacctgtcgtggcagcttgatggaaagcctgtccgaccagactccgcccacaaaatgctagtccgggaaaatggcgtgcactcgctcatcatcgagcctgtgactagtcgtgatgcaggtatctatacctgcatcgccactaaccgcgccggccaaaattccttctccctcgagctcgtggtagcagccaaagaagctcacaaacctcctgtattcattgaaaagcttcagaatacgggcgttgctgatggctaccctgtgcgcttggaatgtagggtgctgggagtccctcctcctcagattttttggaagaaggaaaacgaatccctgactcattcgacggatagagtctctatgcaccaggacaatcatggatacatttgtctgctaatccagggcgcgactaaggaagatgcaggttggtacacggtgtcggccaagaacgaggctggcatcgtttcctgcacggctcgcctggacgtctatattagtagacattag

SEQ ID NO: 198528 - DNA, 1233 bp, synthetic construct
  misc_feature 1..1233: note = Description of Artificial Sequence: Synthetic coding sequence
  source 1..1233: mol_type = other DNA
atgagccccctgctgacccggcccagctacatccggagcctgcggaaggcagaaaaaagaggagccaagaccccttccactaatgttaagccaaaaactcctcaccagcgaaaaggtgggccacaatctcagctgtgcgataaagccgcaaacttgatagaagaacttaccagcatttttaaagcagccaagcctcgcaataggtcccccaatggcgaatcatcatctcccgattctggctatctttccccaaaaaaccaaccatccgctctgctgtccgcctcagcctctcaatccccaatggaagaccagggggaaatggagagagaagtgaagagtccaggtgctagacactgctaccaggacaaccaggacctcgcagttcctcataatagaaagagccacccacagccccactccgcactgcattttcccgccgcaccgagattcatacagaaactccgctctcaagaggtggctgaaggaagccgggtctaccttgaatgcagggtcaccggaaacccgacccctagagtccgctggttttgtgaaggaaaggaactacataacacacctgacattcagatacattgtgagggaggtgacctgcacacactgatcattgccgaagctttcgaggacgacaccgggcggtacacctgtctcgccaccaatccatctggctccgacaccacttctgctgaggttttcatcgagggcgcctcatcgactgacagcgactcagagagcctggcatttaaaagcagggctggagctatgcctcaggcccagaagaagactacgagcgtctcattgacaatcggctccagctcacccaagacgggcgtgaccacagccgtgattcagcctctttcagtgcccgtgcaacaggtgcactcacccaccagctacctgtgccgtccagatgggactacaaccgcctattttccacctgtgttcacaaaagagcttcagaataccgcagtagccgagggccaggttgtggttctcgagtgtcgggttcgaggcgcccccccactgcaggtccagtggtttcgtcagggttctgagatccaggactctccggactttaggattctgcagaagaaacctcgatccacggccgaaccagacgttctgtacgtattcgtccgcgtgcggtgtcaccagatgaaaattcagtactacaatctggcacacctgatatcgtcttggctgtcatctttcctatag

SEQ ID NO: 198529 - DNA, 3006 bp, synthetic construct
  misc_feature 1..3006: note = Description of Artificial Sequence: Synthetic coding sequence
  source 1..3006: mol_type = other DNA
atgccccaggcccagaagaagaccaccagcgtgagcctgaccatcggttcatctagtccaaaaaccggcgtgacaaccgcagtgattcaaccacttagcgtgcctgttcagcaggttcattcccctaccagctacctctgccgtccagacgggacgactacagcctattttccacctgtctttaccaaagaattgcagaatacagctgtcgctgaaggacaagtcgtcgtcttggagtgccgggtgcgaggggcccctcctctgcaggtgcagtggtttcggcaaggctctgagatccaggattcccctgatttccgcatcctgcagaagaagcccaggtccactgcagagcccgaggagatttgcacccttgttatcgctgagacctttcctgaggatgcaggcatttttacttgttcagccaggaatgactatggcagtgcgaccagcaccgcccagttagtagtgacctccgctaatactgaaaattgtagttacgaatctatgggggagtctaacaacgaccatttccagcacttcccccccccgcctcctattctggagacctcctcgctggagctggcctctaagaagccttccgagattcagcaggtcaacaaccctgaactggggctgtccagggctgcccttcagatgcagttcaacgccgcagagcgagaaaccaatggggtccacccaagtcgtggagtaaatggacttatcaacggaaaagcaaactctaataagtccctgccaacacccgctgtcctactgtcccccaccaaggagcctcctcctctgctggcaaagcctaagcttgacccgctaaagttacagcaactccagaaccagatccggctggaacaagaagctggggcaagacagccccctccagcacctcgctccgccccgcctagccctccttttccaccccctcccgcctttcccgagttggctgcctgtacgccaccagcgtctccagagccaatgagcgcgttggccagccgtagtgcccccgccatgcaaagctctggtagttttaattatgccagaccgaaacagtttatcgcagctcaaaatctcggccctgccagcggccatgggacgcctgcaagtagccctagtagctccagcctgcccagtccaatgtctcccacgcctcgccagttcggcagagctcctgttcctccctttgcacagccatttggcgccgaacctgaagccccgtggggatcttctagtcccagccctccaccaccacctcctccagtcttttcccctaccgcagcatttcccgtgccggatgtatttccgctgccccccccaccacctcctctgcctagtcctggtcaggcatcacattgttcatctcccgccaccaggtttggccactcgcagactccagcggcatttctcagcgctctgttacctagccagccgcctccggctgcggtcaatgcactggggttgcccaagggtgtgacaccagctgggttcccgaagaaagcatctcgtaccgcgagaatcgcttctgatgaggaaattcagggaaccaaggacgctgtcattcaagatctagagcggaagttgaggtttaaagaagacctgctaaacaacggccagcccaggctgacatatgaggagcgcatggcacggaggctgttgggggcagactctgctactgtgttcaacatccaggagcccgaggaggagaccgccaaccaggagtataaagtctcaagctgcgagcaacggctgatcagcgagatagagtatcgactggaacgctcacctgttgacgaaagtggggatgaagtgcaatacggggatgttcccgtggagaacgggatggccccatttttcgaaatgaagctgaaacactataagatcttcgaaggtatgccagtgactttcacttgtcgcgtcgcaggaaaccccaagccaaagatttactggtttaaggacggcaagcaaatctcgccgaaatcagaccattacaccatccagcgagacctagatggtacttgttctctgcacaccactgcctccacattagacgatgacggcaattacaccatcatggccgctaacccacagggcaggatcagttgtaccggcaggctgatggtgcaggctgtcaatcagcggggaaggtctcccagatcaccaagcggtcatcctcacgtccgacggcccaggtcaaggagccgagattcaggagacgagaatgaacccatccaggagcgtttttttagaccccacttcctgcaggccccaggcgaccttactgtccaagaaggcaagctgtgcaggatggactgcaaggtctctggcctcccaaccccagacctgtcctggcagctggatggcaagccagtgagaccagactcggcgcacaagatgctagtccgagaaaacggtgtacattcccttataatagagcccgtcacaagccgcgatgccggcatttatacctgtatcgcaaccaatagggccggacaaaactcctttagcttagagctggtcgtcgcagcaaaagaagctcacaaacctcctgtcttcattgagaaactgcagaacacaggagtggccgatggatatccagtgagattagaatgccgggtgttaggggtcccacccccccaaatcttttggaagaaggaaaacgaatccttgacacacagcacggatcgcgtgagcatgcaccaggacaaccatggttacatttgcctcctgattcagggcgctactaaggaggatgccgggtggtacaccgtaagcgccaaaaacgaggcaggaatcgtgtcctgtacagccagattggatgtatacacccagtggcatcagcagtcacagagcacaaagcccaaaaaggtacgcccctccgcaagtagatatgctgcccttagtgaccagggattagacattaaggctgcttttcagccggaggccaaccccagccacctcaccctgaatacggcccttgtggaaagcgaggacctgtag

SEQ ID NO: 198530 - DNA, 483 bp, synthetic construct
  misc_feature 1..483: note = Description of Artificial Sequence: Synthetic coding sequence
  source 1..483: mol_type = other DNA
tgaggcaagcccgtgcggcccgacagcgcccacaagatgctggtgcgggaaaacggggtgcactcgctgatcattgaacccgtgacatcacgtgatgccggcatttatacttgtatcgccacgaatcgcgccggccaaaatagcttctccctggaactggtcgtcgcggcgaaggaggcacataagccacccgttttcatcgaaaagctgcagaacacaggagtggcggacgggtatcccgtacggcttgagtgccgggtactgggtgtgcccccaccccagatcttctggaagaaggaaaacgaatctctcactcacagcaccgatagagtgtcaatgcaccaggacaaccatggatatatctgtcttctgatccagggcgcaactaaggaggacgcaggatggtatacagtgtcagccaagaacgaggcgggaatagtgagctgcactgcacgtctggacgtgtacattagcaggcattag

SEQ ID NO: 198531 - DNA, 1539 bp, synthetic construct
  misc_feature 1..1539: note = Description of Artificial Sequence: Synthetic coding sequence
  source 1..1539: mol_type = other DNA
aagaacaccgacttcttccccggcctgagcgccttcctgagccaggaagagattaacaaaagcctggacctggcaagacgggctatcgctgactccgaaaccgaagactttgattccgaaaaggagatatcccagatattctctacatcacctgccagcctttgcgaacatccgtcccacaaggaaactaaactgggcgaacacgcgtcaagacggccccaagataacaggtcaaccccagttcagcctcttgccgagaagcagaccaagagtatctcgtctccagtgagcaaaagaaagcctgccatgagtccactgctgactcgccctagctatatccgctccctccgaaaggccgagaaaaggggcgctaagactccctcaactaatgtcaagccaaagacaccccatcaacgaaagggagggcctcagtcacaactgtgtgataaggcagctaatctcatcgaggagctgaccagtattttcaaggcggctaagcctcgaaaccgcagtccgaacggcgaatccagcagccctgactcaggttatctgtcaccaaagaaccagcctagcgccctgctgtcagcttcagccagtcagagccctatggaggaccaaggggagatggaacgtgaagtgaagagccccggggcccggcactgctatcaggataaccaggacttggccgtgccacataacaggaagtcccatcctcagcctcactctgccctgcactttccagccgcccctcggttcattcagaagctccggtcccaggaagttgccgagggctctcgcgtctatctggaatgccgcgtcacaggaaaccccaccccacgggtgcgttggttttgcgagggaaaagagctgcacaacacccccgacatccaaattcactgcgagggcggtgacttacacacgctgatcatagccgaagcattcgaagatgataccggacgttatacatgcctcgcgactaatccctctgggtcggacactactagcgcagaggtatttatcgaaggggcgtccagcacggatagcgatagcgagtccttggctttcaagtcccgcgctggagcaatgccacaggcccagaagaagaccaccagtgtttctttgacaatagggagttctagtcccaaaacaggagtgacaacggcggtgatccaacccctgagcgtccccgtgcagcaggtgcactctccaacttcttatttgtgtcgccctgatggcacgacaaccgcatacttccctccagtgtttactaaagagctgcagaatacagccgtagctgaaggacaggttgtcgtgttagagtgtcgggtccggggcgccccgccattgcaagtacagtggtttcgccaagggtctgaaatccaggactccccggacttccgaattctgcagaagaagccccgcagtaccgcagagcctgacgttttatacgtcttcgttagagtcaggtgtcaccagatgaagatacaatattataacctggctcatttgatttcctcatggctatcctcttttctctag

SEQ ID NO: 198532 - DNA, 87 bp, synthetic construct
  misc_feature 1..87: note = Description of Artificial Sequence: Synthetic coding sequence
  source 1..87: mol_type = other DNA
atgagcggcaccagcagccacgagagcttctacgacagcctgagcgacatgcaggaggagtctaagaatacggatttctttccctag

SEQ ID NO: 198533 - DNA, 690 bp, synthetic construct
  misc_feature 1..690: note = Description of Artificial Sequence: Synthetic coding sequence
  source 1..690: mol_type = other DNA
atggccgcccagcccctgcggcaccggagccggtgcgccacccccccaaggggagacttctgcggcggcaccgaaagagccatcgaccaggcgtcattcactaccagcatggaatgggacacccaagttgtcaagggcagctcccccctgggccctgcgggacttggagctgaggagccagctgcaggaccccaattaccgtcctggctccagccagaaagatgtgccgtgttccaatgcgctcaatgtcatgccgtgttagctgacagtgtgcatttggcctgggatctgtcccggagcctcggagctgtcgtatttagccgcgtgaccaacaatgtggtgcttgaggcccctttcctagtagggattgagggtagtctaaaagggtctacttataatctgctattttgtggttcatgtggcatcccagtgggattccatctttacagcacacacgcagccctcgccgccctcagagggcacttttgtctctcatctgacaaaatggtatgttatctattaaaaaccaaagccatagtaaacgccagcgagatggacattcagaatgtccccctgtccgagaagattgcagagttgaaagaaaagatcgtcctgactcacaatcgcctgaagtcacttatgaagatcttatcagaggtgacgcccgatcagagcaaacctgaaaattag

SEQ ID NO: 198534 - DNA, 816 bp, synthetic construct
  misc_feature 1..816: note = Description of Artificial Sequence: Synthetic coding sequence
  source 1..816: mol_type = other DNA
atggccagccccggctgcctgtggctgctggccgtggccctgctgccctggacgtgtgcgtcaagagccttacagcatctggatcctcccgctcctctgccactggttatatggcacggaatgggcagtcgctacgttgcccagactggtctggagttgctcgcctcctctaaccccccagctagctcttaccagagcgctggtatgattggcgatagttgctgcaaccctctgagtatgggcgctatcaaaaaaatggtggaaaagaaaatccccggaatttatgtgctttccctggagatcggaaaaaccctgatggaagatgttgaaaactcattctttttgaacgtgaactcacaggttactactgtttgccaggccctcgccaaagatccaaagttgcagcagggttacaatgcaatgggttttagccaggggggacagtttcttagggctgttgcgcaacgctgccccagcccgcctatgattaatctcatcagcgtcgggggacagcaccagggcgtgttcgggctaccaaggtgtcctggggagtcatcccacatttgcgatttcatccggaagactcttaatgctggagcatattccaaggtggtccaggagcgcctggtgcaggccgagtactggcacgaccctattaaagaagatgtataccgcaaccactccattttcctcgctgacataaaccaagaacgcgggattaacgagagctataaaaagaatctcatggcccttaaaaagttcgtaatggtgaagttccttaacgactcaatcgtcgacccagtagactcagagtag

SEQ ID NO: 198535 - DNA, 921 bp, synthetic construct
  misc_feature 1..921: note = Description of Artificial Sequence: Synthetic coding sequence
  source 1..921: mol_type = other DNA
atggccagccccggctgcctgtggctgctggccgtggccctgctgccgtggacatgcgcatcacgcgctctacaacacctcgatccaccggcccctctgccgctggtgatctggcatggtatgggcgattcatgttgtaacccactgagtatgggggctatcaaaaagatggtcgaaaagaagatccccggaatatacgtattgagcttggagattggtaagactctgatggaagacgtcgagaacagtttctttttgaacgttaattcccaggtgactaccgtctgtcaggcgctggctaaggatcctaaactccaacaggggtacaatgcaatgggattcagccagggaggccaatttctgagggcggtagctcagcggtgcccatcacctcccatgattaatctgattagtgttggcgggcagcaccagggagtgtttgggttaccccggtgcccaggcgagtcatcacacatctgtgatttcattcggaagactttaaacgccggcgcatactctaaggtggtgcaggagaggttagtgcaggccgagtattggcatgaccctataaaagaagacgtttacagaaatcatagcatctttctggctgacattaatcaggagaggggcatcaacgagtcctacaagaagaacctgatggccctgaagaagtttgtcatggtcaagtttctgaacgacagtattgtggatcccgtcgacagcgagtggtttgggttttatcggtctgggcaggccaaagagactatcccacttcaggagacttctctgtatacgcaggaccgactagggttaaaagagatggataatgccggacagcttgtctttcttgccacggaaggagaccacctgcagctgtcagaagaatggttttacgctcatattatccctttcttgggctag

SEQ ID NO: 198536 - DNA, 612 bp, synthetic construct
  misc_feature 1..612: note = Description of Artificial Sequence: Synthetic coding sequence
  source 1..612: mol_type = other DNA
atggccagccccggctgcctgtggctgctggccgtggccctgctgccctggacctgcgcctcaagagccctccaacatctcgatcctcctgccccactacctctcgtgatctggcacggcatgggggttttcggcctgcctagatgcccgggcgagtcctcgcatatctgtgattttatcaggaaaaccctgaatgccggcgcgtattcaaaggtcgtgcaggagcgactggtacaggcagagtactggcatgaccccattaaggaggacgtgtatcggaaccactctatctttctcgcagacatcaaccaggagagaggcatcaatgaaagttataagaagaacctgatggcactcaagaagttcgttatggtgaagttcttaaatgactccattgtggatccggttgacagtgaatggtttggattctaccggagcgggcaggccaaagaaacaatccctctgcaggagacttctctgtacacacaagatagactgggcctcaaagagatggacaatgccgggcaactggtgttcctggctacagagggagatcatttacagctctcagaagagtggttctacgcccatatcatccccttcctggggtag

SEQ ID NO: 198537 - DNA, 921 bp, synthetic construct
  misc_feature 1..921: note = Description of Artificial Sequence: Synthetic coding sequence
  source 1..921: mol_type = other DNA
atggccagccccggctgcctgtggctgctggccgtggccctgctgccatggacctgtgctagcagagctctccaacatctcgacccacctgcacccctgcctctggtaatctggcacggcatgggggacagctgctgcaacccgctgtcaatgggagcgatcaaaaaaatggtggagaaaaaaattcccggaatatatgtactgtcgctggagattggaaagaccctgatggaagacgtagaaaactccttcttcctgaacgtgaattctcaggtgactacagtttgccaggccctcgctaaagatccgaaactgcagcaggggtataacgccatgggtttctctcaaggcggccagttcttgagggccgtggcacagcgatgtccctccccacccatgatcaacctgatctccgtgggcggacagcatcagggcgtgtttggtctgccgaggtgccctggggagtctagccacatctgcgactttatcaggaagactttgaacgctggagcttatagcaaggtggttcaggagaggctggtgcaggccgagtattggcacgaccctattaaagaagacgtttacaggaaccatagcatttttttggccgatatcaatcaggaaagaggcatcaacgagagctataagaaaaatttaatggctctgaagaaattcgttatggtcaagttcttgaacgattcaatagtcgatcctgtggatagtgaatggttcggcttttatcggtctggtcaggccaaagagacaatcccattacaggagacatcgttatatactcaggatcggctgggcttgaaggagatggacaacgcaggccagttggtgttcctggcaaccgaaggcgaccaccttcagctatcggaagaatggttttatgctcacatcatccccttcctggggtag

SEQ ID NO: 198538 - DNA, 909 bp, synthetic construct
  misc_feature 1..909: note = Description of Artificial Sequence: Synthetic coding sequence
  source 1..909: mol_type = other DNA
atgctgggcctgtgcggccagcggctgcccgccgcctgggtgctgctactgctaccattcctgccactgctgctgctcgccgcccccgccccgcacagagctagttataagcccgtgattgtagttcatggtctgtttgactcaagctactcctttcggcacctcttagagtatatcaatgagacacatcctggcacagtggtgactgtcctcgacctgttcgacggtcgggaaagtctcagacccctctgggaacaagtacagggcttcagagaagccgtcgtccccattatggctaaggccccacagggggtgcatctaatttgctatagccagggaggacttgtctgccgggccctgctgtccgtgatggatgatcataacgtggactcttttattagcctctcctcaccacagatgggccaatatggggatacggactatctcaaatggttgtttcctacgtccatgcgttccaacttatatcgcatatgctatagcccttggggtcaggagttctcgatctgtaactactggcacgatccacaccacgacgatctctatttgaatgcaagctccttcttggcccttatcaacggcgagagagaccaccccaatgctactgtctggaggaaaaattttctgcgggtgggccacctggtactcattgggggaccagacgatggggtgataaccccttggcaatcttcctttttcggattctacgatgctaatgaaactgtcctcgagatggaggaacaactggtttatctgcgcgattcgttcggcttaaaaacgctgctggcccggggtgccatcgtgcggtgcccgatggctggcatctcccacactgcctggcatagtaaccgcactctttacgaaacttgtatagagccctggctctcttag

SEQ ID NO: 198539 - DNA, 927 bp, synthetic construct
  misc_feature 1..927: note = Description of Artificial Sequence: Synthetic coding sequence
  source 1..927: mol_type = other DNA
atgaagagctgcggcagcatgctgggcctgtgcggccagcggctgcctgctgcgtgggtgctcctgctgctgccatttcttccactgctgctccttgctgcccctgctccccacagggccagttacaagcctgtaattgtagtgcatggactatttgacagttcttacagctttagacacctgctcgagtacattaacgagacacacccggggaccgtagtcacggtcctggacctgttcgatggccgagagagtctcagaccactgtgggagcaggtccaaggtttccgggaagccgtagtccctatcatggcaaaagcaccacagggagtgcacctgatctgctatagccagggcggtctggtctgccgcgccctcctcagcgtaatggatgaccataatgttgactcttttatctccctctccagccctcagatgggccaatatggggacacggactatcttaagtggctgtttcccacaagcatgcgcagtaacttataccgcatttgctacagtccgtggggtcaggaattttctatctgtaattactggcacgatccacatcacgacgacctgtacctcaatgctagctcctttctcgcactgatcaacggcgaacgagaccacccgaatgctactgtttggagaaagaattttctgagagtaggacatttggttcttataggggggcctgatgacggggtgatcacgccttggcagtcctctttcttcggattttacgatgccaacgaaactgtgcttgaaatggaagagcaacttgtgtacctgcgagactcttttgggctgaagacgctgttagcaaggggtgcgattgtcaggtgcccaatggccgggatctctcacacagcttggcattctaacagaaccctgtacgaaacatgcatagaaccatggctgtcttag

SEQ ID NO: 198540 - DNA, 909 bp, synthetic construct
  misc_feature 1..909: note = Description of Artificial Sequence: Synthetic coding sequence
  source 1..909: mol_type = other DNA
atgctgggcctgtgcggccagcggctgcccgccgcctgggtgctgctcctcttgcccttcctgcctctgctcttactggctgcccccgctccgcatagagcctcctacaagcccgtaattgtagtacacggcctgttcgacagctcttattcctttagacacctgctggaatacataaatgagactcaccccggtaccgtggtcactgtgcttgacttatttgacgggagagagtcactgcgccccttatgggagcaagtgcagggatttcgcgaggccgtggtgcccatcatggctaaggctcctcagggggtgcatttaatctgttattctcagggcgggctagtctgcagggcacttctttcggtgatggatgatcacaatgtcgattctttcattagtttatcttcaccacagatgggacagtatggtgacactgattatctgaagtggctcttccccacgtccatgaggtccaacctgtacaggatttgctacagtccctggggccaggagttcagtatctgcaattattggcatgatccacatcacgatgatttatatctgaacgccagctcgttcctcgcactaattaacggagagagagaccaccctaatgcgacagtctggcgcaagaatttcctgagagttggccacctggtcctgattggcggaccggacgacggcgtaatcaccccatggcagtcttcgttttttggcttctacgatgcaaatgaaaccgtgctagaaatggaggagcagttggtctacctcagagactcgtttggattgaaaaccctcctggcacgtggagccatcgtcagatgtccgatggctggcattagccataccgcctggcacagtaatcgaactttgtacgagacttgcatcgagccatggttgtcatag

SEQ ID NO: 198541 - DNA, 909 bp, synthetic construct
  misc_feature 1..909: note = Description of Artificial Sequence: Synthetic coding sequence
  source 1..909: mol_type = other DNA
atgctgggcctgtgcggccagcggctgcccgccgcctgggtgctgttactcctgccctttctaccattgctcctgttggctgctcctgctccccaccgggcatcgtataaacccgtcatcgtggtccatggactattcgacagtagttatagctttcgccaccttctagaatatattaatgagacacacccagggaccgtcgttactgtgctggatctcttcgacggtagggaaagcctgcggcccctttgggagcaggtgcagggctttagagaagccgtcgtccctattatggccaaagccccgcagggtgttcacctcatttgttattcccagggtggcctcgtgtgccgagcccttctcagcgttatggatgaccacaatgtcgactcctttattagtctatcctcccctcagatgggacagtacggagacacagactacctcaagtggctgtttcctacatcaatgcgttcaaatctgtatcggatctgctatagcccatggggccaggaattctccatctgtaattactggcacgatcctcaccatgatgacctttatctgaacgcgtcatccttccttgctctgatcaatggagaacgggatcaccccaacgccacggtgtggcgaaagaactttcttagggtaggtcatctggtccttatcggtggacccgacgacggggtgatcacaccctggcagtcatcattttttggcttttatgacgcaaatgagactgtacttgaaatggaagaacaactggtgtacctcagagattcctttggcctaaaaaccctgctggcgaggggtgccattgtgcgctgtcctatggccggaatctcacacaccgcatggcactcaaacagaacactttacgagacctgtattgagccttggctttcgtag

SEQ ID NO: 198542 - DNA, 927 bp, synthetic construct
  misc_feature 1..927: note = Description of Artificial Sequence: Synthetic coding sequence
  source 1..927: mol_type = other DNA
atgaagagctgcggcagcatgctgggcctgtggggccagcggctgcccgcagcgtgggtcctactcctgctaccattcctgccattgttactgttggctgccccagcccctcacagggagtcatataagccagtgattgtggtgcacggattatttgattcatcttattctttcaggcatcttctcgagtacatcaacgaaactcatcctggcacagttgtgaccgtgctggatctgttcgacgggcgagaatctctgcggccattgtgggaacaggtgcagggtttccgggaggccgtggttccaattatggcaaaggctccccagggagtccatctgatttgttactcacaagggggactggtgtgtagagcactcctctctgttatggacgaccataatgtcgacagctttatcagtctatcttccccacagatgggccagtacggcgataccgattatcttaagtggctattcccaactagtatgcgaagcaatctctatagaatttgctactctccatggggacaggaattctctatctgcaactattggcatgacccacaccacgacgatctgtacctgaacgcgagctcctttctggccctcatcaacggagagagggatcatccaaacgctacagtctggaggaagaatttcctgagagtgggtcatctagtgttgatcggaggccccgacgatggcgtgataacaccctggcaaagtagtttcttcgggttttacgacgcgaatgaaaccgtgctggaaatggaggagcaactcgtctacctgagagactcatttggcctgaagactttgttagctagaggggccattgtcaggtgcccaatggcagggataagtcatacggcatggcactccaatagaactctctatgagacatgtattgaaccctggctgtcttag

SEQ ID NO: 198543 - DNA, 927 bp, synthetic construct
  misc_feature 1..927: note = Description of Artificial Sequence: Synthetic coding sequence
  source 1..927: mol_type = other DNA
atgaagagctgcggcagcatgctgggcctgtggggccagcggctgcccgctgcttgggtccttctcctgctaccgtttctgccgctcttgctgctggcagcgcccgctcctcatcgagcaagctacaaacccgttattgttgttcatggtctatttgattcttcctattcgtttcgccatctgttagagtatatcaacgaaacacacccgggcacagtggtcactgtcctcgatctcttcgacggtagggagtccctccggcccctgtgggaacaggtgcaggggttcagggaggccgtcgtacccatcatggcgaaagcaccacagggagttcatttgatatgctattcccaaggtggtctggtttgccgcgctctgctgtctgtcatggacgaccacaatgttgactctttcatctcccttagtagcccccagatggggcagtatggcgatacagactatctcaagtggctctttcccacctcaatgaggagtaacctgtatcgaatctgctattccccatggggccaagaattttcaatatgcaactactggcacgatccacaccatgacgacctgtatttaaatgcctcttctttcctcgccctcattaacggcgagagggatcaccctaatgctacggtgtggaggaagaactttttgagggttgggcacctcgtgctgattggcggccccgacgacggcgtcatcactccatggcagagtagcttttttgggttctacgacgccaacgaaactgtcctcgaaatggaagaacagctcgtgtacttgagagacagtttcgggttgaagacacttctggctcgtggagcaatcgtgagatgccctatggcggggatctctcataccgcgtggcattcaaacagaacactgtacgagacgtgtatagaaccttggctttcttag

SEQ ID NO: 198544 - DNA, 909 bp, synthetic construct
  misc_feature 1..909: note = Description of Artificial Sequence: Synthetic coding sequence
  source 1..909: mol_type = other DNA
atgctgggcctgtgcggccagcggctgcccgccgcctgggtgctgctgctgctcccctttctgcccctgctactgttagcagctccagcccctcatagagcaagctataagccggtcatcgtcgtgcatggtcttttcgactctagctatagcttccgccacctgttagaatatatcaatgaaactcaccccgggaccgtagtgactgttttggacctgtttgatgggcgcgaatccctgagaccactctgggaacaagttcaaggctttagggaggccgtggtgcccatcatggctaaggcccctcagggcgtgcatcttatctgttatagccaaggaggcctggtgtgccgcgctctcttaagcgtgatggatgaccacaacgttgattctttcatttccctgtcatccccacaaatggggcagtacggagacaccgattatttgaagtggctattccccacgtctatgcggagtaacctctaccgcatttgctatagcccttggggccaggaattcagtatttgtaactattggcatgatccacatcacgatgacctctacctgaatgcctcaagctttttggctctcatcaatggagagcgcgaccaccccaacgccacggtgtggcggaaaaattttctccgggtgggacatttggtgttgataggcggtcccgatgatggagtgattaccccatggcagtcctccttttttgggttttacgatgccaacgaaactgtgctcgagatggaggagcagctggtatacctcagagactccttcgggttgaagacgctgctcgctagaggcgctatcgttagatgcccgatggcagggatttctcataccgcctggcatagcaaccgaacactctacgagacctgtattgagccctggctgtcttag

SEQ ID NO: 198545 - DNA, 909 bp, synthetic construct
  misc_feature 1..909: note = Description of Artificial Sequence: Synthetic coding sequence
  source 1..909: mol_type = other DNA
atgctgggcctgtggggccagcggctgcccgccgcctgggtgctgctgctgctgcctttcctgcctttgctcttgctggctgcccccgctccccatcgagagtcttacaagccggtgatcgtagtccacggcctgtttgatagctcatacagcttcaggcacctactggagtacatcaatgagacacatcccgggacagttgtcacggtgctggacctgttcgacggccgcgagtctttgcggcctctgtgggagcaggtgcagggattccgtgaagccgtggtgccgatcatggcgaaagcccctcaaggcgtccatctaatctgttatagtcaaggaggactcgtatgccgcgccctgctgtctgtaatggacgatcacaatgtggatagtttcatctccctgtccagtccacagatgggccagtatggcgataccgattacctcaagtggctcttccctactagcatgcgctctaacctgtacagaatctgttattcaccctggggtcaggagttttctatctgcaactattggcatgatccccaccacgatgatctgtatcttaacgcttcttcttttttagccctgattaatggggagagagatcaccctaacgccacagtctggaggaagaactttctgcgggtcggccacctggtcctcattggcggacccgacgacggcgtgatcactccatggcagagctcattctttgggttctatgatgccaacgaaactgtgctggaaatggaggaacaactggtgtacctgagagactcgtttggcctcaaaacactcctggcgagaggcgccatcgtcaggtgccctatggcaggcatcagccacaccgcatggcactcaaaccgtactctgtatgagacctgtatcgagccttggctgtcttag

SEQ ID NO: 198546 - DNA, 909 bp, synthetic construct
  misc_feature 1..909: note = Description of Artificial Sequence: Synthetic coding sequence
  source 1..909: mol_type = other DNA
atgctgggcctgtggggccagcggctgcccgccgcctgggtgctgttattgctccccttcttgcccctgctgcttctggccgctcctgcccctcatagggagtcttataaacccgtaatcgttgtacacggacttttcgactcttcctattccttcagacatttgttggagtatatcaacgagacccaccctggcaccgttgtgacggtgctggacctgtttgatggacgggagtctctcaggccattatgggagcaggttcagggctttcgcgaggccgtggtgccaattatggcgaaggcaccccaaggtgttcatctgatttgttatagtcaggggggattggtgtgtagagcactgcttagtgtgatggacgaccacaatgtcgacagctttatcagtttatcgtccccgcagatggggcaatacggtgacactgattatttgaaatggctcttcccaacatccatgcggtccaatctgtaccgtatctgctacagtccctggggacaggagttttctatctgtaattactggcatgacccccatcacgatgacctgtaccttaatgcctcctccttcctcgccttgatcaatggcgagagggatcaccctaatgcaaccgtgtggcgcaagaattttctcagggttggacacctcgtgctgatagggggccccgatgacggagtgattactccgtggcagtcatcttttttcggtttctacgatgctaacgagacagtgttggaaatggaagagcagctggtgtacctgagggactcgtttggtcttaaaaccttactagctagaggcgctatagtccggtgtcctatggctggcatcagtcacaccgcgtggcactcaaacaggaccttgtatgagacttgcattgagccatggctcagttag

SEQ ID NO: 198547 - DNA, 909 bp, synthetic construct
  misc_feature 1..909: note = Description of Artificial Sequence: Synthetic coding sequence
  source 1..909: mol_type = other DNA
atgctgggcctgtggggccagcggctgcccgccgcctgggtgctgctgctgttgccctttctgccactgctccttttggcagcgcctgccccccaccgggagagctataaaccagtcatcgttgtgcatggactgttcgactcatcctattccttcagacatctcctcgagtacattaacgaaacacatcctggtaccgtggtgaccgtgctggatctcttcgacggccgagaaagccttcgtcctctgtgggaacaggtgcagggtttccgggaagccgtagtaccgataatggctaaagccccacagggagtccacctaatttgttactcccaaggaggcctggtttgtagggccctcctcagcgtgatggatgaccacaatgtggacagttttatatcactcagcagtccacaaatggggcagtatggcgacacagactaccttaaatggttgtttcccacctctatgaggagcaatctgtacaggatctgttacagtccctgggggcaagagttcagtatttgtaattactggcacgacccccatcacgatgacctctatctcaatgccagcagcttcctggcgttgattaacggcgaaagagatcaccccaacgctactgtatggcggaagaactttttgagagtgggacacctagtgctgattgggggacccgacgatggagtgatcaccccctggcaatcaagctttttcggcttctacgatgcgaacgagactgtgttggaaatggaggagcagttggtttaccttcgggatagctttgggttgaaaacgctcttagcacgcggggcaattgtgcgttgtccaatggcgggcatcagccataccgcttggcactccaacagaaccctttacgagacatgtatagagccgtggctgtcatag

SEQ ID NO: 198548 - DNA, 909 bp, synthetic construct
  misc_feature 1..909: note = Description of Artificial Sequence: Synthetic coding sequence
  source 1..909: mol_type = other DNA
atgctgggcctgtggggccagcggctgcccgccgcctgggtgctgttactactgccctttctcccacttctgctgctcgccgcccctgcgccacatagggcctcttacaagcctgttattgtggtgcacggcctgtttgacagtagttattctttccggcatctgctggagtacatcaacgagacccatcccggtaccgtggtcaccgtactagatctgttcgatggcagagagagtctccggcccctctgggagcaggttcagggttttcgcgaagccgtggtaccaatcatggccaaggcaccccagggcgtgcatctaatctgttacagccagggcgggcttgtgtgcagggccctgctgtcggtaatggatgaccacaatgtcgactcttttattagcctctctagcccccagatgggtcagtatggggatacagactatttaaagtggctctttcctacctccatgcgcagtaacctgtataggatctgctattccccatggggccaggagttcagtatctgtaactattggcacgacccccaccacgacgacctctatttgaacgcttccagcttcctcgctctgataaacggggaaagagatcacccaaacgccacagtttggcgaaagaatttcctgcgggtcggccacctcgttctcatcggtggcccggatgacggcgtcatcaccccatggcagagttccttctttggattttacgatgctaatgagacagtgctcgaaatggaagaacagctggtctacctgagagactcttttggattaaagacactgctagccaggggcgccatcgttcggtgccctatggcaggcatcagccatactgcttggcatagcaaccgcacgttatatgagacttgtatcgagccttggctctcctag

SEQ ID NO: 198549 - DNA, 909 bp, synthetic construct
  misc_feature 1..909: note = Description of Artificial Sequence: Synthetic coding sequence
  source 1..909: mol_type = other DNA
atgctgggcctgtggggccagcggctgcccgccgcctgggtgctgttgctgctcccattcctacctctcctactgctggccgcccccgcgccacaccgggcatcctataagccggtgattgtggttcacggcctgtttgattcctcatatagcttccgccatctactggaatatattaatgagacacaccccggcacggtggttacagtcttggatctgttcgatggacgcgagagtttgagacctctttgggaacaggttcaaggattccgcgaggccgttgtccctatcatggcaaaagcaccgcaaggcgtacacctgatctgctattctcaaggtggcttggtgtgtagggcgctgctaagcgtgatggacgatcataacgtagattcattcatcagcctgagtagcccccagatggggcagtacggggatactgactatctgaagtggctgttcccaacctcgatgcgcagcaacctctacaggatttgttactccccgtggggacaggagttctctatctgtaattactggcatgatccacatcacgatgatttgtacctgaacgcttcatcttttctcgctctcatcaatggagagagggatcatcccaacgcaactgtctggcgtaagaacttcttgcgcgtgggtcatctggtgctcattggtgggcccgatgacggggttatcaccccctggcagtcttctttcttcggtttttacgacgctaacgaaacagtgttggaaatggaggagcagctggtgtaccttcgggactcctttggcctgaaaacgctgctggcgcggggggccatcgtcaggtgtcccatggctggtatctcacatacagcttggcacagcaatcggacgctctatgagacctgcatcgagccgtggctctcatag

SEQ ID NO: 198550 - DNA, 909 bp, synthetic construct
  misc_feature 1..909: note = Description of Artificial Sequence: Synthetic coding sequence
  source 1..909: mol_type = other DNA
atgctgggcctgtggggccagcggctgcccgccgcctgggtgctgcttctcctgccattcctgcccctcttactcctggccgctcctgccccacatcgagctagttataaacccgtgatcgtcgtgcacggactcttcgacagctcctacagttttcgtcacttgctcgagtacattaacgagacccacccagggacagtggtcacagtgcttgatctctttgatggccgcgagtccctaagacccctgtgggaacaggttcagggttttcgggaggccgtggtgccaatcatggcaaaagctccccagggggtgcacctgatctgttatagccaaggcggcctggtctgccgggcactactttccgtaatggatgaccacaatgttgactcttttatatcattgagtagtccacaaatggggcagtacggggacactgactatctaaaatggctctttcctaccagcatgaggtccaacttatatcgcatttgctacagcccttgggggcaggagttttcaatttgtaattattggcatgacccccatcatgacgacctatatctaaacgcatcttcctttttggcattgatcaacggagagcgtgaccacccgaacgccaccgtctggagaaagaactttttgcgagttggacatctcgtgcttatcggcggacctgatgacggtgtcatcacgccctggcaaagcagctttttcgggttttacgatgcaaatgagaccgtgttagaaatggaagagcagctggtgtacttaagggactccttcggacttaagaccctgttagcccgcggagccatagtgagatgtccaatggccggcatttcacacacagcctggcactccaatcggaccctgtacgagacttgcatcgaaccatggctgagctag

SEQ ID NO: 198551 - DNA, 927 bp, synthetic construct
  misc_feature 1..927: note = Description of Artificial Sequence: Synthetic coding sequence
  source 1..927: mol_type = other DNA
atgaagagctgcggcagcatgctgggcctgtggggccagcggctgcccgccgcttgggtgctgcttctgttgccctttctgcctctgttgttactggcggcccccgctccacacagggccagttataagcctgtgatcgttgtccacggactcttcgattcttcatacagttttaggcacctgctggaatatatcaatgaaactcatcccggaaccgttgttactgtgctggacctgttcgacggccgggaaagccttcggccactgtgggagcaagtgcaggggttccgggaggccgtggtgcccattatggctaaggcaccgcagggcgtgcatctgatctgctactctcagggaggactcgtgtgcagggcactgctgagcgtcatggacgaccacaatgttgatagtttcatatcactgtcaagtccacagatgggccagtatggcgacacggactatttaaagtggctgtttcctaccagcatgcgtagcaatctgtaccggatttgttactccccatgggggcaggagttctctatttgcaactactggcacgatccacatcatgacgacctttacttgaatgcgagctctttcctggccctgatcaacggtgaacgagatcaccccaacgcaaccgtgtggcgaaaaaactttctcagagtcggacatcttgtgctgatcggcgggccggatgacggcgtcatcaccccatggcagagcagctttttcggcttttatgatgcaaatgaaaccgtcctcgaaatggaagaacaactagtgtatctccgggatagttttggcctgaaaaccctcctggcccggggagctattgtgcgatgccccatggctggaatctctcatacggcttggcattctaaccggacgttgtacgagacttgtatcgaaccttggcttagctag

SEQ ID NO: 198552 - DNA, 282 bp, synthetic construct
  misc_feature 1..282: note = Description of Artificial Sequence: Synthetic coding sequence
  source 1..282: mol_type = other DNA
atgctgggcctgtggggccagcggctgcccgccgcctgggtgctgcttctgctgcccttcctgcctctgctcctcctggccgccccagcccctcaccgggcgagttataagcctgtcattgtggttcatgggctgttcgattcctcttacagtttcaggcacctgctggagtacatcaacgagggagccctgtgtgctggtctttgcttcctgagctggatgattaccacttggatcctctcgagcccctcacccctgcatcgttgggattcaatggaatag

SEQ ID NO: 198553 - DNA, 543 bp, synthetic construct
  misc_feature 1..543: note = Description of Artificial Sequence: Synthetic coding sequence
  source 1..543: mol_type = other DNA
atgctgggcctgtgcggccagcggctgcccgccgcctgggtgctgctgctccttcctttcctccccctgctgctgctggctgcgcctgccccgcacagagcttcgtacaagcctgttatcgtggtgcatggtctattcgacagttcctatagttttcggcacctgctggagtacataaatgaaacccaccctggcactgtggtgacagtcctcgatctgttcgacggtcgcgagtctctgcggcctctctgggaacaggtgcagggatttcgggaagctgttgtgcctattatggcaaaggcaccacagggcgtgcacctgatctgctattctcaggggggcctcgtatgccgcgccctgctgtcagtgatggatgatcacaacgtcgattctttcatatccctgtctagtccccagatgggccagtatggagacactgattatctgaaatggctattcccaacaagtatgcgctccaacctgtaccgaatatgctactctccctgggggcaggaattcagtatttgcaactattggcactag

SEQ ID NO: 198554 - DNA, 927 bp, synthetic construct
  misc_feature 1..927: note = Description of Artificial Sequence: Synthetic coding sequence
  source 1..927: mol_type = other DNA
atgaagagctgcggcagcatgctgggcctgtggggccagcggctgcccgccgcctgggtgctcctgcttttgccctttctcccactgctgttgttggccgcaccagccccccatcgggctagctataagcctgtgattgtagtgcacggtctcttcgatagctcctattccttccgccatctgctggaatacatcaacgagacccatcctggaacagtggtgactgtcctggacttatttgatgggcgagaaagtctgcgcccactatgggaacaggttcagggatttcgagaggctgtggtgcccattatggctaaagccccccagggcgtccatctgatctgctattctcaggggggtctcgtatgtcgagccctactatccgttatggatgaccacaacgtggatagtttcatttccctcagctcccctcaaatgggccagtatggagacacagattatctcaagtggctttttccgaccagcatgaggtcaaacctgtatagaatctgctatagcccctggggccaggagttctccatctgtaattactggcatgatccacaccatgatgatctatacctaaatgccagctcttttctggccttaatcaatggtgaacgggaccaccctaacgcaactgtatggagaaagaactttctgagagtgggccatctggtgttgatcgggggtcctgacgacggcgtgataactccctggcaaagttcattcttcggcttttatgacgccaatgaaacagtgttggagatggaagagcagctcgtttatttaagggattcattcggactgaagacattgttagcacgcggcgcaattgtaagatgcccgatggccggcatctctcacaccgcctggcattcaaatcgcacattgtacgaaacctgcatcgaaccatggctgtcctag

SEQ ID NO: 198555 - DNA, 603 bp, synthetic construct
  misc_feature 1..603: note = Description of Artificial Sequence: Synthetic coding sequence
  source 1..603: mol_type = other DNA
atgctgggcctgtggggccagcggctgcccgccgcctgggtgctgctattactgcccttcctgccactgctgcttttggccgcccctgccccacacagagagtcatacaagcccgtgattgtggtgcatgggttgtttgactcgtcttactcatttcgacatctcctggaatacataaatgaaacgcatcctgggaccgtcgtaacggtgcttgatctgttcgacggccgcgaaagcttgagaccattgtgggagcaggtccaaggattccgtgaagcggttgtgcctattatggccaaagcaccacagggggtgcatctgatctgttatagccagggggggctcgtttgccgggccttgttgagcgtgatggacgatcataatgttgactcctttatatccttaagttctccccaaatgggacagtatggcgacaccgactatttgaagtggttgtttcccacgtctatgcggtccaatctctaccgcatctgctatagtccgtgggggcaggaattctccatttgcaactactggcacgatccacaccatgatgatctgtatctgaacgcctcctcatttttggcccttatcaacggctag

SEQ ID NO: 198556 - DNA, 477 bp, synthetic construct
  misc_feature 1..477: note = Description of Artificial Sequence: Synthetic coding sequence
  source 1..477: mol_type = other DNA
atgctgggcctgtggggccagcggctgcccgccgcctgggtgctgctgctccttcctttcctcccacttttacttctcgccgctccagctcctcaccgagaatcttataagcctgtcatcgtggttcacgggctatttgactcttcttactctttcagacacttattagaatatatcaatgaaatgggacaatatggagataccgattatctcaagtggctgttccccacaagtatgaggagtaatctgtaccgcatatgttattcaccatggggacaagagttctccatctgcaactactggcatgatccccaccacgacgatttatatctgaatgccagtagttttcttgcactgattaatggtgagagggaccatccaaacgcaaccgtgtggcgtaaaaatttcctccgagtcggccatttagtgctcatagggggtccagacgacggcgtgatcaccccatggcagtcatag

SEQ ID NO: 198557 - DNA, 543 bp, synthetic construct
  misc_feature 1..543: note = Description of Artificial Sequence: Synthetic coding sequence
  source 1..543: mol_type = other DNA
atgctgggcctgtggggccagcggctgcccgccgcctgggtgctgctgctgctcccatttctgccgttactcctcctggccgcacccgccccccaccgggccagctataaacccgttatcgtggtccatggcctctttgattcttcatatagtttcaggcatctcctggagtacatcaatgaaactcaccccggaacggtggttacagtgttggaccttttcgatggtagagagtctctccggccactgtgggagcaggtgcagggctttcgcgaggccgtggtcccaatcatggctaaggccccacagggagtgcatttaatctgctatagccagggaggattagtgtgtcgcgcccttctctccgtaatggatgaccataacgtagacagctttatcagtctatcctcccctcagatgggccagtacggagatactgattatttaaagtggctcttcccaacttcaatgcggtctaacctatacagaatttgctactccccatgggggcaggaattttccatctgcaattactggcactag

SEQ ID NO: 198558 - DNA, 477 bp, synthetic construct
  misc_feature 1..477: note = Description of Artificial Sequence: Synthetic coding sequence
  source 1..477: mol_type = other DNA
atgctgggcctgtggggccagcggctgcccgccgcctgggtgctgctactcctgccctttttgcctctgctcctgctggctgcccccgccccgcatcgggcctcatacaagcctgtgatcgtggtgcacggattgttcgacagcagctactccttcagacaccttctggagtacattaatgagatggggcagtatggggatacagattacctgaaatggctatttcctacatccatgcggagcaacctgtataggatctgctattcaccttggggacaggaatttagtatatgtaattattggcatgaccctcatcacgatgacctgtacctgaacgccagctcttttctggctcttattaatggcgaacgtgaccacccaaacgccactgtctggagaaagaacttccttagagtcgggcatctggtattgataggaggccccgacgatggagtcataactccctggcagtcttag

SEQ ID NO: 198559 - DNA, 543 bp, synthetic construct
  misc_feature 1..543: note = Description of Artificial Sequence: Synthetic coding sequence
  source 1..543: mol_type = other DNA
atgctgggcctgtggggccagcggctgcccgccgcctgggtgctgctgctgctgccatttctgccacttctgctgctcgcagcgccggccccgcatagggcctcatacaaacccgtcatagtggtccatggcctttttgactccagctattctttccggcatcttctggagtacatcaatgagacccatcctggaacagtcgtgactgtgctcgacttattcgacggcagggaatccctcagacccctatgggagcaagtgcagggttttcgggaggccgtcgtaccgatcatggccaaagccccgcaaggagttcatctcatctgttattcccagggcggattggtgtgcagagctctgctttcagtgatggacgatcataatgtcgatagtttcatctctctttcttcaccacaaatgggccagtatggcgatacagactacctgaaatggctcttccctacaagcatgcggtctaacctttaccgcatctgttattccccttggggacaggagttcagcatctgtaattattggcattag

SEQ ID NO: 198560 - DNA, 909 bp, synthetic construct
  misc_feature 1..909: note = Description of Artificial Sequence: Synthetic coding sequence
  source 1..909: mol_type = other DNA
atgctgggcctgtggggccagcggctgcccgccgcctgggtgctgcttctgctgccgtttctgcccctgctgttgctggcagctcccgccccccatcgagcaagctataagcctgtgatagtggtgcacggcctgttcgacagctcttattcttttagacatctgctggagtacatcaatgagacgcaccctggaaccgtagttaccgtactggacctgttcgacggccgggaaagcctgaggcccctctgggagcaggtgcaaggcttccgtgaagccgtggtccccataatggccaaagcccctcagggggtccacttaatttgttacagccagggggggcttgtttgcagggctctcctgagcgtaatggacgatcataacgtggattctttcatttccctctcatccccccaaatgggtcaatacggagacacagactacctcaagtggctgtttccgacctcaatgcgctccaatctatataggatttgttactccccttggggacaggagtttagtatttgcaattactggcacgacccacatcatgatgatctttatctcaatgcctcctctttcttggccctcattaacggcgagcgggaccaccctaatgcaaccgtgtggcgtaaaaacttcctgcgggtgggacacctggtgctgattggcggcccagatgatggtgtgatcacgccctggcagagctctttctttggcttctatgatgccaatgaaacagttcttgagatggaggagcagctcgtttatttaagggactcctttggactaaagactttactcgcacggggcgccatcgtccggtgtcctatggcaggaatatctcacactgcgtggcacagcaacaggactctgtacgagacatgtatcgagccatggctttcatag

SEQ ID NO: 198561 - DNA, 909 bp, synthetic construct
  misc_feature 1..909: note = Description of Artificial Sequence: Synthetic coding sequence
  source 1..909: mol_type = other DNA
atgctgggcctgtggggccagcggctgcccgccgcctgggtgctgcttctactcccatttctgccactactcctgctcgctgccccagcaccacacagagccagctataagcccgtgattgttgtgcatggactatttgactccagctattccttccgccacctcctggaatatattaacgagacccaccccggcactgtggtgactgtactggatctttttgacggcagagagagcctgaggccattgtgggaacaagtgcagggcttccgcgaggccgtcgtaccaatcatggcgaaggctccacaaggcgtgcatctgatttgttactcacagggagggttagtatgtcgcgccttgctttcagttatggatgaccacaacgtggactcgttcataagcttgtcttctccccagatgggccagtacggagacacggattatctcaagtggctgttccccacctcaatgagatccaatctttaccggatttgctactccccctggggccaggaattctcaatctgcaactactggcacgatccacaccacgacgatctgtatctgaacgctagttcttttctagcccttatcaacggggagagggaccacccgaatgcaaccgtctggagaaaaaattttctgagggtggggcacttggttctgatcgggggtcctgacgatggcgtcattacaccctggcagtcctcttttttcgggttttacgacgccaacgagaccgtcctggaaatggaagagcagctcgtgtaccttagagacagcttcgggttgaaaaccctgttggcccgtggggcaatcgtccgttgccccatggctggaatcagccatacagcatggcactcaaatagaaccctgtacgaaacctgcattgagccatggctttcctag

SEQ ID NO: 198562 - DNA, 927 bp, synthetic construct
  misc_feature 1..927: note = Description of Artificial Sequence: Synthetic coding sequence
  source 1..927: mol_type = other DNA
atgaagagctgcggcagcatgctgggcctgtggggccagcggctgcccgcagcatgggtactcctgctgctgcccttcctccccctgctcttactcgcggcccctgcccctcatcgagcctcctacaaacctgtgatagtcgtccatggattgtttgatagttcctactctttccggcatctgctggaatatatcaatgagacacatccagggacagtcgtcaccgtactcgacctctttgatggcagggagagcttacggcctctatgggagcaagttcaggggttcagagaggccgttgttcctataatggccaaggcaccacagggagtgcatctgatctgttactcgcagggcggcttagtctgccgtgctctcttaagcgtcatggatgatcacaatgtggactcttttatcagtctttccagtcctcagatgggccaatacggtgacaccgactacctgaagtggctgtttccaacaagcatgaggtccaatctgtaccggatatgttacagcccctgggggcaggagttcagcatctgcaattattggcatgatccccatcacgacgatttgtacctgaatgcgtcatcttttctcgccctaattaacggcgagcgtgaccatcccaacgcaaccgtttggcggaagaacttccttcgcgtggggcacttggtcctgatcggtggtccagacgacggggttattacaccatggcagtcatcgttcttcgggttctacgacgcgaacgagaccgtgttagaaatggaggagcagctggtctatttacgcgattcctttggactgaaaaccctgctggctcggggggctatagtgcgctgcccgatggcagggatctcccatactgcatggcactctaaccggaccctatatgaaacctgtatcgaaccctggctgtcctag

SEQ ID NO: 198563 - DNA, 282 bp, synthetic construct
  misc_feature 1..282: note = Description of Artificial Sequence: Synthetic coding sequence
  source 1..282: mol_type = other DNA
atgctgggcctgtggggccagcggctgcccgccgcctgggtgctgctcctcctcccctttcttcctctgttgctgcttgctgctcccgcgccgcacagagcctcgtataaacccgttatcgtggtccacggccttttcgacagctcttattcctttcgccatctgctggagtacatcaatgaaggggccctgtgcgccgggctctgttttttgtcgtggatgatcacaacatggatcctgtcgtctcctagtccacttcaccgatgggactctatggagtag

SEQ ID NO: 198564 - DNA, 909 bp, synthetic construct
  misc_feature 1..909: note = Description of Artificial Sequence: Synthetic coding sequence
  source 1..909: mol_type = other DNA
atgctgggcctgtggggccagcggctgcccgccgcctgggtgctgttgctcctgcctttcctgcctttactcttactagccgctcccgcaccacacagagccagctacaaaccagtgattgtagtccacggactgttcgattctagttacagtttcagacacctcctagaatacattaatgagactcaccctggcaccgtcgttactgtcctggacctatttgatgggagggagagcctcaggccactgtgggaacaggtccaggggtttcgcgaagccgttgtgccaataatggccaaagctcctcaaggcgttcacctgatctgttactcccagggaggcctcgtttgccgagccctcttaagtgtcatggatgaccataatgtggactccttcattagtttgtcatctccacaaatgggacagtatggcgatactgattacctgaagtggctgtttccgacttccatgcggtccaacctctaccggatctgctattccccatgggggcaggaattctccatttgtaactattggcatgacccacatcatgacgatctctaccttaacgccagcagtttcctggcgctgatcaatggcgaaagggatcacccaaatgccactgtgtggcgaaagaactttctgcgggtgggacacttggttttgatcggagggcccgacgatggtgttattacaccctggcagagttctttcttcggcttctacgacgccaacgagacagtgttagagatggaggaacagttggtgtacctgcgtgactccttcggactgaagaccctgctggcacggggagcaattgtccgctgccccatggctggcatctcccatactgcctggcatagtaataggacgttgtacgaaacctgcattgagccctggctaagttag

SEQ ID NO: 198565 - DNA, 477 bp, synthetic construct
  misc_feature 1..477: note = Description of Artificial Sequence: Synthetic coding sequence
  source 1..477: mol_type = other DNA
atgctgggcctgtgcggccagcggctgcccgccgcctgggtgctgctgctgctgcccttcttgcctcttcttctgctcgcggcaccagcccctcaccgcgcgtcctacaaaccagtaatcgtcgtgcatggtctctttgattcttcatactcttttcgacacctcctggaatacatcaacgagatgggacaatatggagacacagattatctgaaatggctgtttcccactagcatgcgttccaacctgtatcgcatatgttactctccgtggggtcaggaattctctatttgcaactactggcatgatccccaccatgatgatctgtacctaaatgctagttccttccttgcactgatcaatggagagagggaccaccccaacgccacagtgtggagaaaaaattttctgcgcgtcggacatctggttctcatcggcggcccagatgatggggtgataaccccctggcaaagttag

SEQ ID NO: 198566 - DNA, 711 bp, synthetic construct
  misc_feature 1..711: note = Description of Artificial Sequence: Synthetic coding sequence
  source 1..711: mol_type = other DNA
atgctgggcctgtggggccagcggctgcccgccgcctgggtgctgctacttctaccattccttcctctgctgctgttggccgcacccgcgcctcaccgggagagctataaaccggtcattgtggttcacggcctgtttgatagctcatacagctttaggcacctgctggaatacatcaatgaaactcaccctggaacagtggtaacagtgctggatttgttcgatggccgtgaaagcttgaggcctctgtgggagcaagtgcagggctttcgtgaggccgtggtgccaataatggctaaagcccctcaaggagtgcacttgatttgttattcacaaggcggcctcgtgtgcagagccctcctgtccgtcatggacgatcataatgtggactcgtttatctcattatccagtccacagatgggacagtacggggacacggattatttgaagtggctcttccctacatccatgaggtccaatctatatcgcatatgctacagtccatgggggcaggagtttagcatatgcaactactggcatgatcctcatcacgacgacctataccttaacgcctcttcttttttggctctaattaatggggagcgtgaccatcctaacgcgaccgtttggaggaagaattttttacgcgtgggccacctcgtgcttattgggggcccagacgacggcgtgatcacgccttggcagtcttag

SEQ ID NO: 198567 - DNA, 543 bp, synthetic construct
  misc_feature 1..543: note = Description of Artificial Sequence: Synthetic coding sequence
  source 1..543: mol_type = other DNA
atgctgggcctgtggggccagcggctgcccgccgcctgggtgctgttactcctccccttcttacctctcctactgctcgccgccccagccccccacagggcatcttacaaacctgtaatagttgtccatggtcttttcgattcctcttacagttttcgtcatttgctggaatatattaatgaaacccaccccggaaccgttgtgactgtgcttgacctgtttgacggtagagagagtcttcgaccactgtgggaacaagtgcaggggtttagggaggcagtggtgcccattatggcgaaagcaccccagggggttcacctgatttgttattcgcagggcggactcgtgtgcagagctttgctgtctgtcatggatgatcataatgtggatagtttcatctccctcagctccccccaaatgggacagtatggggacacggattacctcaagtggctcttccccacctccatgcggagtaacctttaccgtatttgctactccccttggggccaggagttcagcatctgtaattactggcactag

SEQ ID NO: 198568 - DNA, 711 bp, synthetic construct
  misc_feature 1..711: note = Description of Artificial Sequence: Synthetic coding sequence
  source 1..711: mol_type = other DNA
atgctgggcctgtggggccagcggctgcccgccgcctgggtgctgttactattgccctttcttccactactgctgttggctgcgcccgctccacatcgggagagttacaaacccgtcatcgtcgtacacgggctgttcgattcgagctactccttcaggcaccttttggagtacatcaacgagacccatcccggaacagttgtgaccgtgcttgatctcttcgacggaagggaaagtttaagaccactctgggagcaagtccagggattcagggaagctgttgttcctataatggcaaaggctcctcagggcgtgcatctgatttgttattcacagggtgggctcgtctgcagggcattgctctccgtgatggatgaccataatgtggattccttcatcagcctgtccagtccccagatgggacaatacggtgatacagattatctgaagtggctttttcccaccagtatgaggtctaacctataccgtatctgttacagcccctggggacaggagttctcaatttgcaattactggcacgatcctcaccacgatgacctttacttgaacgcatcttcctttttggccctgataaacggtgaaagggaccaccccaatgctacagtgtggagaaaaaacttcctgcgcgttggccacctagtcctcatcggagggcctgatgacggcgtgatcactccctggcagtcgtag

SEQ ID NO: 198569 - DNA, 603 bp, synthetic construct
  misc_feature 1..603: note = Description of Artificial Sequence: Synthetic coding sequence
  source 1..603: mol_type = other DNA
atgctgggcctgtggggccagcggctgcccgccgcctgggtgctgctgctgcttcccttcctgcccctgcttctactggcagcccctgcccctcatcgtgcttcttataagcctgtcatcgtggttcatggattgttcgactctagctacagctttcgtcatctactggagtacatcaacgagactcacccaggcactgttgtgacagtgctggacctgttcgatgggagggagtccttgagacccctatgggaacaggtccaggggttcagggaggccgtcgtgcctattatggctaaggctcctcagggagttcacctgatttgttactctcaaggcgggctcgtatgtcgagccttactttcagtgatggatgaccataacgtggattccttcatctctctgtcctcccctcaaatggggcagtatggagacaccgactacctcaaatggctgttcccaacatctatgcggtccaacctgtatcgcatctgctacagcccatgggggcaggaattcagtatttgcaactactggcacgacccacatcatgacgatttatacctgaatgcctccagcttcctggcgctgataaacggctag

SEQ ID NO: 198570 - DNA, 909 bp, synthetic construct
  misc_feature 1..909: note = Description of Artificial Sequence: Synthetic coding sequence
  source 1..909: mol_type = other DNA
atgctgggcctgtggggccagcggctgcccgccgcctgggtgctgctactcctgccatttctgcccctcttactcttggcagctcctgctccgcacagagcgagctataagcctgttatcgtggtgcacgggctctttgatagttcctatagtttccgtcatctgctggagtatataaacgagacccaccccgggacagtggtcactgtcctcgatctgttcgatggaagggaatcattgagacctctctgggagcaagtgcaggggttccgggaggctgttgtgccgatcatggccaaagctccccagggagtgcacctgatctgctactctcagggtggtctggtgtgtagagcacttctgtccgtcatggatgaccataatgttgatagctttatttctctttcatctcctcagatggggcagtacggcgacacagattatctgaagtggctgttcccgaccagcatgcgctccaacctctaccggatttgctatagcccatggggccaggagttctcaatatgtaattattggcacgatccacatcacgacgatttgtatttaaacgcatccagctttcttgcgctgattaacggcgaacgcgaccaccccaatgctacggtgtggcggaaaaactttttgcgggtggggcatctggtattaattggcggtcctgatgatggtgtcatcacaccctggcagtcaagtttttttggtttctacgatgcgaatgaaaccgtgcttgaaatggaagagcagctcgtgtatctgagagattccttcggcctgaagactctcttggcaaggggggctatagttcgttgcccgatggccggaatatctcacacggcctggcactcgaacaggactctgtatgagacttgtattgaaccatggctcagctag

SEQ ID NO: 198571 - DNA, 603 bp, synthetic construct
  misc_feature 1..603: note = Description of Artificial Sequence: Synthetic coding sequence
  source 1..603: mol_type = other DNA
atgctgggcctgtggggccagcggctgcccgccgcctgggtgctgctgctcctgccttttctcccactgctgctgctggcggcacccgcacctcatcgtgcctcatacaagcccgtgatcgtggtgcacggactgtttgattcttcttatagttttaggcatcttctggagtatatcaacgaaacacaccctggaacggtcgtaaccgttctagatctcttcgacggaagagagtctctccgaccgctgtgggagcaggtgcaggggtttcgggaagcagtggtccccatcatggctaaggctccgcagggggttcatttgatatgctattctcagggaggcctcgtgtgccgcgccctgctgtccgtcatggacgaccacaacgtcgatagctttatttctcttagctcaccccagatgggtcagtatggtgataccgattacttaaagtggttgttcccgacttccatgaggtcaaatttgtataggatttgttattctccctggggacaggagttttcaatttgtaactactggcatgacccacaccacgatgacctgtacttaaacgcttcatcatttctagcacttataaatggctag

SEQ ID NO: 198572 - DNA, 729 bp, synthetic construct
  misc_feature 1..729: note = Description of Artificial Sequence: Synthetic coding sequence
  source 1..729: mol_type = other DNA
atgaagagctgcggcagcatgctgggcctgtggggccagcggctgccagccgcctgggtcctcttgctcctgcctttcctccccctcctcctgttggcagcaccagcgccccatcgggaaagttacaagcccgttattgtggtccacggtctgttcgatagctcatatagctttcgacacctgctcgaatatatcaacgaaactcatccaggaacggtggtcaccgtcctggatttgtttgatggacgcgagtccctgcggccactttgggaacaggttcagggattcagggaagctgtcgtaccaattatggcaaaggcacctcaaggggtacatcttatctgctactcacagggagggctcgtatgtcgagctctgctgtccgttatggatgatcataacgtagacagctttatttcgctgtccagcccccagatgggccaatatggcgacaccgactatcttaaatggctgtttccgactagtatgaggagcaacttgtaccgtatatgctattccccatggggtcaggagtttagcatatgtaactactggcacgatccgcaccacgatgatctttacctgaacgccagctccttccttgctttaattaatggtgagagagaccaccccaatgcaaccgtctggaggaagaacttcctgcgtgttgggcatctcgttcttataggaggccctgatgacggcgttataactccgtggcagtcctag

SEQ ID NO: 198573 - DNA, 711 bp, synthetic construct
  misc_feature 1..711: note = Description of Artificial Sequence: Synthetic coding sequence
  source 1..711: mol_type = other DNA
atgctgggcctgtggggccagcggctgcccgccgcctgggtgctgctccttcttccatttcttcctttactgcttcttgctgcgccagcaccacatcgtgagtcctataaacccgtcatcgtcgttcacgggctgttcgacagcagctactcttttcggcacttgcttgagtacatcaacgaaacgcaccccggaacagtggtgaccgtcttagacctctttgacgggagggaaagtttgagacccctgtgggaacaggtgcaaggttttagggaagcagtggtcccgattatggcaaaggcccctcaaggcgtgcacctgatatgttattcacaaggcggcctagtctgtcgagcattactcagcgtgatggacgatcacaatgttgatagctttattagcttgtccagccctcaaatggggcagtatggagataccgattacctaaaatggctttttccaacatctatgagatccaacctgtataggatttgttactcaccttggggccaggagttcagcatctgcaattactggcacgaccctcatcacgatgacctctacctcaatgcgtctagcttcttggccctgatcaatggtgaaagagaccatccaaacgctacagtctggcgaaagaacttcctccgcgtcggtcatctggttcttattggaggacccgacgacggcgtcattactccatggcaatcttag

SEQ ID NO: 198574 - DNA, 543 bp, synthetic construct
  misc_feature 1..543: note = Description of Artificial Sequence: Synthetic coding sequence
  source 1..543: mol_type = other DNA
atgctgggcctgtggggccagcggctgcccgccgcctgggtgctgcttctgctgccttttctgcccctgctgctgctggccgccccggccccacacagggccagttataagccagtaatagttgtgcacggtctgtttgacagctcatacagctttagacatctgctcgagtacattaacgaaacccacccgggtaccgtggtcaccgtgttagatctgttcgacggacgcgagtctctgcgacccctgtgggagcaggtccagggttttagggaggccgttgtgcccataatggcaaaagcgccccagggagtccacctcatatgttatagtcaggggggtctggtgtgtcgagcgcttttgtcagtgatggatgatcacaacgttgacagcttcatatctctgagcagtccccagatgggccagtacggcgacactgactatctgaagtggctgttccctacctcaatgcggtctaatctgtaccgcatatgttacagcccctggggtcaagagttctcgatttgcaactattggcactag

SEQ ID NO: 198575 - DNA, 477 bp, synthetic construct
  misc_feature 1..477: note = Description of Artificial Sequence: Synthetic coding sequence
  source 1..477: mol_type = other DNA
atgctgggcctgtggggccagcggctgcccgccgcctgggtgctgctcttgttacccttcctcccgcttttactcttggccgctccagcaccccaccgggcctcctacaagccagtcatcgtcgtgcatggactgtttgactcctcctattcttttcgccatctgttggagtacatcaacgagatgggacaatacggagacactgactacctcaaatggttgttccctaccagcatgagatcaaatttataccggatctgctattcgccatggggccaggagttcagtatctgtaactattggcacgacccacaccacgatgacctctacctgaatgctagcagctttctagccctcatcaacggtgagcgggatcaccccaacgccactgtgtggaggaagaactttctgcgcgtgggacacctcgtgctgatcggtgggcctgacgatggcgtcattaccccttggcagagttag

SEQ ID NO: 198576 - DNA, 603 bp, synthetic construct
  misc_feature 1..603: note = Description of Artificial Sequence: Synthetic coding sequence
  source 1..603: mol_type = other DNA
atgctgggcctgtggggccagcggctgcccgccgcctgggtgctgcttctgctcccgttcctgcctctgctgctactggctgccccagccccacaccgggagagttataaaccagtcatagtagtgcacgggttattcgattccagctacagcttcaggcacttgctggagtacataaatgagacgcatccaggcactgttgtgaccgttctggatttgtttgacggaagagaatctctgaggccgctctgggagcaggttcagggcttccgggaggctgtggtccctattatggctaaggcaccccagggagtgcacctgatctgttactcccaggggggcctggtgtgcagggccttattgagcgtaatggatgaccacaatgtggatagcttcatatctctgagttctccccaaatgggacaatacggggacactgattatttaaagtggctgtttccgacttccatgcggagcaatttgtaccggatctgctactctccctggggtcaggagttttcaatttgcaactactggcacgacccccaccatgacgacctgtacttgaatgctagctcatttctcgcgttgatcaatgggtag

SEQ ID NO: 198577 - DNA, 603 bp, synthetic construct
  misc_feature 1..603: note = Description of Artificial Sequence: Synthetic coding sequence
  source 1..603: mol_type = other DNA
atgctgggcctgtgcggccagcggctgcccgccgcctgggtgctgctgctgctgcctttcctgcccctcctgctgctggcagcaccagctccccatagagcaagctacaaacctgtgattgtggtgcatggcctgttcgactcctcctacagcttccgccatcttctcgagtatataaacgagacacacccaggaacagttgtgaccgtccttgacctgtttgacggccgtgagtctttacgccccctttgggagcaggtgcagggttttcgtgaggccgtggtccctatcatggccaaagctccgcagggcgtacacctcatttgctattctcagggggggttggtctgccgagctctgctctcggtgatggatgatcacaacgtagactcattcatttccctctcaagtccccaaatgggacagtacggagatacagattacttgaaatggctcttcccgacctccatgaggtccaatctttatagaatatgctactcgccgtggggacaggagttctctatttgtaattattggcatgaccctcatcatgatgacctctacctgaacgcgagcagctttttggctctcataaatggctag

SEQ ID NO: 198578 - DNA, 441 bp, synthetic construct
  misc_feature 1..441: note = Description of Artificial Sequence: Synthetic coding sequence
  source 1..441: mol_type = other DNA
atggacgaccacaacgtggacagcttcatcagcctgagcagcccccagatgggccagtatggagatacagattacctgaaatggctttttcctacctccatgaggagtaacttgtacaggatctgctatagcccgtggggccaagagttttcaatttgcaactattggcacgacccacaccatgacgatttgtacctcaatgcgagctcgttcctagctctaatcaacggcgagcgagaccatcctaacgcaactgtctggagaaaaaacttcctgcgggtggggcacctggtgcttattggagggccagatgatggggtcatcaccccctggcagtccagcttctttggcttctatgatgcaaatgaaaccgtcctcgagatggaagaacagctacctgttggctcttcggtgaaggctaaccatggagtgcaggggtag

SEQ ID NO: 198579 - DNA, 477 bp, synthetic construct
  misc_feature 1..477: note = Description of Artificial Sequence: Synthetic coding sequence
  source 1..477: mol_type = other DNA
atgctgggcctgtggggccagcggctgcccgccgcctgggtgctgctgttgctcccttttcttcctttgctgcttcttgctgcccccgcgccccaccgggctagttacaagcccgtgattgtggtccacggtctgttcgactcatcatatagcttcagacatcttctagagtacatcaatgagatgggtcagtacggggacactgactatttgaagtggctgttcccaacatcgatgcgctccaacctctaccgcatctgctactccccctggggccaggaattttctatatgcaattattggcacgacccgcatcacgacgacctttacctgaatgcctctagctttctggctctcataaacggtgaacgtgatcatccaaacgcaaccgtgtggcgcaagaacttcctccgggtgggtcatctagtcttaataggagggccagatgatggggttatcaccccttggcagagttag

SEQ ID NO: 198580 - DNA, 909 bp, synthetic construct
  misc_feature 1..909: note = Description of Artificial Sequence: Synthetic coding sequence
  source 1..909: mol_type = other DNA
atgctgggcctgtggggccagcggctgcccgccgcctgggtgctgctcttattacccttcctccctcttctgttactggctgcacctgcgccccatagagcatcttacaagccagtgattgtcgtgcacggactgtttgatagttcttactccttccgccacctcctggagtatatcaacgaaacccatccagggacagtggtcacagtgttggatctgttcgacgggagagagtctctgagacctctgtgggaacaggtccagggattccgtgaggctgtcgtacccatcatggccaaagcccctcaaggcgttcatcttatatgttactctcagggagggttggtttgccgagcactgctcagcgtcatggacgaccataacgtagattcttttattagcctctccagcccacagatgggccagtacggagacacagactaccttaaatggttgttcccgacttccatgcgcagcaatctgtaccggatttgttatagtccatggggccaagagtttagcatctgcaattactggcacgacccccaccacgacgacctgtacttaaacgcttcctcctttctagcgctaattaatggcgaaagggatcaccctaacgccactgtttggcgcaaaaatttcctccgagtcggacatctggtcctgataggcggacctgatgacggagttatcaccccatggcagagtagcttttttggcttctatgacgctaacgagaccgtactagagatggaggagcagcttgtttacctcagggattccttcggactaaaaacacttcttgctcgcggcgctatcgtgcggtgccctatggctgggatttcccacaccgcctggcactcgaacagaacactctacgaaacttgtatagagccctggcttagctag

SEQ ID NO: 198581 - DNA, 909 bp, synthetic construct
  misc_feature 1..909: note = Description of Artificial Sequence: Synthetic coding sequence
  source 1..909: mol_type = other DNA
atgctgggcctgtggggccagcggctgcccgccgcctgggtgctgcttttgctcccctttctcccactgctgctgctcgcggcccccgctccccacagagcttcttataagcctgtcattgtggttcacgggctctttgattcctcttactctttccgccacttactggagtacattaacgaaacgcacccaggcacagtcgttactgtgctggacctcttcgatggccgtgaatcgctccggcctctgtgggagcaggtgcagggcttcagggaggccgttgtgccgataatggctaaagccccccagggagtccatttgatctgttatagtcagggggggctcgtctgcagggctctcctgtcagttatggacgaccacaacgtggatagctttattagcctcagctcaccccagatgggccaatacggagacaccgattacctcaagtggctgtttcccacatccatgcgcagcaacctctatcgcatctgttactcaccatggggccaagaattcagtatatgcaattattggcatgacccccatcatgacgatctgtacctgaacgcctcctcctttctcgctctgattaacggggagcgggaccaccccaatgctacggtttggcgcaaaaatttcctaagggtggggcacttggtcctcatcgggggtccagacgacggtgttatcactccctggcagtctagcttcttcgggttctatgacgccaatgaaactgtgcttgagatggaagaacagctggtgtatctgagagattcgtttgggctcaaaacgctgctggctcggggcgcaatcgtgagatgcccaatggccggaatcagtcatacggcttggcacagtaacaggaccctgtacgagacttgcattgaaccgtggctctcctag

SEQ ID NO: 198582 - DNA, 909 bp, synthetic construct
  misc_feature 1..909: note = Description of Artificial Sequence: Synthetic coding sequence
  source 1..909: mol_type = other DNA
atgctgggcctgtggggccagcggctgcccgccgcctgggtgctgcttcttctgcctttcctgcctctcttgttgctggcagcccccgctccacaccgcgcgagctataaacccgtcattgttgtccatggtctcttcgactcttcatactccttccggcatctacttgagtacatcaatgaaacacaccccgggacagtagtgaccgtattggacctctttgacggacgagagtcccttcgcccattatgggaacaggttcaggggttccgcgaagccgtcgtgcctatcatggccaaagccccacagggtgtacaccttatctgttacagtcaaggaggcctcgtgtgtagagcattactcagcgtgatggacgatcacaacgttgattcgttcattagcttgagctccccacaaatgggccagtacggggacaccgattacctcaaatggctgtttccaacatccatgcgttccaatttatacagaatatgttattctccctggggccaagagttcagcatatgcaactactggcatgatccccaccacgatgacctgtatctcaacgcatcgtcatttctggcattaatcaacggcgaacgggatcatcccaatgctaccgtttggcgaaaaaactttcttagagtaggacatctggttctgattggagggccggacgatggagtgattacaccatggcagagcagtttttttggcttctatgatgccaacgagacagttctcgagatggaagagcaactggtgtatttgcgcgactccttcggattaaaaactctgctagcacggggcgcgatcgtgcgctgtccaatggctggcataagtcacaccgcctggcactccaatcggaccttgtatgagacctgtatagagccttggttgtcctag

SEQ ID NO: 198583 - DNA, 282 bp, synthetic construct
  misc_feature 1..282: note = Description of Artificial Sequence: Synthetic coding sequence
  source 1..282: mol_type = other DNA
atgctgggcctgtggggccagcggctgcccgccgcctgggtgctgctactgctcccgtttcttcctctgttgcttttagccgcaccggcacctcaccgggaatcttacaaaccggttatagtggtgcacgggctctttgatagctcttactcatttagacacttgttggagtatataaatgaaggcgcattatgcgctggactttgttttctatcctggatgatcacaacctggattctctcatccccaagtccactgcaccgttgggactcgatggaatag

SEQ ID NO: 198584 - DNA, 603 bp, synthetic construct
  misc_feature 1..603: note = Description of Artificial Sequence: Synthetic coding sequence
  source 1..603: mol_type = other DNA
atgctgggcctgtggggccagcggctgcccgccgcctgggtgctgctgctccttccattcctcccactcctcctattggctgctcctgctccccacagagcaagctacaagccagtgatcgtcgtgcacggcctcttcgatagcagctattcttttcggcatctccttgaatacatcaacgaaactcaccctggcactgtggtaacagtgctggaccttttcgacgggcgagaaagtttacgcccactctgggagcaggtgcagggattcagagaggcggtggtccccatcatggccaaggcaccacagggagtgcacttgatatgttacagtcaaggcggtcttgtctgtagggccttattgtctgtcatggatgaccataacgttgacagttttatctctctttccagcccgcagatggggcagtatggggacacagactatctgaaatggctctttcccacctctatgaggtccaacctctaccggatttgttatagtccctggggacaggagtttagcatctgcaactactggcatgatcctcatcacgacgatctctacctcaatgcatctagtttcctggccctaatcaatggctag

SEQ ID NO: 198585 - DNA, 603 bp, synthetic construct
  misc_feature 1..603: note = Description of Artificial Sequence: Synthetic coding sequence
  source 1..603: mol_type = other DNA
atgctgggcctgtggggccagcggctgcccgccgcctgggtgctgcttttgctcccattcttgccgctgctacttctggccgctccggccccgcacagggctagctacaagcccgtgatcgtcgtccatggtctgttcgacagtagttatagctttcggcatcttctcgagtatataaacgagacacatcccggaaccgtggtgacagttcttgacttgtttgacggaagagagagtctgcgcccactctgggaacaggtgcagggctttcgggaggccgtggttccaatcatggcaaaagctccgcaaggagtgcatctcatatgctattcccagggagggctggtctgtcgcgccctccttagtgtcatggacgatcacaacgttgacagttttatatccctcagttctccccagatgggccagtacggcgacacagattatctcaaatggctttttccaacaagtatgaggagcaacttgtataggatctgttactctccatggggccaggaattctctatctgcaactactggcatgacccccatcatgacgatctctatttaaacgcctcctcatttctggctttgataaacgggtag

SEQ ID NO: 198586 - DNA, 909 bp, synthetic construct
  misc_feature 1..909: note = Description of Artificial Sequence: Synthetic coding sequence
  source 1..909: mol_type = other DNA
atgctgggcctgtggggccagcggctgcccgccgcctgggtgctgctgttgctgccattcctgccactgctgctcctggcagctcccgcaccgcacagagcttcctacaaacctgtcattgtggtgcatggactgtttgattccagttatagtttcaggcatttgttggaatatatcaacgagacacaccctgggacagttgtgacggttctcgatctcttcgacggaagggaaagcctgcggcccttatgggagcaggtccaggggttccgtgaagctgttgtgcctatcatggccaaagctccccagggtgtgcacctgatttgctatagccaaggcggcttagtctgtagagcccttctgtccgtgatggacgaccataacgtcgattcattcattagtctgtcgtctccgcagatgggacagtatggcgacaccgactaccttaaatggctcttccccacttccatgagatccaacctttacagaatttgttactcaccctggggacaggaattttccatctgtaactattggcatgacccgcatcatgatgatctgtacttgaacgctagcagctttttggccctgattaacggagaaagagatcacccaaatgccaccgtatggcgcaagaactttctacgcgtcggacacctcgtcctcataggtgggcctgacgatggagtcattacaccttggcagtcctccttctttggtttttacgacgccaacgaaacagtgctggagatggaggaacagctggtttatctgagagattccttcggtctcaagacactcctggcaaggggagccattgtgcgctgtcccatggctgggattagtcacaccgcctggcactcaaatcgcacactctacgagacttgcatcgaaccatggttatcgtag

SEQ ID NO: 198587 - DNA, 906 bp, synthetic construct
  misc_feature 1..906: note = Description of Artificial Sequence: Synthetic coding sequence
  source 1..906: mol_type = other DNA
atgctgggcctgtgcggccagcggctgcccgccgcctgggtgctgctgctcctcccctttctacccctcctgttactcgcggctccagctcctcaccgtgctagctataaacccgttatcgtggtgcacggcctctttgactcaagttactccttccgacacctcttagagtacattaacgagacccaccctgggactgttgttaccgtcctagatttgtttgatggccgggagtcactgaggcccctatgggaacaagttcagggattccgcgaagcagtggtgccaatcatggctaaagcgccacagggggtacatctcatctgctattctcagggaggactggtgtgtcgagcccttttgtccgtcatggatgatcacaatgtggacagcttcattagcttgtcatctccacagatgggccagtatggggacaccgattacctcaaatggcttttccccacaagtatgcgctccaacctatatcggatttgctattccccatggggacaggaattctccatctgtaactattggcacgatcctcaccatgacgatctatatctgaatgccagttcctttctggcactcataaacggcgagcgcgaccatcccaacgccacagtctggcggaagaacttcttgcgcgttgggcacctggtgctgatcggtggacctgatgacggagtgattacaccttggcaatctagcttttttgggttctatgacgccaatgagacagtgctggagatggaagagcagctcccagcacgccctacccatcagtccgagctgctattactcaggctagtgtgtctgaagccaccacgaaggaaaaagccagcctgccgtgttcaacgacagtccgagtcctggggtccggggctcagttgcgccctgtcttag

SEQ ID NO: 198588 - DNA, 477 bp, synthetic construct
  misc_feature 1..477: note = Description of Artificial Sequence: Synthetic coding sequence
  source 1..477: mol_type = other DNA
atgctgggcctgtggggccagcggctgcccgccgcctgggtgctgcttctactcccctttctccctctgttactcctggcagctcctgccccccaccgggaaagctacaaacccgtcattgtggtgcatggcctcttcgattcgagctactccttccggcacctcctggaatacatcaatgagatgggacaatatggtgataccgactatcttaagtggctgttccccacttccatgcggagcaatctctatcgcatttgttactccccttgggggcaggaattctcaatctgtaattattggcatgatccccatcatgatgatctctaccttaacgcatcttcttttctggctcttattaacggagaacgtgatcaccccaatgcgacagtctggcgcaagaatttcttgcgggtgggtcatttagttctgataggggggcccgacgacggggttataacaccgtggcagagctag

SEQ ID NO: 198589 - DNA, 543 bp, synthetic construct
  misc_feature 1..543: note = Description of Artificial Sequence: Synthetic coding sequence
  source 1..543: mol_type = other DNA
atgctgggcctgtggggccagcggctgcccgccgcctgggtgctgcttttactgcccttccttcctctgctgctactcgctgctcctgccccccaccgcgccagttataaacctgttattgtggtccacggcttgttcgacagtagttattcattcaggcaccttctggaatatattaacgagactcaccccgggaccgtcgtgactgtcctcgacctgtttgacgggcgcgagtcactaaggccactctgggaacaagtgcagggctttcgggaggccgtcgtacccattatggccaaagccccgcagggggtgcaccttatatgttacagccaaggtggtctggtgtgccgtgcgctgctctcggtgatggatgaccacaacgtcgactcatttatctcattatcatcccctcagatgggccagtatggcgacaccgattacctcaagtggctcttcccaacctctatgcggtctaacttgtacagaatctgctactcaccgtggggccaggagtttagcatttgtaattactggcattag

SEQ ID NO: 198590 - DNA, 603 bp, synthetic construct
  misc_feature 1..603: note = Description of Artificial Sequence: Synthetic coding sequence
  source 1..603: mol_type = other DNA
atgctgggcctgtggggccagcggctgcccgccgcctgggtgctgcttctgttaccctttctgcctcttcttctccttgccgctcctgcaccacacagagccagctacaagcctgtgatcgttgtgcacggcttgtttgattcatcatacagcttccgccacctgctcgaatatattaacgagacacacccaggtaccgtcgtcacggtccttgacctttttgacggaagagaatccctcagacctttatgggaacaggtccaggggtttcgcgaagcagttgtgcccataatggcgaaggctccgcagggagttcacctgatatgttattcccagggtggtctcgtttgccgcgccctgctgtcagtcatggatgaccacaatgtggactcgttcatcagcctgtctagtccccagatgggccagtacggagacacggactacttaaagtggctcttcccgacatcaatgcgatccaatctgtacaggatctgctatagtccctggggccaggaattcagtatctgtaactactggcacgaccctcatcacgatgatctctacctgaatgcaagtagctttctggccctaatcaacggctag

SEQ ID NO: 198591 - DNA, 909 bp, synthetic construct
  misc_feature 1..909: note = Description of Artificial Sequence: Synthetic coding sequence
  source 1..909: mol_type = other DNA
atgctgggcctgtggggccagcggctgcccgccgcctgggtgctgctgttactgccttttctgccattgttgctactcgccgcccctgcgccccacagagccagctataagccagttatcgttgtgcatggcctcttcgactcgtcttattcattccggcatctgctcgagtacattaatgagacacatcccgggaccgtggtaaccgtcctggacctgtttgatggtagggagagcttgcgcccactgtgggagcaggtacagggatttcgagaagctgtcgtgccaataatggcgaaggcccctcaaggggtgcacctaatttgctactcacagggcggcctggtgtgtcgcgccctcttaagcgtgatggacgaccataatgtggatagctttatttcgcttagctctcctcaaatgggacaatacggagatacagactacctgaaatggctgttccccactagtatgcgcagcaatttatatagaatttgctatagcccatgggggcaggagttttccatttgcaactactggcatgatccccaccacgatgacctctacttgaatgcctcatcatttttggctttgataaatggagaaagggaccatcctaacgccacagtgtggcggaagaacttcctgagggtcggccacctagtgctcataggagggcccgatgacggggtgatcacaccttggcagtcctcattctttggattttacgatgctaacgagactgtgctcgagatggaagaacagttggtttaccttagagactcctttggcctgaagactctcctcgctcggggagccatcgtgaggtgtcccatggccggcatttcgcacactgcctggcattctaatagaacactctacgagacttgtattgaaccttggttgtcttag

SEQ ID NO: 198592 - DNA, 909 bp, synthetic construct
  misc_feature 1..909: note = Description of Artificial Sequence: Synthetic coding sequence
  source 1..909: mol_type = other DNA
atgctgggcctgtggggccagcggctgcccgccgcctgggtgctgcttctgcttccattcctgcccttgctgctgctggctgcgcccgctcctcacagagcctcttacaaaccagtcattgtcgtccacgggctgtttgatagctcatactctttcaggcacctgctggaatatatcaatgaaacccaccccggaacagttgttaccgtccttgatctttttgatggacgtgaaagtctccggcccctgtgggagcaggtgcagggcttcagagaggctgttgtgccaattatggcgaaagctccccagggtgtgcaccttatttgctattctcagggaggactggtctgtcgggctctcctcagtgtgatggacgaccacaatgtcgattcgtttatttctctgtcttcccctcagatgggacagtacggagataccgactaccttaaatggctttttcccaccagtatgcggagcaatctgtatagaatttgttattctccctggggccaggagttctcgatctgtaactattggcacgaccctcaccacgatgatctctacctgaacgctagtagctttctggcactcattaacggcgagagagaccacccaaatgctactgtatggcggaaaaatttcctccgggtgggccatctcgtactgatcggcggccccgatgacggcgtgattacgccttggcaaagctcatttttcggtttctatgacgccaatgagaccgtcctggagatggaagagcagcttgtgtatctcagggactccttcggactgaagaccctgcttgctaggggcgccatcgtgcggtgtcctatggctggtatctcgcacacggcttggcactctaaccgaacactctacgagacatgcatcgaaccctggctgtcttag

SEQ ID NO: 198593 - DNA, 282 bp, synthetic construct
  misc_feature 1..282: note = Description of Artificial Sequence: Synthetic coding sequence
  source 1..282: mol_type = other DNA
atgctgggcctgtggggccagcggctgcccgccgcctgggtgctgttgctgctgcctttcttgccccttctgctgctcgctgcgcccgcccctcacagagccagctataaacctgtaattgtggtgcatggcttatttgatagcagctattctttccgacacttactggaatatattaacgaaggcgctctctgcgcagggctgtgttttttgtcttggatgatcacaacctggatcctcagttctcctagcccactgcatagatgggactctatggaatag

SEQ ID NO: 198594 - DNA, 282 bp, synthetic construct
  misc_feature 1..282: note = Description of Artificial Sequence: Synthetic coding sequence
  source 1..282: mol_type = other DNA
atgctgggcctgtgcggccagcggctgcccgccgcctgggtgctgctgctccttccctttcttccattgcttctgttggccgcgccggcacctcaccgcgcaagttataagcctgttattgtggtgcatggcctgtttgattcttcatactcattcaggcacttgctggagtatatcaacgagggcgctctttgtgccgggttgtgtttcctatcttggatgatcaccacatggattctgtcaagcccttcacccttgcacagatgggatagcatggaatag

SEQ ID NO: 198595 - DNA, 909 bp, synthetic construct
  misc_feature 1..909: note = Description of Artificial Sequence: Synthetic coding sequence
  source 1..909: mol_type = other DNA
atgctgggcctgtggggccagcggctgcccgccgcctgggtgctgttactcctgccttttctgcctctgcttctgcttgcagcaccagccccacaccgcgcctcatacaaacctgttatagtggtccatgggcttttcgactcctcttactcatttagacacttgcttgagtacatcaacgagacacaccctggcactgtggtcacagtactcgatctgttcgatggcagagaatccctgagaccactgtgggagcaggtccagggttttcgggaggccgtagtgcctattatggctaaagccccacagggcgtgcacctcatctgctacagtcagggtggtttggtgtgtcgggctcttttatccgtcatggatgaccacaatgtggatagcttcatctcactgtcgtctccacaaatgggacagtatggtgataccgactacctgaagtggttgtttcctacctccatgcgcagcaatctatacaggatctgctactcaccttggggacaggaattcagtatctgtaattactggcatgatcctcaccacgatgacctttatctgaacgccagcagctttctcgctcttatcaacggagaacgcgaccatccaaacgccactgtctggcgcaagaacttcctgcgcgtcgggcacctggtcctcattggcgggcctgacgatggtgttatcaccccctggcagtcatcctttttcggcttttatgacgctaatgaaacggtgttggagatggaggaacagttggtatacctccgggactcttttggcctgaagacactgctggctaggggagccatcgtgcgctgtcccatggcggggatttctcataccgcctggcattctaaccggacgctctatgaaacctgtattgaaccatggctgtcctag

SEQ ID NO: 198596 - DNA, 909 bp, synthetic construct
  misc_feature 1..909: note = Description of Artificial Sequence: Synthetic coding sequence
  source 1..909: mol_type = other DNA
atgctgggcctgtggggccagcggctgcccgccgcctgggtgctgctgttactgcccttcttgcctctgcttttactcgcggcacccgccccccacagggcctcctacaaaccagtgattgtggtgcacggtctttttgatagcagctactccttcaggcatctactggaatatattaatgaaacccacccaggaactgtggttaccgtcctcgacttatttgatggccgggagtctctgcgaccgctgtgggaacaggtgcaggggtttagggaagcagtcgtgccaatcatggccaaggctccacaaggagttcacctcatatgctatagccagggcggtctcgtgtgtcgcgcgctcctgagcgtgatggatgatcacaatgtcgatagcttcatatcactgtcatcccctcagatgggtcagtacggagatacagactacttgaagtggctctttcctacgtcaatgaggagcaacctgtataggatctgttacagcccatggggccaagagttttccatatgtaattactggcatgacccacaccatgatgacctgtatttgaatgcctcgtccttccttgctcttattaatggagagagggaccatccgaatgccaccgtttggcgcaagaatttccttagagttggccacctggtgctgatcggaggcccagatgacggagtaatcaccccttggcagtccagctttttcgggttttacgacgccaatgaaactgtactggaaatggaagaacagttggtttacctgcgggactcatttgggctgaaaacgctactcgcacgaggtgccatcgtcagatgcccgatggcaggcatttctcatacagcttggcactcgaatcgcaccctttatgagacttgtattgaaccatggctgtcatag

SEQ ID NO: 198597 - DNA, 543 bp, synthetic construct
  misc_feature 1..543: note = Description of Artificial Sequence: Synthetic coding sequence
  source 1..543: mol_type = other DNA
atgctgggcctgtggggccagcggctgcccgccgcctgggtgctgttgctgctgcctttcctgcctctgctgcttctggccgccccggccccgcaccgggaaagctacaagcctgtgatagtcgtgcatgggctcttcgacagcagctactctttccgccaccttcttgaatacattaatgaaacgcatcctggtactgtcgtgactgttcttgatctctttgatggacgggaaagcctgagaccactgtgggagcaggtgcaggggtttagggaggccgttgtgccaatcatggctaaagcgccccagggcgtccacctaatatgctactcacagggcggactggtgtgcagagccctcctgagtgtaatggatgatcacaacgtggactcctttataagcctgtcctctccacaaatgggccaatatggcgatactgattatcttaagtggctcttccccacttcaatgagaagcaatctgtaccggatttgctactctccctggggacaggagttctcaatttgtaactactggcattag

SEQ ID NO: 198598 - DNA, 543 bp, synthetic construct
  misc_feature 1..543: note = Description of Artificial Sequence: Synthetic coding sequence
  source 1..543: mol_type = other DNA
atgctgggcctgtggggccagcggctgcccgccgcctgggtgctgctgctccttccttttctgccactgcttctactggccgcacccgctccacatcgtgagtcttataaacccgtgatcgttgttcacggtctcttcgactcctcctactcctttcgccatttgctggaatacatcaatgagacgcacccaggaactgtcgtgacagtactggacctgttcgatggtcgcgagagtctgaggcctctttgggagcaggtccagggcttccgtgaggccgttgtgcccattatggcaaaagctccgcaaggagtgcatcttatctgctatagccaagggggattagtctgtagggctttgctcagcgtaatggatgaccataacgtggattcctttatcagtctgagcagtccccagatgggacagtacggggataccgactatttaaagtggctctttccaactagcatgcgcagcaatttgtaccgtatctgttattctccttggggacaggaattctccatttgtaactactggcactag

SEQ ID NO: 198599 - DNA, 282 bp, synthetic construct
  misc_feature 1..282: note = Description of Artificial Sequence: Synthetic coding sequence
  source 1..282: mol_type = other DNA
atgctgggcctgtggggccagcggctgcccgccgcctgggtgctgctcctgctgcccttcctgccgctgctactgttggcggctcctgcacctcacagggaatcttataaacctgtgatcgtagttcacggcttattcgatagctcctattcattccgccatctcttggaatacataaacgagggtgccttatgtgcaggcctgtgctttctgagttggatgattacaacttggatcctgagctctcccagcccactccatagatgggacagcatggagtag

SEQ ID NO: 198600 - DNA, 711 bp, synthetic construct
  misc_feature 1..711: note = Description of Artificial Sequence: Synthetic coding sequence
  source 1..711: mol_type = other DNA
atgctgggcctgtggggccagcggctgcccgccgcctgggtgctgcttctcctgcccttcttacccttgctcctcctcgctgcaccagccccacaccgtgagagttacaagcctgtgattgtcgtacatggtctctttgattccagctacagcttccggcatctgttggaatacattaatgagacacatccagggacggtagttacggtgctggacctgttcgacggtcgcgagagcctgagacctttatgggaacaggtccagggatttcgtgaggccgtagtcccaattatggccaaagcaccacagggagttcaccttatctgctacagccaggggggattggtttgtagagctctgctatctgtgatggacgaccataacgtagatagctttatctcattatctagccctcagatgggacagtatggagataccgactaccttaagtggctgttccctacctccatgcgatcgaatctgtataggatctgttacagtccttggggacaagaattctcaatttgcaattactggcacgatccacaccatgacgacctctatttgaacgcgtccagcttcctggcgctgatcaatggtgagagggaccaccccaacgccacagtgtggaggaagaactttctcagagtgggacatctggtgttaattggagggcctgacgatggggttataaccccttggcagtcctag

SEQ ID NO: 198601 - DNA, 165 bp, synthetic construct
  misc_feature 1..165: note = Description of Artificial Sequence: Synthetic coding sequence
  source 1..165: mol_type = other DNA
tgacacgacgacctgtacctgaacgccagcagcttcctggccctgatcaatggagagagggaccacccaaatgctacggtatggcgtaagaatttcctgcgggtgggccatcttgtgctgatcggtggccctgacgacggggtgattacgccatggcaaagttag

SEQ ID NO: 198602 - DNA, 711 bp, synthetic construct
  misc_feature 1..711: note = Description of Artificial Sequence: Synthetic coding sequence
  source 1..711: mol_type = other DNA
atgctgggcctgtggggccagcggctgcccgccgcctgggtgctgctgctgctgcccttcctgcccctgctcctgttggccgccccggccccccaccgcgagtcctacaaaccagtaattgtcgtgcacggactgttcgattctagctattccttcagacatttgttggaatatattaatgagacccacccaggcactgtggtgactgtcctggacttgtttgacgggagggagtccttgcggccactgtgggagcaagtccaggggtttcgcgaggccgtcgtgcctataatggctaaagctccacagggtgtccacttaatttgctactctcagggcgggctggtgtgccgcgctctcctgtccgttatggatgaccacaacgtggattcatttataagcttgagttcaccacagatgggacagtatggagataccgattacttgaagtggctcttcccgaccagcatgagatcaaacctttatcgcatctgttactctccctggggccaagaattctccatttgcaattattggcatgacccacaccacgatgatttatacctgaacgcgagctcctttctggccctaataaacggagagcgcgatcaccctaatgcgaccgtctggaggaaaaattttctcagagtagggcacctggttctgattggcggacccgacgatggtgtcatcacaccatggcagagttag

SEQ ID NO: 198603 - DNA, 909 bp, synthetic construct
  misc_feature 1..909: note = Description of Artificial Sequence: Synthetic coding sequence
  source 1..909: mol_type = other DNA
atgctgggcctgtggggccagcggctgcccgccgcctgggtgctgttactgctcccgtttcttccactgctgctgctggctgcgccagcaccccatagagccagttacaagcctgtaatcgttgtgcatgggttgttcgacagtagttactccttccgccacctgttggagtatatcaacgagacccacccaggtacagttgtaacggtgctggacctcttcgatggtcgtgagagtctaaggccactctgggagcaggtgcaaggattcagggaagctgttgtgccaatcatggctaaagcccctcagggtgttcacctgatttgttactcccaaggggggttagtgtgtagagctctgttgagtgtgatggatgaccacaatgtcgacagcttcatctccctttcaagcccacaaatggggcagtatggagataccgactacttgaaatggttattccctacctcaatgaggtctaatctttaccggatctgttatagtccgtgggggcaggaatttagcatatgcaattactggcatgatccacaccacgacgatctctatctgaacgccagttctttcctcgccctgatcaacggtgagagagatcatccaaacgccacagtgtggcgcaagaactttctacgcgtgggccacctggtgctcatcggtggaccggacgacggagttatcaccccttggcagtcatcttttttcggcttctatgatgccaacgagacggttctcgagatggaagagcagcttgtttacctgcgtgacagtttcggactgaagacactcttggcgagaggggcaattgtgcgctgtcctatggctggcatctcacacactgcatggcattcaaaccgaacgttgtacgagacgtgcattgaaccttggctgagctag

SEQ ID NO: 198604 - DNA, 909 bp, synthetic construct
  misc_feature 1..909: note = Description of Artificial Sequence: Synthetic coding sequence
  source 1..909: mol_type = other DNA
atgctgggcctgtggggccagcggctgcccgccgcctgggtgctgttgcttctgcccttcctgcctcttttgcttctggctgctcctgccccacatcgagcctcctacaaacctgtgatcgtggtgcatggcctgtttgactctagctactcatttaggcatctgctggaatacataaacgaaacacaccccgggaccgtggtgactgtgctcgatctcttcgacggccgggaatctctccggcccttgtgggagcaggtacagggattcagggaagctgtggtccctatcatggccaaagcacctcagggcgtgcatctaatctgctactcccagggaggcctcgtctgtcgcgctctcctcagtgttatggatgatcataatgtcgacagcttcataagcctgtctagcccacaaatgggtcagtacggggataccgactatttaaagtggctgtttcctacaagcatgcgatcaaatctctacaggatctgctatagtccatgggggcaggaatttagcatttgcaactattggcatgacccgcaccacgacgacctttacctgaacgccagcagtttccttgctctcattaacggagagagggaccaccctaacgccacggtctggagaaagaactttctgagagtcgggcacttagtactgataggaggccctgacgatggagtaatcacaccatggcagtcttcatttttcggcttttacgacgccaatgagaccgtgctggagatggaggaacagctggtgtacctgcgcgattccttcggactcaaaacacttctggcccggggtgctatagtccggtgtccaatggccgggattagccacactgcatggcattcgaaccggacactttacgagacgtgtatcgaaccttggttgagttag

SEQ ID NO: 198605 - DNA, 909 bp, synthetic construct
  misc_feature 1..909: note = Description of Artificial Sequence: Synthetic coding sequence
  source 1..909: mol_type = other DNA
atgctgggcctgtggggccagcggctgcccgccgcctgggtgctgctgctgcttcctttcttgcccctgctgctattggcagctcccgccccacacagggcgagctacaaacctgtgatagtggtgcacggtttgtttgatagcagctacagcttccgtcatttgttagagtacatcaacgagacacacccaggaacggtcgtcacggttctagacctcttcgacgggagagagagtctgagacccttgtgggaacaggtacagggatttcgtgaggctgtggtaccaattatggcaaaagctccccaaggcgtccatttgatttgttactcgcaggggggcctcgtttgtcgcgcactcctttcagttatggatgaccataacgtcgacagcttcatttcactgtcttctccccaaatgggtcagtacggagacacggattacctaaagtggctgttccctacttcgatgaggagtaacctctataggatttgttactctccttggggacaggaattttctatttgcaactactggcatgacccacatcacgacgatttgtatctgaatgcctccagctttcttgcactcatcaacggagagcgcgaccaccccaatgcaactgtgtggcgtaagaacttcctgcgagtcggacatttagtgttaatcggcggtcctgacgatggcgtgatcactccgtggcagtcctcctttttcggattctatgacgcaaatgaaactgtgctagaaatggaggagcaactggtctatctccgtgatagcttcgggctgaagacccttctcgcacggggcgcaattgtgagatgccctatggctggcatttctcataccgcatggcacagcaaccgcaccttgtacgaaacctgtatcgaaccgtggctctcttag

SEQ ID NO: 198606 - DNA, 441 bp, synthetic construct
  misc_feature 1..441: note = Description of Artificial Sequence: Synthetic coding sequence
  source 1..441: mol_type = other DNA
atggacgaccacaacgtggacagcttcatcagcctgagcagcccccagatggggcagtatggagatactgactacctgaagtggttgtttccaacctcaatgcggagcaatttgtatcggatctgttatagtccctggggccaagaattcagcatctgtaattattggcatgaccctcaccacgatgacctgtacctgaacgcctccagtttcctcgcactaatcaatggcgaaagagaccaccctaacgctacggtgtggaggaagaacttcttgcgtgtcggtcacctcgtgctcattggaggaccagatgacggtgtgatcacaccgtggcagagtagtttctttggattctacgacgcaaacgaaaccgtgctggagatggaagagcagcttccggtgggcagctctgtgaaggctaatcatggcgtgcaggggtag

SEQ ID NO: 198607 - DNA, 927 bp, synthetic construct
  misc_feature 1..927: note = Description of Artificial Sequence: Synthetic coding sequence
  source 1..927: mol_type = other DNA
atgaagagctgcggcagcatgctgggcctgtggggccagcggctgcccgccgcctgggtgctgctgctactacctttcctgccattgctcctgctggcagcccctgcgccccacagggccagctataagccagtgattgtggtacacggcttgttcgatagctcttactcattccgccatttattagaatatattaacgagacccatcctgggactgtggtgactgtgctggacttattcgacggcagggagagcttacgaccgctctgggagcaggtgcagggcttccgggaagcggtggtaccaatcatggccaaggcgccacagggtgtgcacctgatctgctactcacagggcgggctcgtgtgtcgagcgctgctgagcgtcatggacgaccacaatgtggattcattcatcagcttgtcttctccacagatgggacagtacggtgatactgactacctgaaatggctgttccccactagcatgagaagcaacctgtataggatttgttactccccatggggccaagagttttctatctgtaactactggcatgatccgcaccacgacgacctctacctgaacgcctctagttttctggctctgatcaacggggagcgggaccatccgaacgcgacagtatggcgaaaaaacttcttgcgggtgggacatcttgtgctgattggtgggcctgacgatggcgtgatcacgccctggcagagcagtttcttcggcttttacgacgccaatgagacagtgttggagatggaggaacagctggtttaccttagggacagttttggcctcaagacccttcttgcaagaggcgccatcgttagatgtcccatggccggtattagccatacagcatggcatagtaataggaccctttacgaaacctgtattgagccatggctttcctag

SEQ ID NO: 198608 - DNA, 882 bp, synthetic construct
  misc_feature 1..882: note = Description of Artificial Sequence: Synthetic coding sequence
  source 1..882: mol_type = other DNA
atgggcagccgggccgagctgtgcaccctgctgggcggcttcagcttcctactgttattgataccgggagaaggtgctaaagggggttctttgcgggagtcccaaggggtgtgtagcaagcagacattggttgtccccctccactacaatgagagttacagtcagcctgtctacaaaccttacctcaccctgtgcgctgggcggcgtatatgttcaacgtatagaacaatgtatcgcgtgatgtggagagaagttcgcagagaagtccagcaaacccatgctgtgtgctgtcaggggtggaagaaacggcatccaggtgctttgacatgtgaagccatatgtgctaagccgtgcctcaacggcggagtgtgcgttcggccagaccagtgcgagtgtgcccccgggtgggggggcaagcactgccacgtggatgtcgacgagtgtagaacctcaattactttgtgcagtcaccattgtttcaacacagctggctccttcacgtgcggttgtccgcacgacctggttctgggtgtcgacggtcgcacttgcatggaaggaagtcccgagcccccgacctctgcgagtattttgagcgtggcggtcagggaagcagagaaggatgaaagagcccttaagcaagagattcacgagttacgtgggaggcttgagagactggaacagtgggccgggcaggcgggtgcctgggtgcgggctgtgttaccggtgccacctgaggagctccagcccgagcaggtcgccgagttgtggggcaggggcgaccgaatcgagtctctttccgatcaggtgctcctcctcgaagagagattaggggcatgtagttgcgaggacaactcgctcggattaggggtgaatcataggtag

SEQ ID NO: 198609 - DNA, 906 bp, synthetic construct
  misc_feature 1..906: note = Description of Artificial Sequence: Synthetic coding sequence
  source 1..906: mol_type = other DNA
atgctgggcctgtggggccagcggctgcccgccgcctgggtgctgctgctgctccccttccttcccctgctgttgctcgccgcccccgctccacacagagcatcttataaacctgttatcgtggtccatgggctcttcgacagtagttattcattcaggcatctcctggaatacattaacgagactcaccccggtacagtagtgacggtgttagatttatttgacggcagggagagcctgaggcccctgtgggaacaggtgcaaggcttcagagaggccgtggttcctataatggctaaggcaccccagggggtgcatctcatctgctatagccaagggggactcgtctgcagggcccttctgagtgtgatggacgaccataatgtcgactcattcatttctctctcttctccacagatgggtcagtatggtgacacagactaccttaagtggttatttccaacgagtatgcgaagcaacctttatcgaatctgttacagtccctggggccaggaattttcgatttgcaactattggcacgacccccaccacgatgacctatacctgaatgcctcctcctttttagctcttattaacggtgagagagatcaccctaatgccaccgtatggcggaagaacttcctccgggtgggccacctcgtattaatcggcgggccagacgacggcgtgattacaccttggcagagcagttttttcggtttctatgacgctaatgaaaccgtgctggaaatggaagaacagctgcccgcccgacctacacaccaaagcgagctgctgctgttaaggctggtctgtctgaagccgccacgccgcaaaaagccagcttgccgagttcagcgtcagtccgagtcatggggcccaggactgtcttgtgccctcagttag

SEQ ID NO: 198610 - DNA, 909 bp, synthetic construct
  misc_feature 1..909: note = Description of Artificial Sequence: Synthetic coding sequence
  source 1..909: mol_type = other DNA
atgctgggcctgtggggccagcggctgcccgccgcctgggtgctgttactcctgccttttctgcctctccttttattagcggctccagctcctcatagagaatcttataaaccagtgatagttgtgcacggcctgtttgattcctcttacagcttccgacatctgctcgagtatattaacgaaactcatccaggcacggtggtaacagtccttgatctcttcgatgggcgcgaatcccttcggcctctgtgggagcaagtccaagggtttagagaggccgtcgttccaatcatggcaaaggctcctcaaggtgtccacctgatctgctattctcaaggcgggctcgtttgcagagccctgctgtctgtcatggatgatcataatgttgactcctttatatcactgagttcacctcagatgggccaatacggggataccgattacctgaaatggctgtttccgacaagtatgcgctctaatctgtaccgtatttgctattcaccctggggacaagagtttagcatatgcaactactggcatgacccgcaccacgacgacctctacctgaacgcgagctcctttcttgctctaattaatggcgaaagggaccatcctaatgccaccgtgtggcggaagaattttttgcgggtgggccatctggtactaataggcggccctgacgacggagtcatcaccccctggcagagtagcttttttggtttttacgatgccaacgagaccgtgttggagatggaggagcagctcgtgtacctgcgcgatagtttcggcctgaagacattgctggctcggggggccatcgtgcgttgtcctatggccggcattagccacacagcatggcactctaataggaccctgtacgagacctgcatcgagccgtggctcagctag

SEQ ID NO: 198611 - DNA, 441 bp, synthetic construct
  misc_feature 1..441: note = Description of Artificial Sequence: Synthetic coding sequence
  source 1..441: mol_type = other DNA
atggacgaccacaacgtggacagcttcatcagcctgagcagcccccagatgggtcagtacggagacactgactacctcaaatggttattccccacatccatgaggtccaatttgtaccggatctgttattcaccctggggacaggaatttagcatatgtaactactggcacgatcctcatcacgatgatctctatttgaacgcaagtagtttcttggccttaatcaatggcgagcgggaccatcctaacgctacagtctggaggaagaattttctgagggtggggcatctggtcctcattggagggccggatgacggcgtcatcaccccctggcagagctcatttttcggtttttacgacgccaatgagaccgtgttggaaatggaagagcagctgccggtgggctcatctgtgaaggccaatcatggcgtgcagggatag

SEQ ID NO: 198612 - DNA, 882 bp, synthetic construct
  misc_feature 1..882: note = Description of Artificial Sequence: Synthetic coding sequence
  source 1..882: mol_type = other DNA
atgggcagccgggccgagctgtgcaccctgctgggcggcttcagcttcttacttttgttgattccgggggaaggtgcaaagggtggaagcctacgggagtcgcagggggtttgtagtaagcaaacattagtggtcccactccactataatgaatcttattctcagccagtctacaagccttacctcactctgtgtgccggtagacggatctgcagtacataccggactatgtaccgagtcatgtggagagaagtccgccgggaggtccagcagactcacgcagtgtgttgccaaggctggaagaagcgccaccccggagcactgacttgtgaagccatctgcgccaaaccgtgccttaatggtggggtatgcgtgaggcccgaccaatgtgagtgtgcaccaggatggggagggaagcactgccacgtggatgtggatgaatgtcggacgtcaattacgctctgttcacatcattgtttcaacacagccggatcattcacctgcggctgccctcatgacctggttctcggtgtggatggtcgcacctgcatggagggaagcccagagcctccaacctcagctagcatcttaagcgtggcagtgcgggaagccgagaaggacgagagagccctcaagcaggaaatccatgaattgcgcggccgattggagcgcctcgagcagtgggccggccaagctggtgcttgggtgcgcgccgtactgccagtgccccccgaggagttacaacccgaacaagttgccgagttgtgggggagaggcgaccgtattgagagcctgtctgatcaggtactgcttctggaagaacgactcggcgcatgttcttgcgaagacaattccctggggctgggagtcaaccatcggtag

SEQ ID NO: 198613 - DNA, 906 bp, synthetic construct
  misc_feature 1..906: note = Description of Artificial Sequence: Synthetic coding sequence
  source 1..906: mol_type = other DNA
atgctgggcctgtggggccagcggctgcccgccgcctgggtgctgttgcttctgccctttcttccattactattactagctgcgcctgccccacatcgagcaagctataagcctgttattgtcgtgcatggtctctttgattctagttactcctttaggcacttattagagtacattaacgaaacacaccctggcacagtcgtaacagtcttggatttatttgacgggagagaatctctgagaccactgtgggaacaagtgcaggggttccgcgaggcagtcgtccctatcatggccaaagcccctcaaggggtgcaccttatatgctactcgcaggggggactcgtttgtcgggctctcctgagcgtaatggatgatcacaatgtggatagctttatcagcttgagcagccctcagatgggccagtacggagataccgactatcttaaatggctgtttcctacttccatgagaagcaacctgtataggatttgttactctccgtggggacaggaattctccatctgtaactattggcacgacccccatcacgatgatctgtatctgaatgcttcttcctttctggcactgattaacggggagagagatcaccctaacgcaacggtatggagaaagaactttttgcgcgtaggccatctcgtgctgatcgggggccctgacgacggagtgattaccccgtggcaaagctctttctttggcttctacgacgcgaacgaaactgtcctcgaaatggaagaacaactcccggcaaggccaacacatcagagcgaactgctacttctgcgactggtgtgcctgaagcctcccaggagaaagaaacccgcttgtcgcgtgcagagacagagtgagagctggggacccggcttaagctgtgcattaagttag

SEQ ID NO: 198614 - DNA, 441 bp, synthetic construct
  misc_feature 1..441: note = Description of Artificial Sequence: Synthetic coding sequence
  source 1..441: mol_type = other DNA
atggacgaccacaacgtggacagcttcatcagcctgagcagcccccagatgggacagtatggcgacaccgattatctcaagtggctgtttcccactagcatgaggtcgaatctttatcgcatctgctacagcccatggggacaggaattctccatttgtaactactggcatgatccacaccacgacgatctttatttgaatgcatcctctttcctggctctgattaatggcgaacgggatcaccctaatgctaccgtgtggcgtaagaatttcctgagagtggggcatcttgtactgataggtggtcccgatgatggcgttattaccccttggcaatcaagttttttcggcttttacgatgctaacgaaactgtgctggagatggaagaacaactgccagtaggatcatccgtgaaggccaatcacggcgtgcagggctag

SEQ ID NO: 198615 - DNA, 906 bp, synthetic construct
  misc_feature 1..906: note = Description of Artificial Sequence: Synthetic coding sequence
  source 1..906: mol_type = other DNA
atgctgggcctgtggggccagcggctgcccgccgcctgggtgctgctgttgctcccgttcttaccactgctcctgctcgcagcaccagcaccccatagagcctcttacaaaccagtaattgtggtgcatggcctctttgatagctcctatagctttagacatttactggagtacatcaatgagacccacccaggaactgttgttaccgttctggatctgttcgatggtcgggagagcctgaggcctctgtgggagcaggtgcaggggtttcgggaggccgtggtaccaatcatggccaaagcccctcagggtgtgcacctgatttgttacagccagggggggctggtttgtagggcgctcctgtcggtaatggacgatcataatgtggacagcttcatcagcctctcaagtccgcagatggggcagtacggtgataccgactatctgaaatggcttttccccaccagcatgcgctccaacctttatcgtatctgctattctccatggggacaggaatttagcatttgtaattactggcatgacccccaccatgacgatttatatctgaacgccagttcatttcttgctctgattaacggggagagggatcatcccaacgccacagtttggagaaagaatttccttagggtggggcatctcgtgcttatagggggtcccgatgacggcgtaattacaccctggcagtcctcgttctttgggttttacgacgccaatgagacagtacttgaaatggaagaacaactgccagccagacccacacaccagtctgagctgctcctgcttagactggtttgtttgaagccacctcgccggaaaaagcccgcctgcagagtccaacggcagtctgagagctgggggcccggactgagctgcgcattatcctag

SEQ ID NO: 198616 - DNA, 441 bp, synthetic construct
  misc_feature 1..441: note = Description of Artificial Sequence: Synthetic coding sequence
  source 1..441: mol_type = other DNA
atggacgaccacaacgtggacagcttcatcagcctgagcagcccccaaatgggtcaatatggtgacacggactatttaaaatggctgttccccacaagtatgcgatctaacctttataggatctgttacagtccctggggacaggagttctcaatttgcaactactggcacgatccccaccatgatgatctctatctgaacgcaagttcctttctggcactgatcaacggcgaaagggatcatccgaatgcaaccgtgtggcggaagaacttcctgagagtgggtcatctcgtcctcataggcggacctgatgatggggtgatcaccccttggcaaagtagcttctttggcttctacgacgccaatgagaccgttctcgagatggaagagcagctgccagtggggtcgagcgtgaaggcaaaccacggggtgcagggctag

SEQ ID NO: 198617 - DNA, 882 bp, synthetic construct
  misc_feature 1..882: note = Description of Artificial Sequence: Synthetic coding sequence
  source 1..882: mol_type = other DNA
atgggcagccgggccgagctgtgcaccctgctgggcggcttcagcttcttactgcttctaatccctggagaaggagcaaaaggggggagcctgagagaatcacagggcgtgtgctccaagcaaacactggtggtgcctttgcactacaatgagagctatagccagcccgtgtataaaccctatctcacgctgtgcgcgggccggcgcatttgctctacctaccgcaccatgtatagagtgatgtggagagaagttcgccgggaggttcaacagacccatgccgtgtgctgccagggatggaaaaagagacacccaggagccttaacctgtgaggccatttgtgctaagccttgtctgaacgggggtgtctgcgttcggcccgaccagtgtgagtgcgccccaggatggggaggtaaacactgccacgtggatgtagatgagtgtagaacatctattacactctgttcccaccactgctttaatacggctggctctttcacctgtgggtgtccacatgatctggtattgggggtggatgggcgcacctgtatggaggggtcccctgagccccccacctctgcatcaatcctaagtgtggcggttcgcgaggccgagaaggacgagcgggccctcaaacaagagatacatgagctgcgcggtcggctggaacgcctggaacagtgggccggacaggccggagcatgggtgcgagcagttttgcccgtccctcccgaggagctccagccagagcaggtggctgaactgtggggccgaggagatcggatcgagtccctcagtgaccaggttctgctgctcgaggaaaggctgggagcatgcagctgcgaagacaactcgctagggctgggggtgaatcatagatag

SEQ ID NO: 198618 - DNA, 882 bp, synthetic construct
  misc_feature 1..882: note = Description of Artificial Sequence: Synthetic coding sequence
  source 1..882: mol_type = other DNA
atgggcagccgggccgagctgtgcaccctgctgggcggcttcagctttctgctattgttgatccccggcgagggcgcaaagggcggctccctcagggagagccagggggtgtgttccaagcagaccctcgtggtccccctgcattataatgagtcctattcccagccagtctacaagccctacctgaccttgtgcgctggcaggcgtatctgctcgacatacaggaccatgtacagagtaatgtggcgagaggtgaggcgggaagtgcagcagacacatgccgtgtgttgccagggatggaaaaaacggcaccctggggcactgacttgtgaagccatctgcgcaaagccttgccttaacggcggcgtttgtgtaaggcctgatcagtgtgagtgcgcgcccggttggggagggaaacattgtcacgtggatgtcgacgaatgccgtaccagtatcactctttgcagccaccattgttttaataccgccggcagcttcacatgtggctgtccacacgacctggtgttgggggttgatggcaggacctgcatggaggggagccccgaaccacctacctcagcgtccatcctgagcgtggccgtgcgggaagccgagaaagatgagagggcactgaagcaggagattcacgaactacgaggtcgcctggaaaggctcgagcagtgggcgggccaggctggggcttgggttagagcggttctgcctgtaccaccagaggagctgcagcccgagcaggtagccgagctttgggggaggggcgatagaatcgagtcgttgtccgatcaggtgctccttttggaggagcgcctgggggcctgctcctgcgaagataattccctcggcctcggcgtcaaccacaggtag

SEQ ID NO: 198619 - DNA, 909 bp, synthetic construct
  misc_feature 1..909: note = Description of Artificial Sequence: Synthetic coding sequence
  source 1..909: mol_type = other DNA
atgctgggcctgtggggccagcggctgcccgccgcctgggtgctgctactactaccctttctgcccctcttgctactggccgccccggcaccacaccgcgcctcatacaaaccggtgatcgtggtacacgggttgtttgatagtagttatagttttcgacacctgttggagtatatcaacgagacccatcccggcaccgtggtgaccgtgctggatctgtttgacggccgggaatcacttagacccctgtgggagcaggtgcaggggtttcgggaggcggtggtacccatcatggctaaggccccacagggggtacacctcatctgctatagccagggtgggctggtctgtcgggccttgctttccgtcatggacgatcataatgttgacagctttatctccctgtctagcccgcaaatggggcagtatggggacactgactacctcaaatggttgttccctacctccatgagatcgaatttatatcgcatctgttactctccctggggccaggaattctctatttgcaactattggcacgacccccaccacgatgatctctacctgaatgctagttcctttctcgccctcatcaatggagaacgcgatcatccgaatgctaccgtatggcgcaagaacttcctgagggtaggacaccttgtgctaattggcgggcccgacgatggagtgatcaccccgtggcaatcaagctttttcgggttttacgacgctaatgaaaccgtcctggagatggaagagcagctggtgtatttgagggattcattcggcctcaaaacgcttttggctaggggcgctattgtgcgatgtccgatggcaggaataagtcatactgcctggcattccaatagaaccctgtacgaaacctgcattgagccttggttgagttag

SEQ ID NO: 198620 - DNA, 441 bp, synthetic construct
  misc_feature 1..441: note = Description of Artificial Sequence: Synthetic coding sequence
  source 1..441: mol_type = other DNA
atggacgaccacaacgtggacagcttcatcagcctgagcagcccccagatggggcaatacggtgacaccgactacctgaagtggcttttccccacatctatgcgttctaacctgtatagaatttgctactcgccgtggggtcaagagttctccatatgcaattattggcacgatccccaccacgacgacctgtatctcaacgcaagttctttcctggctctgattaatggcgaaagggatcaccccaacgctaccgtttggcgcaagaactttctccgggtcggacatctagtgctcatcggcggccccgacgacggagtaatcacaccttggcagtccagtttcttcggattttatgacgcgaacgaaacagtcctggagatggaggagcagctcccagttggctctagtgtgaaggccaaccatggcgttcagggatag

SEQ ID NO: 198621 - DNA, 909 bp, synthetic construct
  misc_feature 1..909: note = Description of Artificial Sequence: Synthetic coding sequence
  source 1..909: mol_type = other DNA
atgctgggcctgtggggccagcggctgcccgccgcctgggtgctgttgctcctccctttcctgcccctcctcctgcttgctgccccagctccgcacagggcctcctataagccagtaatcgtggtgcacggactatttgactcctcttatagctttagacatttgctggaatatatcaatgaaacccacccaggcaccgtggtcacagttctggatctatttgatggtcgcgagagcctgcggcccctctgggagcaagtgcagggcttccgggaagccgtggtgcccatcatggccaaggccccacagggggttcatctgatctgctatagccagggtgggctggtgtgtagagcgctgttaagcgtgatggacgatcacaacgtggacagtttcattagcttatcttccccacagatggggcaatatggcgataccgattaccttaaatggctgttccccacgtctatgcggtccaatctatacagaatttgttattcaccctggggccaagagtttagcatctgtaattattggcatgacccccatcacgatgatctgtacttgaacgccagctctttcctggcactgatcaacggagaaagggaccaccccaatgccactgtatggcgcaagaacttcctgcgcgtggggcaccttgtgttgattggggggcccgatgatggagtgataaccccgtggcagagctcctttttcggattctacgacgccaacgagactgttcttgaaatggaggaacaactagtatatcttcgcgactcttttgggcttaaaaccttgttggctcgaggtgcgattgtaagatgccctatggctgggatcagccacacagcctggcatagtaatagaaccttgtacgagacatgcatcgaaccatggttatcttag

SEQ ID NO: 198622 - DNA, 441 bp, synthetic construct
  misc_feature 1..441: note = Description of Artificial Sequence: Synthetic coding sequence
  source 1..441: mol_type = other DNA
atggacgaccacaacgtggacagcttcatcagcctgagcagcccccagatgggccagtatggggacaccgattatcttaaatggttgtttccaacttcaatgcgtagcaacttataccgtatctgttattcaccttgggggcaggaattttccatatgcaactattggcacgacccccatcatgacgatctgtatctcaatgcctcgtcatttcttgctctgattaacggcgagagggaccatcccaacgctacagtctggcgaaaaaatttccttcgtgtgggtcacttagtgctcattggtggccccgacgacggcgtaattactccctggcagtcctccttttttggattttatgacgctaacgagactgtgctggagatggaagagcagttgccggttggcagctccgttaaggccaatcatggcgttcagggctag

SEQ ID NO: 198623 - DNA, 906 bp, synthetic construct
  misc_feature 1..906: note = Description of Artificial Sequence: Synthetic coding sequence
  source 1..906: mol_type = other DNA
atgctgggcctgtggggccagcggctgcccgccgcctgggtgctgttgctcttaccattcttgccactgttgctcctcgctgcacccgccccccatagggccagctataaacccgtaattgtagtgcatgggctgtttgattctagctactccttccgccacctgttagaatacatcaacgagactcacccagggaccgtagtgactgttttagatctctttgacggtagggaatcactgcggcctctctgggaacaagtgcaaggattccgcgaagccgtcgttcccattatggcgaaggctcctcagggcgtccacctgatctgctatagtcaaggcggcctggtatgtcgggctttgctctccgtcatggatgaccacaatgtggactctttcatttccctttccagcccccaaatggggcagtacggtgataccgactacctcaagtggctctttccgacttccatgcgctccaacttgtaccgcatctgttacagcccctggggtcaagaattcagcatctgtaattactggcacgatccccaccatgacgacttgtatttaaatgcatcttcgtttttggctcttataaacggagagagagaccaccctaatgctactgtgtggaggaagaacttcctccgcgtagggcatttagtactgattggcggaccagatgacggcgttataaccccgtggcaaagcagttttttcggattctatgatgccaatgagaccgttctcgaaatggaagagcaattaccagctagacccacccatcagtcagagctgctactactcaggctggtctgtcttaaacccccgagacgaaagaagcctgcctgtagagtacagcggcagagcgagagctggggcccaggactgtcctgcgccttgtcctag

SEQ ID NO: 198624 - DNA, 906 bp, synthetic construct
  misc_feature 1..906: note = Description of Artificial Sequence: Synthetic coding sequence
  source 1..906: mol_type = other DNA
atgctgggcctgtggggccagcggctgcccgccgcctgggtgctgctgctgctacccttcctgcccctcctgttgcttgcagcccctgccccacacagagaaagctacaaacccgttatagtggtgcatggactgttcgactcatcttattcctttaggcacctgctggagtacattaacgagacacacccgggaacggtggtcaccgtgcttgatctgtttgacgggcgggagtcacttagaccactgtgggagcaggtgcaaggcttcagggaggctgtggtgcctattatggctaaagcccctcagggtgtgcatctgatttgctacagccaaggtgggttggtctgtcgggctctcctgtctgttatggatgaccacaacgttgattctttcatctctttgtcatccccacaaatgggccagtatggcgacaccgactacctgaagtggctgttcccaacctccatgcgcagtaatctgtacaggatctgttatagtccctggggccaggagttcagcatctgtaattactggcatgacccccatcacgatgacctgtatctaaacgcttcctcttttctggcactgataaatggcgagcgcgatcaccctaacgccacggtctggcggaagaattttctgagggtcggccatctcgttctcatcggaggtcccgatgacggggtaattactccctggcagtcctcttttttcggattctacgacgccaatgagacagttctcgagatggaagaacagctgcctgctagaccaacacaccaaagcgaactactgctcctgcggttagtgtgtctgaagcctcccagacgaaagaaacctgcgtgtcgcgtccagaggcaatcagagagttggggccctggactgtcctgtgccctgagctag

SEQ ID NO: 198625 - DNA, 906 bp, synthetic construct
  misc_feature 1..906: note = Description of Artificial Sequence: Synthetic coding sequence
  source 1..906: mol_type = other DNA
atgctgggcctgtggggccagcggctgcccgccgcctgggtgctgctgcttcttccatttttgcctctgcttctgctggctgcaccagcccctcaccgggcctcttataagcctgtcatcgtcgtgcacggactcttcgactcatcttatagctttaggcatctcttagaatacatcaacgagacccaccccggaaccgtggtcacggtattggacctctttgacggcagagaaagcctgaggcccctctgggagcaggtccagggctttagggaggccgtggtccctatcatggccaaagcaccacaaggcgtacatctcatttgttatagtcaagggggcctcgtgtgccgggctttgctgagtgtaatggatgatcataacgtggactccttcatctctctgtcatctccccagatgggacagtacggggatacagactacttgaaatggctcttccccacttctatgaggtctaacctgtatcggatctgttattctccttggggccaggaattcagcatttgcaactactggcacgatccccaccacgacgacctgtacttgaatgcatccagttttctggccctgattaatggagagcgggaccaccctaatgcaacagtgtggagaaaaaatttcctgagagttggccaccttgtgctaattggcgggccagatgatggcgttataacaccttggcagtcctccttttttggattttatgacgccaacgagacagtgctggagatggaagagcagctgccagcacggccgacacaccaatcagaactcctcctgctgagacttgtctgcttgaagccaccaagacgtaagaagccagcgtgcagggtgcaacgccaatctgaatcgtgggggcctgggttgtcatgcgccctctcctag

SEQ ID NO: 198626 - DNA, 909 bp, synthetic construct
  misc_feature 1..909: note = Description of Artificial Sequence: Synthetic coding sequence
  source 1..909: mol_type = other DNA
atgctgggcctgtggggccagcggctgcccgccgcctgggtgctgctgctcctccccttcctgccgctcctgcttctggcggcaccggcaccccatagagcctcttacaagcctgtcatcgtggtccacggtctcttcgatagcagctattcttttagacaccttctggagtacattaacgaaacccatcccggcactgttgtaaccgtacttgacttgttcgatggccgcgagtccctcagaccactatgggagcaggtgcaaggatttagagaggcagtggttcctatcatggccaaggcacctcaaggtgttcatctgatctgctattcacagggcgggctcgtgtgtagggcattactgtcagtgatggacgatcacaacgtcgatagcttcattagtctttcgtcaccacagatgggccagtacggcgataccgactacctcaagtggctctttcctacctctatgcggtccaatctataccgcatctgttactccccttggggacaggagtttagcatttgtaactattggcatgatccccatcacgacgacctgtatttgaatgcttccagctttctcgcgctaatcaacggcgaaagggaccatcctaacgccaccgtttggcgcaaaaatttcctccgcgtgggacacctagtcctcattggcgggcctgacgacggggttattactccgtggcagtcttcattcttcggcttttatgacgctaacgagacagtcctggaaatggaggaacaactggtctatcttagagattcatttgggctgaaaacactgcttgcacgaggagccattgtacggtgcccaatggcaggcatcagtcataccgcttggcattcaaacagaactctctatgagacctgcatcgagccatggctttcttag

SEQ ID NO: 198627 - DNA, 3606 bp, synthetic construct
  misc_feature 1..3606: note = Description of Artificial Sequence: Synthetic coding sequence
  source 1..3606: mol_type = other DNA
atgaacttcgagggcctggaccccggcctggccgagtacgcccccgcaatgcacagcgcactggacccggtgctggacgctcatctcaacccttcattgctgcagaacgtcgaacttgatccagaaggagtagcccttgaagcacttccagtgcaggagagtgtccatatcatggagggtgtgtattctgaacttcatagcgtggttgccgaggtaggagtgcctgtcagcgtgagccatttcgatctgcacgaggagatgctctgggttggatctcacggggggcatgccacaagcttctttggccctgctctggagaggtactcatcctttcaggtcaacgggtctgacgatatccgtcagatccagtccttggagaacggcatactcttcttaactaaaaataatctcaaatacatggcccgcggcggcctcattatctttgactatctgttggacgaaaatgaggatatgcactctttgctcttgaccgattcatctaccttgttggtgggaggactccagaaccatatcattgaaatcgatctcaacacggttcaggagacccaaaagtatgccgtcgagacccccggtgttacaatcatgaggcagaccaatagattcttcttttgtgggcacacctccggcaaggttagcttgcgtgacctgagaacattcaaggttgagcacgaatttgatgctttttccgggtcgctcagtgacttcgatgtacacggaaatctccttgctgcctgcggctttagttcccgactgactggactagcctgtgacaggtttctcaaagtatacgatctgagaatgatgcgcgccatcacccctcttcaggtacacgtggacccagcatttctgcgattcatcccaacctacacctcaagactggcgatcatcagtcaatctgggcaatgccaattttgtgagccgactgggctagctaacccagctgacatatttcacgtcaacccagtgggccctctcctgatgaccttcgatgtaagcgccagcaaacaggctctcgcctttggggactctgaggggtgcgtccacctgtggaccgatagccccgaaccctcttttaacccgtattcccgcgaaaccgaatttgccctgccgtgcctagtggactctttgcctcccctcgactggagtcaagatctactcccactctcattgattccagtaccattgacaaccgatactctgctttccgactggcctgcagctaattccgcccctgccccccggcgggcaccgccagtagacgccgagatcctgcggaccatgaaaaaagttggcttcattggatatgctccaaatccacgcacacggctgcggaaccagattccctaccggctaaaggagtctgactccgaattcgacagcttctcccaggtgacagagtctcctgtgggaagggaggaagagccacatctacatatggtaagtaagaaatacagaaaggtcaccattaagtatagtaaactgggactggaagacttcgacttcaaacattacaacaaaaccttatttgctgggcttgagccacatatcccaaacgcctattgcaattgcatgatccaggttctgtacttcctggagcctgttcgctgcctcatccagaaccacctctgccaaaaagagttctgtctggcatgcgaactggggttcctgttccatatgctggatctctcacgaggcgatccgtgtcagggaaacaattttctcagagccttcagaacaatccctgaagcttcagcccttggactcattctggcagactccgatgaggctagtggcaaagggaacttggcaaggcttatccaacgctggaacaggttcatcctgacacagctccaccaagatatgcaagaactggagattccgcaggcctacagaggcgccggaggcagcttttgctcttctggcgacagcgtcattggacaacttttttcctgcgagatggagaattgctcattgtgtcggtgtgggtcggagaccgtccgcgccagttctacgctactgttcaccctctcatacccggatgggagcaaatcagacaagacaggcaagaactacgacttcgctcaagttctgaaacggtcaatttgcctagaccagaatactcaagcctggtgtgacacatgcgagaaatatcagcccacaatccagacccggaatatccgacatctccctgatatcctggtcatcaattgcgaggtaaatagctcgaaagaggctgatttttggcgcatgcaggctgaggtggcctttaagatggccgtcaagaagcatggcggggagatatctaagaataaggagttcgcgctagccgactggaaggagcttggcagccccgagggagtgttggtgtgccctagcatagaagaattgaaaaatgtatggctacctttcagtatccggatgaaaatgacgaaaaacaagggcctcgacgtttgcaattggactgatggtgacgagatgcagtggggcccagctagggctgaagaagaacatggagtgtatgtctacgatttaatggccaccgtggtgcacatcctggactctagaaccggtgggtcactagtggcgcacatcaaagtgggtgagacataccatcagcggaaggagggtgtcacacaccagcaatggtatctctttaacgactttctcatcgagccgatcgacaagcacgaggctgtacaattcgacatgaactggaaagtccctgctatcctgtactacgtgaagcgcaatctcaactccaggtataacctaaatataaagaatcccatcgaggcctctgtgctactggccgaggccagcctggcgcgaaaacagagaaagactcataccaccttcatccccctcatgctaaatgagatgccccagatcggcgatttggtgggacttgatgccgaatttgttactcttaatgaggaggaagctgagctccggtcagatgggactaaatctacgatcaaacctagccagatgtctgtagcccgcattacatgtgtgcgggggcaaggacccaacgagggaatcccattcattgacgattatatttccacccaagaacaggtagtggactacctcactcagtactctggtattaagcccggagaccttgatgctaagatcagttcaaaacatctcacaaccctgaagtcaacatacttgaaactcagattccttatcgacatcggagtgaaatttgtggggcatgggctgcaaaaagattttcgcgttattaatctgatggtccctaaggatcaagtacttgacacggtgtacttattccacatgccaaggaaacgtatgatcagcttgagattcctggcctggtacttcctcgacctgaagatccagggcgagacgcacgatagtatcgaggacgcccggactgccctgcagttgtaccgaaagtatctcgagttgagcaaaaatggcactgagcccgaatcatttcataaggtcctgaagggactttacgagaagggcagaaaaatggattggaaagtcccagagccagagggacaaaccagtcccaagaatgcagccgttttctcttcagtcttggccttgtag

SEQ ID NO: 198628 - DNA, 3609 bp, synthetic construct
  misc_feature 1..3609: note = Description of Artificial Sequence: Synthetic coding sequence
  source 1..3609: mol_type = other DNA
atgaacttcgagggcctggaccccggcctggccgagtacgcccccgcgatgcacagtgccttagatcctgttctggacgctcatttaaacccctctctgctccagaacgtggagcttgatccggagggcgtggccctggaagctctccccgtccaagagtccgtgcatatcatggaaggcgtctacagtgagctccactctgttgtcgctgaggtgggggtgcccgtttccgtatcacattttgatctacacgaagagatgctgtgggttggcagccacggcggccacgcaaccagcttctttgggcctgccttggaacgttatagctccttccaggtgaacggctcagatgacatccgacaaatacagagtctcgaaaatggcatcctatttttgacgaagaataatctcaaatatatggcacggggcgggctgataattttcgactacctgctggacgagaatgaggatatgcatagcctcttgctcaccgattctagcacacttctcgtgggtggcctgcagaaccatatcattgagatcgatctgaacaccgttcaggaaacccaaaagtacgccgtggaaacccccggcgtgactattatgaggcagacaaaccgattcttcttctgtggacacacatctggcaaagtttccctccgggatctgagaacattcaaggtagagcacgaattcgatgcattcagtggtagcttgagtgactttgacgtgcacggcaacctgctggctgcttgtggcttctcttccagacttacaggcttagcttgcgacaggttccttaaagtgtatgacctcagaatgatgcgagcaataacacctttgcaggtgcacgttgaccctgcgtttctgaggttcattcccacatataccagccgcctagcaatcatctcccagtctggacagtgccagttttgcgaaccaactggtcttgccaatcctgccgatattttccacgtgaacccagtagggcctttgctgatgacatttgacgtgagcgcatctaagcaggcgctggcatttggtgactctgaaggatgcgtccatctttggacagatagccccgagccatccttcaatccttacagcagagagactgagtttgcactcccctgtttggtggactcattgcccccactagactggtcccaggacctgcttccgctgtccctgattcctgtcccacttacaaccgacacgctgttgtccgactggcctgccgccaactcagcgccggcaccacgcagagctccacctgtagacgccgagattctgcggactatgaagaaagttggctttatcgggtatgcgccaaaccctcggactcgtcttagaaaccagataccgtacaggcttaaagaatctgactcggaattcgactccttctcccaggtcaccgaatctcccgtcgggcgcgaagaggaaccacacctgcatatggtgagtaagaaatacaggaaggttaccattaagtacagtaagctgggactcgaggactttgatttcaaacactacaacaagacactgtttgcaggtttagagcctcacatcccgaacgcatattgcaattgtatgattcaagttctctattttctggaaccagtacggtgtctcatccaaaatcacctttgtcaaaaggaattctgtctcgcttgcgagctgggtttcctgttccatatgctggatttatcacgcggggacccctgtcaggggaacaatttcctacgcgccttcagaacgatacctgaggcaagcgcccttggtcttattttggccgactcagacgaagcgtccggcaagggcaacctggctaggctgatccagcggtggaatcggtttattctgacacagttacatcaggatatgcaggagttagaaattccacaggcctaccgaggagctggcgggtcctctttctgtagctcaggtgacagtgtcatcgggcagctttttagttgtgagatggagaactgctctctgtgcagatgcggatctgaaaccgtgagagcttcaagcacgctgctgttcactctgagctatcctgacggttcgaagagtgacaaaacaggtaagaactacgatttcgcccaggtgctgaaaagatctatttgtctcgaccagaacacccaagcatggtgtgatacatgcgagaaatatcagccaactatccagacaaggaacatccgccatctccccgatattcttgtgattaactgcgaggttaacagctctaaggaggccgacttctggaggatgcaggcggaggtggcttttaagatggccgtcaagaagcatggaggggaaatcagcaagaacaaagaattcgcccttgccgactggaaagaactcggcagccctgagggagtgctggtctgcccctctatcgaagagttgaagaacgtgtggctgccattttctatcagaatgaagatgaccaaaaacaagggattggatgtgtgtaattggactgacggagatgagatgcagtggggccctgcaagggctgaggaagaacacggcgtctacgtatatgatcttatggctactgtggtgcatatccttgattcccgcactggcggatctcttgtggcccacatcaaagtgggggaaacctaccaccagagaaaagagggcgtgacccaccagcaatggtacctgttcaacgattttttaattgaacccatagataagcatgaggccgtgcagttcgacatgaactggaaagtgccagcgatcctctattacgtgaagcgcaatctcaactccaggtataatctcaacatcaagaaccctattgaagcctcagttcttctggccgaggcttccctcgcccgtaaacaacgcaaaacccataccacttttatacccctgatgcttaacgagatgcctcagatcggagatctggtgggcctggacgcagaattcgtcacacttaacgaggaagaagcggagcttcgctctgatgggaccaagagcacaataaagccctcacagatgtctgtagccaggattacttgcgtgcgaggccagggacccaacgagggtattccatttatcgatgactacatttctacccaggagcaagtagtggactatttgacccagtattctggaattaaacccggcgatcttgatgctaaaatcagttcaaaacaccttactacactgaaatctacctacctgaaactgagatttctgattgatatcggcgttaagttcgtggggcacgggctccagaaagactttagagtcatcaatttaatggtgccaaaggatcaagtactggacactgtatatctattccacatgccacgtaaacggatgatctctcttcgcttcctcgcatggtattttctggatctgaaaatccagggagagactcacgattcaatagaggatgcacgcaccgccttgcagctgtaccggaaatatctagaacttagtaaaaacgggacagagccggagagcttccataaggtgttgaaaggcttatatgagaagggccggaaaatggactggaaggtgcccgagccggagggccagacttcccccaagaatgcagccgtattcagttccgtgctggccttatag

SEQ ID NO: 198629 - DNA, 3597 bp, synthetic construct
  misc_feature 1..3597: note = Description of Artificial Sequence: Synthetic coding sequence
  source 1..3597: mol_type = other DNA
atgaacttcgagggcctggaccccggcctggccgagtacgcccccgccatgcattccgctttagaccctgtactcgatgcccatctgaatccctctctcttacagaatgtggaattggaccccgaaggtgtagctctggaggctctcccagtgcaggagtctgttcacattatggaaggagtttactccgagttacactcagtcgtggcggaggtgggggtgcctgtttccgtaagtcacttcgacctgcacgaagagatgctatgggtgggtagccatgggggccacgccacatctttctttggtccagctctagaacggtactcgtcgtttcaggtcaacggaagtgacgacatccggcagatacagtccctagaaaacggcatcctgttcttgactaaaaataacctgaagtacatggctcggggcggtctgatcatctttgactatctcttggatgagaacgaagacatgcattcattgctgctgaccgacagtagtacacttcttgtgggagggctacagaatcacatcattgagattgatctgaacactgtccaggagacacagaagtatgcggtagaaacgcccggggtaaccattatgcggcagacaaataggttctttttctgtggccacacttcaggcaaggtgtccctgagggacttacgaacgtttaaagtcgaacatgaatttgatgctttcagcggctcgctgtccgatttcgatgtgcatggaaatctcttagccgcgtgtggttttagttcacggctaaccggtctggcctgcgataggtttctgaaggtctacgatcttcgtatgatgcgcgccataacgcccctgcaagttcacgtggatcctgcctttctccgctttattccgacatacacgtctcgactggctattatctcacagtccgggcagtgccaattctgtgaaccaactggcctggcgaatcccgccgatatcttccatgtcaatccagtaggcccactgctgatgacttttgacgtgagcgcctccaagcaggctctcgctttcggagattccgagggctgcgtgcatctctggaccgacagccctgagccatcatttaatccctatagccgcgagaccgagttcgcccttccctgtttagtggactctttgccgccactggattggagccaggatctactcccgctgtcactgatccccgtgcccctgaccacagacacgttactgtccgactggcctgccgcaaatagtgctcctgcacctagaagagcacctcccgtggacgccgagatcctgaggacaatgaagaaggtgggcttcatcggctacgcacccaatccgcgcacacgactgcggaaccagataccatacagactgaaagaatccgactccgaattcgactcattctcccaagtgaccgaatcccccgtcggcagagaggaggagccacacctgcacatggtgtccaagaaatatagaaaggtaacaatcaagtattctaagctgggcctggaagatttcgatttcaagcactacaataagacattatttgcaggcctggaaccccatatcccaaacgcctactgcaattgtatgatacaagtcctgtattttctcgaacctgtgagatgcctcatacaaaatcatttgtgccagaaggagttttgcctggcttgcgaactcggcttcctctttcatatgcttgacctgagcagaggcgacccctgtcagggaaacaacttcctgcgcgcctttagaactatacccgaagcaagtgcactgggtctgattcttgctgactccgatgaggcatccgggaaaggcaatctggcgagactaattcagaggtggaaccgctttattttgacacagttgcaccaagatatgcaagaacttgaaattccccaggcctaccgcggagctgggggatcttctttctgcagctctggcgactcagttattggacagctgttctcctgcgagatggagaactgcagtctgtgtaggtgtgggagtgaaacggtgcgagcctcttcaaccctgctgttcactctgtcttatcccgacgataaaacgggcaagaattatgacttcgctcaggttctgaaacgaagcatttgcctcgatcagaacacacaggcttggtgtgacacatgtgaaaagtaccagcccacaatccagacccggaatattagacacctccctgatattctcgtcattaattgcgaggtaaattcatccaaagaggcagacttttggaggatgcaggctgaggtcgcctttaagatggctgtgaaaaaacacgggggcgagatctcaaagaacaaagagttcgccctggcagattggaaggagttgggatctccagagggggtactggtgtgccccagcatcgaagagctcaagaacgtctggttacctttctctattcggatgaagatgacaaagaacaaaggtcttgatgtttgcaattggaccgacggggacgagatgcaatgggggcctgctcgggcagaggaggagcatggcgtttacgtgtatgatctgatggcaactgtagtccacatattggacagtcggactggcgggtcacttgtcgcacatatcaaagttggtgagacctaccaccagcggaaggaaggagtgacccaccagcagtggtacctatttaacgattttctgattgaacccattgacaaacacgaagctgtccagtttgacatgaactggaaggtacccgccattctctattatgtgaagcgtaacctcaacagcaggtataacctgaatatcaagaaccccatcgaggcttccgtcttactggccgaggccagcctggctcgtaaacagcgcaagacacacactacattcattccactgatgctcaacgaaatgccccagataggcgatctggtggggctggacgccgaatttgttacactcaacgaagaagaggctgaactgaggtcggacggcacaaagtccactatcaagccaagccagatgagcgtagctaggataacctgcgtgcgggggcagggcccaaacgaaggcatcccattcatagacgattatatctccacacaggagcaggttgtcgactatcttacccagtatagcggcattaaaccgggagatctggatgccaagatcagctccaaacatttgacaactctcaaatcaacttacctgaagctgcgcttcctcatcgatatcggcgtcaagtttgtaggacacggactacaaaaggactttagggtcattaatctgatggtaccaaaggaccaggtccttgacactgtgtacctgtttcacatgccgagaaagaggatgattagcctccgatttcttgcttggtacttcctcgatctgaagattcagggcgagacgcacgacagcatcgaggacgctaggactgcactacagctctacaggaaatacctcgagctgagcaaaaatggcactgagcctgagagttttcacaaagtcctgaagggattgtatgaaaaaggtcggaagatggactggaaggtgcccgaacctgagggacagacttcacctaaaaacgccgctgtgttttctagcgtgctggccctgtag

SEQ ID NO: 198630 - DNA, 3609 bp, synthetic construct
  misc_feature 1..3609: note = Description of Artificial Sequence: Synthetic coding sequence
  source 1..3609: mol_type = other DNA
atgaacttcgagggcctggaccccggcctggccgagtacgcccccgcgatgcactcagctctggatcccgttctggatgcacacctaaaccccagcctcctgcagaatgtagagcttgacccggaaggggtggccctcgaagctttgccggtgcaggagtccgtccacattatggagggtgtatactccgagttacactccgtggtagcggaggtgggagtacctgtgagtgtgtcacacttcgatcttcatgaggagatgctgtgggtagggtctcatggaggtcacgctacgtccttctttggtccagctctggaacgttactcctcgttccaggtgaacggcagtgatgatatccgacaaatccagtctctggaaaatgggatcctcttcctgacaaaaaataaccttaagtatatggcccgcggtgggttgattatttttgattatctactggatgagaatgaggatatgcattctctgcttctgaccgacagctccacgcttcttgtaggcggactgcaaaatcacatcatcgagatcgacctcaacaccgtgcaagaaacacagaaatacgctgtcgaaaccccaggtgtgactattatgaggcaaactaacagattcttcttctgtggccatactagcggaaaagtaagtttgcgcgacctgaggaccttcaaggttgaacacgagtttgacgcattttccggctctctgagtgatttcgatgtgcacggtaacttattggcggcatgcggattttcctcccgtttaactggcttggcctgcgacaggtttctgaaagtctacgacctccggatgatgcgcgccattacgcctttgcaggtacacgtggacccagctttcctgcggttcattcccacttacactagtagactggccatcatctcacagagcgggcaatgtcagttctgtgagccaactggactcgcgaacccagcagacatctttcacgtgaatcctgttggcccgttgctgatgacctttgatgtgtctgcgtcgaaacaggcccttgcattcggagacagcgagggctgtgtgcatctgtggaccgacagcccagagccgtcttttaacccttactcgagggagacagagttcgcacttccatgcttggtggacagcctcccccctctggactggagccaggatctgctgccactgagcctgattccagtaccgctgaccaccgacacccttctgtctgactggccagccgccaactctgctccagctcccaggcgggctccaccagtggacgcggaaatattgaggactatgaaaaaggtggggttcatcggctatgcgcccaacccccggacgaggctgcgaaatcagatcccgtatcggctcaaagagtccgactctgagttcgactcattttctcaggttactgagagcccagtcggacgtgaagaagagccccacctgcacatggttagcaaaaagtaccggaaggtcaccatcaagtattcgaaactcggcctcgaggatttcgattttaagcactacaacaaaaccctgttcgcaggactggagccacacataccgaacgcctattgcaattgcatgattcaggtgctgtattttcttgagcctgtgcgatgtctcatccagaaccacctgtgtcaaaaagaattttgtcttgcatgtgaactagggtttctgttccatatgttagatttgagccgcggcgatccctgccaagggaataacttcctcagagcttttcgcacaatccccgaggcaagcgctttgggtctgattcttgccgactcagacgaagcttctgggaagggcaacttagcccggttgatccaacgctggaataggttcatcttaacccaactccatcaggacatgcaggagctggaaattccccaggcataccgcggagccggcgggtcttccttctgctccagtggcgacagcgttatcggacagctgttctcctgtgaaatggaaaactgctctctctgtcgctgtggatccgaaaccgtacgcgccagctcaacgctcctcttcacactttcatatccggacggctcaaagtcagacaaaactggcaaaaactacgactttgcccaggtcttgaagagaagcatttgtctggaccagaacacccaggcgtggtgcgatacctgtgagaagtaccagcctaccatacagacgaggaacattcgacaccttcctgatatcctggtcattaactgcgaggttaatagttctaaggaggccgacttttggcgcatgcaggccgaagtcgcttttaaaatggccgtgaaaaaacatggcggcgagatttcaaagaacaaggagttcgctctcgcagactggaaggagctgggcagtcctgagggggtacttgtgtgtccttcaattgaggagttgaaaaacgtttggctgcctttttccattcgcatgaaaatgactaaaaataaagggctggacgtgtgtaattggacagatggcgacgagatgcagtgggggccggcccgagccgaagaagagcacggcgtgtatgtgtacgacttaatggctactgttgtacacatcttggactcaagaactggtggatcgctggttgctcatatcaaggtgggagaaacatatcaccagaggaaagagggggtcactcatcaacagtggtatttgttcaacgattttctgatagaacccattgacaagcacgaggccgtccaattcgatatgaattggaaggtccctgccatcttatattatgtgaagcgcaatttaaattcgaggtataatctgaatattaagaaccccatcgaagccagcgtgctcttggctgaggcaagtctagcgaggaagcagcggaaaacccatactactttcattcctctaatgcttaacgagatgccacaaatcggtgacctcgtcggcctagatgctgagtttgtgacactgaacgaggaggaagcagagcttcgctcagacggcaccaagtcaaccatcaagccgtcacaaatgtctgttgctaggattacatgcgtgcgtggccaggggccaaatgaaggaattccgttcatagacgattatatctcaacgcaagaacaggtggttgactacctgactcagtattctggaattaaaccaggagacttggatgccaaaatctccagtaaacacctcacaaccctgaaatctacatacttgaagctccgctttctcatcgatattggggtgaagttcgtgggacacggcctccagaaggacttcagagtcataaatttaatggtgccaaaggatcaggtccttgatacagtgtatcttttccacatgccccggaagcgcatgatttcattacggtttctcgcttggtatttcctggatctgaaaattcagggtgaaactcatgattctatcgaagacgctcgtacagccctacaactgtaccgcaaatacctggagctgagcaagaatggaaccgagccagagagttttcataaggttcttaagggtctctacgagaaggggagaaagatggactggaaggtcccggagcccgagggacaaacttcaccaaagaacgccgcagtcttctcctctgtattagccttatag

SEQ ID NO: 198631 - DNA, 987 bp, synthetic construct
  misc_feature 1..987: note = Description of Artificial Sequence: Synthetic coding sequence
  source 1..987: mol_type = other DNA
atggacgccgtgctgctggagcacttccccggcggcctggacgcctttccatcaagctattttgatgaggacgatttcttcaccgatcagtcaagtcgagaccccttggaggacggggatgagctcttggctgatgagcaagccgaagtggaattcctgtctcaccaactccatgagtattgttaccgagacggcgcctgtctgctcttacagccagctccgccagccgcccccctcgcccttgcaccaccatccagcggggggctgggagaacccgatgacggaggcggaggggggtactgctgcgagacaggggctccccccggtggtttcccttactctcctggcagccctcctagctgcctcgcgtatccatgtgctggagctgccgttctatctcccggcgctaggctgcgagggttgtccggcgccgccgcagccgctgcacggaggaggcgacgcgtcagatcagaggccgagctacaacaactcaggcaggcagcaaatgttcgtgagcgcagacgtatgcaatcaattaatgatgcgttcgagggtctccgcagccatattcctacactgccctacgagaagaggttatccaaggttgatacactcaggctcgctataggatatattaattttttatcagagctcgtgcaggctgaccttccactccgtggcggcggagcgggcggctgtggcggacccggaggtggaggcaggctcggtggtgattctccggggtcccaggctcagaaggttattatctgccaccgcggaactcgaagccctagcccctccgatcccgactacggcttgcccccattagccgggcatagccttagttggaccgacgagaaacagctcaaagaacaaaatataatacgcaccgcaaaggtgtggacacctgaggaccctagaaaactgaacagcaaatcgtcctttaataatatcgaaaacgagcccccatttgagttcgtgagctag

SEQ ID NO: 198632 - DNA, 852 bp, synthetic construct
  misc_feature 1..852: note = Description of Artificial Sequence: Synthetic coding sequence
  source 1..852: mol_type = other DNA
atgaacggcgaggagcagtactacgccgccacccagctgtacaaggacccctgcgctttccagaggggccctgcacccgaattctccgccagcccccccgcctgtctgtacatgggcagacagccgccgccccccccccctcacccctttcccggcgcattgggggctcttgagcagggctccccacccgacatctctccatacgaagtgccacctttggccgacgatcccgctgttgctcatctgcatcaccacttgccagcacaacttgcgctgcctcacccgcctgctggtccgttccccgagggtgctgaacctggggttctggaagagcccaaccgagtccagttaccgtttccctggatgaagtcaaccaaggcgcacgcttggaaaggtcagtgggcagggggcgcctatgctgccgagcccgaggagaacaagagaacccgcaccgcttatacccgggcgcaacttcttgaactggagaaagagtttctcttcaacaagtacatatcacgtccccggagggtggagttggctgtcatgttgaacctgactgagcgtcacatcaagatctggttccagaacaggagaatgaaatggaaaaaggaagaggataaaaagcggggaggaggtactgccgtgggaggaggaggcgtggccgagcctgagcaggattgtgctgttacatcaggagaggagctgctagccctccccccaccgccaccaccagggggcgctgtccccccagctgctcccgttgccgctcgtgagggaagattacccccaggtctatcagcttcaccgcagcccagctcagtagctcctcgccgccctcaggagcccagatag

SEQ ID NO: 198633 - DNA, 1398 bp, synthetic construct
  misc_feature 1..1398: note = Description of Artificial Sequence: Synthetic coding sequence
  source 1..1398: mol_type = other DNA
atgctgcccctgtggaccctgagcctgctgctgggcgccgtggccggtaaagaagtatgttatgagagactcgggtgttttagcgacgacagcccttggtctggaattaccgaacggcctctccacatcctcccgtggtcccccaaggacgttaatactagattcttgctttataccaatgaaaatccaaacaattttcaggaggtagctgcggactcttcgagtatctcaggttcaaattttaaaaccaataggaaaactaggtttattatacatggcttcatcgataagggtgaggagaattggctggcaaacgtctgcaagaacctgtttaaggtcgagtccgtgaattgcatctgtgtagattggaagggaggttctagaactggctatacgcaggcctctcagaacattaggatagtgggggctgaggtcgcttattttgtcgagttcttgcagtcagctttcggttattccccgagcaatgtccacgtgattgggcatagcctgggcgcacatgctgccggggaggcaggccgaagaaccaatggtacaattggcagaatcacaggtctggacccagccgagccctgttttcagggcacacccgagcttgtgcgcctggatccatccgatgccaaatttgtcgacgtcatccataccgatggggcgccaattgtacccaatctcggattcggcatgagccaggtagtgggtcacctcgatttctttccaaacggcggagtggaaatgccaggctgcaaaaagaatatcttgagccagatagtggatatcgacggtatctgggagggtacaagagactttgccgcctgcaaccacctgcgctcttacaagtattacaccgactccatagtgaatcccgatggtttcgcaggtttcccctgcgcgtcctataacgttttcacagcaaataagtgtttcccctgtccatctggggggtgtccccagatgggacactatgctgataggtacccgggtaagaccaacgacgtgggacagaagttttatctggacactggcgatgcgtcaaattttgctagatggcgctacaaagtctccgtgacgctctctggcaaaaaagtgaccgggcatattctggtgtctttgtttggcaacaagggaaacagcaaacagtatgagattttcaaaggcacccttaagcccgattccacacatagtaacgaattcgattccgatgtcgacgtgggggacctgcagatggtcaaattcatctggtataacaacgtaatcaaccctacactgccaagagtcggagcaagcaaaatcatagtcgagaccaacgtagggaaacagtttaacttctgctcaccagagacagttcgcgaagaggtgcttctcacactgactccttgttag

SEQ ID NO: 198634 - DNA, 3372 bp, synthetic construct
  misc_feature 1..3372: note = Description of Artificial Sequence: Synthetic coding sequence
  source 1..3372: mol_type = other DNA
atgaacagccccaacgagagcgccgacggcatgagcggccgggagccaagcctggaaatcctgccccggacgtcacttcactccatccctgtgaccgtcgaggtcaagccggtccttccccgcgcgatgcctagctccatgggaggtggtgggggcgggtcaccctctcctgtcgagcttcggggtgccttggtaggcagcgtggaccctaccttgcgcgaacaacaattgcaacaggaactgctagcactgaaacagcagcagcagttgcagaagcagctgttatttgccgaatttcagaaacagcacgaccacctgacccgccagcacgaggtacagctgcagaagcacctgaagcagcagcaggagatgctggcagcaaagcagcaacaagaaatgttggcagccaagcgccagcaagaattggagcagcagcggcagcgggaacagcagcgacaggaggagttagaaaaacagagactggagcagcagttgctgatcctgcgcaacaaggagaagtccaaagaatccgcaattgctagcacagaagtgaagctcagactgcaagagttcttgctttctaagagtaaggagcccacccccgggggcttaaatcactctttaccacagcatcctaagtgttggggggcccatcacgcgtctcttgatcagtcctcaccacctcaatccggaccacccggcaccccaccgtcgtacaagctgccccttccaggcccatacgactctagggatgacttccccctcaggaaaacggccagcgagccgaacctgaaggtgcggagccgcctcaagcagaaggtcgccgagcgccggtcctcacctctacttagaagaaaagacgggactgtcatctccacatttaagaagagagccgttgagattaccggagccgggcccggtgccagcagtgtttgcaattccgcaccaggtagtggcccttcttctcccaatagctctcacagcacaattgctgagaatggttttacggggagtgtgccaaatattccaactgaaatgttgccccagcaccgcgccctgccccttgactcttcccctaatcaattcagtctctacacaagtccctcccttcctaacatttctctggggctacaggctacggtcacagtgacaaatagtcatctcaccgcttctcccaagctctctacacagcaggaggccgaacggcaagccttgcaatcgctaaggcagggaggaaccctgactggtaaatttatgagtacatcatcaatacccggctgtctgctcggggtcgccctggagggcgacggatcacctcacggtcacgcttccctgttacagcatgtgcttctcctcgagcaggcccggcagcagtctacactaatcgccgtcccgcttcacggacaatccccacttgtgacaggtgaacgcgtcgctacaagtatgcgcaccgtgggaaaactgccccgccaccgcccactcagtcggacgcagagttcccctctaccccagtcccctcaggcattgcagcagctagtgatgcagcaacagcatcaacagttcctcgagaagcagaaacagcagcaactccagttaggaaaaatcctgaccaagacgggggaactgccacgacagcccacaacacatccggaggagacggaggaggaacttacagagcagcaagaagttctcttgggcgagggggcgctcactatgccccgcgaggggtccactgaatccgaaagcacacaggaagatctggaagaagaggacgaggaagacgacggagaagaggaagaagattgcattcaggtcaaagacgaggagggggagtcgggagcagaggaaggacctgacctggaggagccgggagctggatacaagaagctcttctccgatgcccagcctctgcagcccttgcaagtctaccaggccccactatctttggcaactgtgccgcaccaggcactaggacgaacccagagctcgcctgccgcacctggtggcatgaaatccccgcccgaccagcctgttaaacacctgtttaccacaggcgtggtttatgacacctttatgcttaagcaccagtgtatgtgcggaaacacacacgtccaccctgaacacgctggacgaatccaatccatctggagccgtctccaagagaccggcctcctaagcaaatgtgagcgaattcgaggccgaaaggctacacttgatgagatccagaccgtccactccgagtaccatactctgctgtatggcacctctccccttaaccgccaaaagttggactcaaagaagcttctcggtcctatctctcagaagatgtatgctgtgctgccttgcggaggaataggagtggacagcgatactgtgtggaacgaaatgcattcgtcctccgctgtgcgcatggctgttgggtgtctgctcgagctcgcatttaaggtggcagcaggggaattgaaaaacggcttcgccatcatcaggccacctggccaccatgctgaagagtccactgcgatgggcttttgcttttttaatagcgtagcaattactgcaaagcttctacagcagaaattgaacgtgggcaaggtactgattgttgattgggatatccaccacggcaatggcacacagcaggcattttacaacgacccttcagtgctgtacatatcccttcaccgctatgacaacggtaacttcttccccggctccggcgcacccgaggaagtcgggggcggaccgggtgtcggctacaatgtgaatgtcgcatggaccggcggtgtggatcctccgatcggggatgtggagtaccttactgcctttaggactgtggtgatgcccattgcccacgagttcagcccagacgtcgttcttgtgtcagcagggtttgatgccgtcgaaggccatctgtctcccctggggggatactctgttacggcccgttgcttcggacatttaaccagacagctgatgacgttggccggaggccgcgtcgtgctggcactggagggaggccatgacctcacagcaatttgtgatgccagcgaagcttgtgtgagcgcccttctgtctgttgaattgcagcctctagatgaggcggtgttgcagcagaagcccaacattaacgctgttgctacgctagaaaaggtgatcgaaatccaatctaaacattggtcgtgtgtgcagaagtttgccgctggcctgggccgctccctacgggaggctcaggctggcgagacggaggaagccgagacggtctcagccatggccctattaagcgtaggcgcagagcaagcgcaggctgcggccgcccgggagcattcccctaggcccgcagaagagcctatggagcaggagccagccctctag

SEQ ID NO: 198635 - DNA, 1128 bp, synthetic construct
  misc_feature 1..1128: note = Description of Artificial Sequence: Synthetic coding sequence
  source 1..1128: mol_type = other DNA
atgaacaccagccacctgctggccctgctgctgcccaagagcccccagggtgagaatagatctaaacccctggggacaccgtacaacttttccgagcactgccaggactctgtcgacgtgatggtgttcattgttacttcctattcgattgagaccgtggttggggtcttaggaaatctctgcctcatgtgcgtcactgtccggcagaaagaaaaggccaacgtgaccaatttgttaatagcaaacctcgccttctccgacttcctcatgtgtctgttatgccagccattaacagctgtgtacacaattatggactactggatttttggagagacgttatgcaagatgagtgcatttatccagtgtatgtctgtgaccgtgtccatccttagcctggtgctcgtggcgctggaacgacatcagctaattataaatcccaccggatggaagccatctattagtcaagcgtatctgggcatcgtgctgatatgggttattgcttgcgtcctgagcctgcccttcctggctaattcaatccttgagaacgtgtttcataaaaaccattctaaagccctggagtttctggctgacaaagtagtgtgcactgagagttggcccctggcccatcacagaaccatttataccacatttctactgctgtttcagtactgtctgccacttggctttatcctagtgtgctatgcccgcatttaccgcaggctccagcggcagggccgggttttccacaagggcacttactccttgcgagctggacacatgaagcaagttaatgttgtgctcgtcgtgatggtggtggcctttgctgtcctttggcttccactccatgtgttcaattcactggaagattggcaccacgaagcgattcccatttgccacggtaatttaattttcctagtctgccatcttcttgccatggcaagtacgtgtgttaacccatttatctacgggttccttaacacaaacttcaagaaggagatcaaggccctggttctcacctgccagcaaagcgcaccccttgaggagagcgaacacctgcccctgtccactgttcatacagaggtgtccaagggctctctgcggcttagcgggaggagcaaccccatttag

SEQ ID NO: 198636 - DNA, 1128 bp, synthetic construct
  misc_feature 1..1128: note = Description of Artificial Sequence: Synthetic coding sequence
  source 1..1128: mol_type = other DNA
atgaacaccagccacctgctggccctgctgctgcccaagagcccccagggcgagaataggagcaagcctttgggcaccccctacaatttctctgagcactgccaggatagcgttgacgttatggtgtttatagttacgagttacagcatcgagactgtggtaggggtgttggggaatctctgtttgatgtgcgttacggtcaggcaaaaggagaaggccaatgttaccaatctgctgatagctaatctagctttcagtgacttcctgatgtgcctgctatgtcagcccttgactgccgtctacactatcatggattactggatctttggagagaccctctgtaaaatgagtgcttttatccagtgtatgtccgttaccgtgtccattctctccctggtgctcgtggcacttgaacggcaccagttgatcatcaacccaacaggttggaaacccagcatcagccaggcctatctgggcattgtcctgatatgggtgatcgcatgcgtgctttccttaccctttctggcaaacagcatcctggaaaacgtcttccacaaaaatcacagtaaggctttagagtttcttgccgacaaggtggtctgcacagaatcctggcccctagcccaccacagaacgatctataccacctttctcctgctcttccagtactgtcttcctcttggcttcatcctcgtctgctacgccaggatctatagaagactgcaaagacagggaagggtgttccacaaagggacttattccctgcgtgctggccacatgaagcaggttaacgtggttctcgtggtgatggtggttgctttcgccgtactgtggctgcctttgcatgtctttaattctttggaagactggcaccatgaggctattcccatctgtcacgggaacctgatttttttggtgtgccatctacttgctatggctagcacttgcgttaacccgtttatttacgggttcctcaatacaaactttaagaaggagatcaaagccttggttctcacctgccaacagtcagcccctctggaggaatctgagcacctgccgctaagtacagttcataccgaagtttccaaaggctcccttcggctgtcaggccgctctaacccaatctag

SEQ ID NO: 198637 - DNA, 1797 bp, synthetic construct
  misc_feature 1..1797: note = Description of Artificial Sequence: Synthetic coding sequence
  source 1..1797: mol_type = other DNA
atgctgaagctggtgggcggcggcggcggccaggactgggcctgctcggtggccggtacttcactcggaggggaggaagctgcttttgaggtggcgcgcccaggggatcaaggcaaagccggagggggatctccgggatggggatgtgccggcattcctgactctgcacccggcgccggcgtgctgcaggccggggctgtcggccctgcccgaggcggccagggggccgaggaggtgggagagagcgctgggggcggagaggaaagacgggttcgccacccacaggccccggccctaaggttgttgaatcgtaagccacagggtgggagcggggagatcaaaacccctgaaaacgatttacagcggggacgactgagtcgtggtcccagaacagccccccccgcaccgggaatgggggatcggtcaggccagcaggagagatcggttccccactcgccgggcgcccctgttggcacctccgccgctgcagtcaacggcctcctgcacaacgggttccacccgccaccggtccagccaccacatgtgtgcagcaggggaccagtcggaggctccgacgccgcccctcaacggcttcctctgttgcccgagctacaaccgcagcctctgctgccccaacacgactccccagcaaaaaaatgtcgacttcgaaggcgcatggactccggcaggaaaaaccgccccccctttccatggtttggtatggacattggagggacactggtcaaattggtgtactttgagcccaaggatattactgccgaggaagagcaggaagaggtggaaaacttaaagagtattagaaaatatctgactagcaatacagcttacggaaagactggtattagggatgttcacctcgagctcaagaacctcaccatgtgcggacgcaaggggaatttacattttattaggttcccaagctgcgctatgcatcgatttattcaaatgggatctgaaaagaacttctcttccctgcataccacactatgcgcaactggcggtggtgccttcaaatttgaagaggattttcggatgatcgccgacttgcagctacataagctagacgagctggactgcctaatccaagggctgctgtacgtggactccgttgggtttaatggtaagccagaatgctattacttcgagaatcccactaatcccgagctctgccagaaaaagccatactgtctggacaatccctatcccatgcttctggtgaatatgggatccggggtttcaattctggccgtctatagtaaagataactataagcgggtcactggtacttctctcggcggtgggacttttctgggtctctgctgtcttctgacgggctgtgagactttcgaggaagcgcttgaaatggcagcaaaaggcgactccactaacgtggataaactggttaaggatatctacggcggagactacgagcgctttgggctccagggctcggccgttgcatcttcctttgggaatatgatgagcaaggagaaaagagatagtatctccaaggaggaccttgcacgcgccacactggtgacgataaccaacaatattggctcaattgctagaatgtgtgctctgaacgagaacatcgatcgggttgtttttgttggcaattttctaagaatcaacatggtgtctatgaaattactcgcctacgccatggatttttggagtaaaggccagctgaaagcattatttctagagcatgagggatattttggagctgtgggtgctttgttagagctgtttaagatgactgacgataagtag

SEQ ID NO: 198638 - DNA, 945 bp, synthetic construct
  misc_feature 1..945: note = Description of Artificial Sequence: Synthetic coding sequence
  source 1..945: mol_type = other DNA
atgaagctgatcaacggcaagaagcagaccttcccctggttcggcatggacatcggcggcaccctcgtgaaattggtgtacttcgagcctaaagacataactgccgaggaagagcaggaagaggtcgaaaatcttaagagcattcggaagtatctgacgagcaacacagcctatggcaagactggcattagggatgtgcacctcgagctgaagaatctgacaatgtgcggacggaagggcaacctacatttcattcggttcccgagctgtgcaatgcaccgctttatccagatgggatcggagaagaatttttctagtctccacaccacactatgtgccaccggtggcggcgccttcaagttcgaagaagatttccgcatgatagctgacctgcaactgcacaaactcgatgaactggattgtctgattcagggcctcttatatgtggattctgtggggtttaacggcaagccagagtgttactatttcgaaaacccaacaaatcccgagctttgtcaaaagaagccatactgcctagacaacccttaccccatgttgttggtcaatatgggctcgggtgtgagtattctggccgtgtatagtaaggataattataagcgggtaaccggcactagcttcgggaatatgatgagcaaagagaaaagagattccataagcaaggaggatctggcgagagcaacactggtgactattacgaacaacatcggctccatcgccagaatgtgtgcgttaaatgaaaatatagaccgcgtggtttttgtaggcaattttctgaggattaatatggtgtccatgaagctcttagcttatgccatggatttttggtccaaaggccagctcaaagcgctgtttctcgaacacgagggctacttcggagctgtcggggctctcctcgaactttttaaaatgacggacgataagtag

SEQ ID NO: 198639 - DNA, 1122 bp, synthetic construct
  misc_feature 1..1122: note = Description of Artificial Sequence: Synthetic coding sequence
  source 1..1122: mol_type = other DNA
atgaagctgatcaacggcaagaagcagaccttcccctggttcggcatggatataggaggcacattagtgaaattggtctatttcgaacccaaagatatcacggcggaggaagagcaggaggaggttgaaaacctcaagagcatacgaaagtacctgacatctaacaccgcttacggtaagacaggtatacgtgatgtccacctcgaactcaaaaatctgaccatgtgtggtcggaaaggaaacctccatttcattaggttcccctcctgcgctatgcataggtttatccagatgggaagcgagaagaacttcagcagtctccacactacattatgcgccactggcggcggggcctttaagtttgaggaagatttccgaatgatcgcagacctccagctccacaaacttgatgagttggactgcctgatccaggggctcctgtatgtagattcagtggggtttaatggaaaaccagagtgctattacttcgagaaccccactaatcccgaattgtgccagaagaaaccgtattgtctggataacccctacccaatgctccttgtgaacatgggttccggagtcagcatattagccgtatactccaaggataattataaacgtgtgaccggcaccagcctaggcggaggtacatttttgggcctgtgttgtctcttgacgggctgtgagaccttcgaagaagccctcgaaatggcggctaaaggtgactccacaaatgtggataaactcgtgaaagacatatatgggggggactatgagaggttcggcctgcagggaagtgccgttgcctccagctttggaaacatgatgagtaaggagaaacgggattccattagcaaggaagatcttgccagagctacccttgtgaccatcacaaataacataggctctattgctcggatgtgcgccttaaatgagaatatcgaccgcgttgtatttgtaggaaattttctgcggatcaatatggtttctatgaagctgctggcctacgccatggatttttggagcaaaggtcagctgaaagccctgtttttggagcatgagggatatttcggcgccgtaggggcactcctcgagctgtttaaaatgaccgacgataaatag

SEQ ID NO: 198640 - DNA, 1203 bp, synthetic construct
  misc_feature 1..1203: note = Description of Artificial Sequence: Synthetic coding sequence
  source 1..1203: mol_type = other DNA
atggccaagagcaagcacgccctgctgcccttctgccacggcatgatgcagcaggagggcctgcatcagatgcagtcccttgacctcggtttactctcgctgcagaattcattcccatggtttggcatggatattggcggcacgctggtcaaactggtctattttgagcccaaggacatcacagccgaagaagagcaagaagaggtggagaatttgaaatctatcaggaaatatcttacgtcgaacacggcttatggcaagaccggaattagagacgtgcatctcgagctgaagaacctcaccatgtgtggccggaaaggaaatttgcatttcattcgcttccccagctgcgctatgcacagatttatacagatgggatcagagaagaatttctcgtcacttcacacaacgttgtgcgctaccggggggggcgccttcaagttcgaagaagatttccgaatgattgcagacctgcaactgcacaagctggatgagttggactgcctgattcagggtttgctgtacgtggactccgtggggtttaacgggaaaccagaatgttattacttcgagaatcccaccaaccccgagctctgtcagaaaaaaccttattgtctcgacaacccttatccaatgcttctggtgaatatgggttcgggcgtctccattctggccgtgtactctaaagataattataagagggtgactgggacgagtttgggaggagggaccttcctgggtttgtgttgtctgcttaccggctgcgagacctttgaggaagcgctggaaatggccgctaagggcgactcaaccaatgtggacaaactggtgaaagacatctacggcggagactatgagagatttgggcttcagggttctgctgtggcaagtagtttcggtaatatgatgtcaaaggaaaagcgggactctatatctaaggaggacttggccagggcaaccttggtgaccattacaaataacattggctctattgcccgcatgtgcgctttgaatgaaaacatcgacagggttgtgtttgtggggaatttcttgcgcatcaacatggtttcgatgaagctgctggcatacgcaatggacttctggtcaaaaggccagctcaaagccctcttcctcgagcatgaggggtatttcggagctgtgggcgcactccttgaattgttcaaaatgaccgatgataaatag

SEQ ID NO: 198641 - DNA, 1386 bp, synthetic construct
  misc_feature 1..1386: note = Description of Artificial Sequence: Synthetic coding sequence
  source 1..1386: mol_type = other DNA
atgggcgaccggagcggccagcaggagcggagcgtgccccacagccccggggcgccagtgggtacatcagcagcagccgtgaacggattgcttcacaacggatttcacccaccacccgtgcagccaccccatgtgtgctcacgcggcccagttgggggaagcgatgcagctccgcagagactgcctcttctgccagaattgcagccacagcctctgttgccacagcatgatagcccggccaagaagtgcagattgcgacgccgtatggattcaggcagaaagaataggcctcccttcccttggttcggaatggacatcggtggcactctggtgaaactggtctacttcgaaccaaaagatatcaccgctgaagaggaacaggaagaggtagaaaacctgaagtccattcgcaagtacctgacctccaacaccgcttacgggaaaaccgggatccgcgacgtgcacctcgaacttaaaaatttaactatgtgtgggagaaaaggaaacctgcatttcattagattcccctcctgcgcaatgcatagattcatccagatgggctccgagaagaattttagctctcttcataccactttgtgcgctaccggtggaggagcattcaaattcgaggaggactttcgtatgatagccgacctgcagctgcacaagctcgacgagctcgactgtctgattcagggcttactgtacgtggatagcgtgggtttcaatggtaaacccgagtgctattacttcgaaaatccaaccaaccccgaactctgtcagaaaaagccttattgcctggataatccatacccaatgctactggtgaatatgggttccggggtttccattctggctgtctacagcaaggataattacaaacgggtgaccgggacaagcctggggggaggtacattcctgggcttgtgttgccttctgaccggatgcgaaacatttgaggaggccttggagatggctgccaaaggtgacagcaccaacgtcgacaaactcgtgaaggatatttatggcggcgattacgagagattcggtctgcaaggtagcgctgtggcaagcagttttggaaacatgatgagtaaggagaaaagagactcaattagcaaggaggacctggcaagggccacattggtgacaattaccaataatatcggaagcatcgctaggatgtgtgcgctgaacgaaaatatcgatcgcgtcgtcttcgttgggaacttccttagaattaacatggtatctatgaagttgctggcctatgccatggatttttggtccaaggggcagctaaaggccttgtttttggagcatgagggttactttggagcggtcggcgccttgcttgagctgttcaaaatgaccgatgataagtag

SEQ ID NO: 198642 - DNA, 1713 bp, synthetic construct
  misc_feature 1..1713: note = Description of Artificial Sequence: Synthetic coding sequence
  source 1..1713: mol_type = other DNA
atgcggcggctgggccccttccacccccgggtgcactgggccgcccctcccagcctgtcgtcaggactgcatcgtctgctgttcctcagaggtacacggatcccatctagtacaacactcagtcctccccggcatgattcactgagcctggatggtggcacagtgaatccaccacgggttcgggagcccactggtcgggaggccttcggaccctctcctgccagtagtgactggttgcctgcccgatggagaaacgggcggggcggtcgccccagggcccggctttgttccggctggactgccgccgaggaagcaagaagaaatcctacattgggagggcttctgggccggcagagactactccttagaatgggcggtggccgcttgggggccccaatggaaagacatggccgggccagtgcgacctccgtttctagtgccggggagcaggcagccggcgaccccgaaggaaggcgccaagaacccttaaggcgccgtgcttccagcgcctcagtgcctgccgttggcgctagcgccgaagggacacgccgcgaccgacttggctcttactcgggtcccacaagcgtcagtcgtcagcgtgttgaatctctgcggaaaaaacgtccactgttcccttggttcggtctcgatattggcggcacactggtgaagctggtctactttgaaccaaaggatatcacagctgaagaggaagaggaggaggtggaatcattgaagtctatcagaaagtatctgacttcaaatgtcgcctatggttcaactgggattagagacgtgcatcttgaattaaaggatctcaccctatgcggtagaaagggcaaccttcacttcattcgcttcccaacacacgatatgcccgcattcattcaaatgggccgggataagaacttcagctcattacacactgttttctgcgctactggggggggggcatacaaatttgaacaagattttttgactattggcgacctacaactttgcaaactggacgagcttgattgcttgattaagggtatactctacattgactccgtgggctttaatggtagaagtcaatgttattattttgaaaaccccgctgacagtgagaagtgtcagaagctgccatttgacctgaaaaacccctacccccttctgcttgtcaacataggctcaggcgtgtcaatactggctgtatatagcaaagataactacaagcgcgtgactggaacttcccttggcgggggcacttttttcggtctttgttgtctgttgaccggctgcactaccttcgaagaggctttggagatggcctcccggggcgactctaccaaggtagacaagctggtgcgcgatatttacggaggcgattacgagcgtttcggtctccctggatgggccgtcgcctcatcatttgggaacatgatgagtaaagagaagagagaagcggtttcaaaagaagatttggccagagctaccctgatcacaatcaccaataacatcgggagtattgctcggatgtgtgctctcaatgaaaatattaatcaagtcgtcttcgtggggaactttctccgaattaacacgatcgctatgcgtctgctggcatacgctctcgattactggtcaaaggggcaattgaaggccctgttttctgagcatgagggctacttcggggctgtcggggctctgctcgaactgctgaagattccttag

SEQ ID NO: 198643 - DNA, 1161 bp, synthetic construct
  misc_feature 1..1161: note = Description of Artificial Sequence: Synthetic coding sequence
  source 1..1161: mol_type = other DNA
agcggccgggtgaaccccgccggcggcctgggctgcagcgagagcgggacttttggcggacctcccgctccaattgtcttcccctggttcggcctggatatcggaggcacccttgtcaagctggtgtatttcgaaccgaaagatataaccgcagaggaagaagaggaggaggtcgaatccctcaagagtatccggaaatacctcacctcgaatgtagcctatggctcaacaggcattagggacgttcatctcgagctcaaagacttaacactctgtggacgcaaaggcaatctgcactttattcgcttcccaacgcatgatatgcctgcattcatccagatggggcgggacaagaacttttctagcctgcataccgtgttttgtgcaaccggcgggggagcctataagtttgagcaagactttctgacgattggggatctacagttgtgcaaactagatgaattggattgcctgatcaagggaattctctatattgactctgtcgggttcaatggccgctcacagtgttactactttgagaaccccgccgattcagagaagtgccagaagctcccgtttgacctgaaaaatccttacccactcctgctggtcaacattggtagcggtgtgagcatcctcgccgtctactccaaggataattataaaagagtgacgggcacttcattaggaggagggacctttttcggtctgtgttgccttctgaccgggtgcacgacatttgaagaggctctagagatggcaagcaggggagattctacaaaggtagacaagcttgtgcgcgacatatatgggggcgattacgagcgcttcggactcccaggctgggccgtggcttcttcattcggtaacatgatgagcaaagaaaagcgggaggctgtttcgaaggaggacttggcgagagctaccctgattactataactaacaatatcggatccattgcgcgaatgtgtgcactaaacgaaaacattaaccaagtggtgtttgtgggtaactttctacggattaatacaattgctatgcgcctgctggcgtacgccctggactattggagcaagggacagctcaaagcattgttctccgagcatgaggggtattttggcgccgtgggggctcttcttgaattgttgaagatcccatag

SEQ ID NO: 198644 - DNA, 840 bp, synthetic construct
  misc_feature 1..840: note = Description of Artificial Sequence: Synthetic coding sequence
  source 1..840: mol_type = other DNA
atgcccgccttcatccagatgggccgggacaagaacttcagcagcctccatacagtcttctgtgcaacggggggaggggcctataagtttgagcaggattttctgaccattggagatttgcagctgtgcaaactggacgagctggactgtctgatcaagggtatcctgtacatcgattcggtgggcttcaatggacggagccagtgttactatttcgaaaatccggccgatagcgagaaatgtcaaaagctacccttcgatctgaaaaacccataccctctgctcctggttaacatcggctctggagtgtccatcttggctgtttacagcaaggataattacaagagagtaactggcactagccttggagggggtacgttttttggactgtgttgtctgctgaccggctgtaccacttttgaggaggctctcgagatggccagccgaggggactctactaaggtcgacaagctagtgcgtgatatttatggcggtgactacgagcgctttgggcttccgggatgggccgtcgcaagctcatttggaaatatgatgtccaaggagaagagagaagcggtgagtaaggaggacttagcacgagctaccctgataacaataaccaataatattggtagcattgcacggatgtgcgctctaaacgagaacattaaccaggtggttttcgtgggcaattttctgcgcataaacactatcgccatgcgactgctcgcatacgctcttgactactggagtaaaggccaactcaaggcgctattttcagagcacgaggggtatttcggcgcggtcggagccctgctggagttgctcaaaatcccatag

SEQ ID NO: 198645 - DNA, 1113 bp, synthetic construct
  misc_feature 1..1113: note = Description of Artificial Sequence: Synthetic coding sequence
  source 1..1113: mol_type = other DNA
atgaagatcaaggacgccaagaagcccagcttcccctggttcggcatggatataggagggacgctagtcaagctgtcatatttcgagccaatagacatcacagctgaggaggagcaggaagaggtggagagtttgaaatccatacgtaagtacctgaccagtaatgtggcctatggatccaccggaatcagagacgtgcatctggagctgaaagacctcaccctgttcggccgcagggggaatctgcatttcattaggtttccaacccaggatctgcctacttttatccagatggggcgcgacaaaaatttcagtactctacagacagttctctgtgccactggcggaggagcctacaagtttgaaaaggattttagaaccatagggaacctacatctgcataaactcgatgagcttgactgtcttgtgaaaggcttgctatatatcgactccgtcagcttcaacggacaggccgaatgttattatttcgccaacgcttccgagcccgagcggtgtcagaagatgcctttcaacctggatgatccctaccccttactggttgtcaatatcggttcaggcgtttctatcctggcggtccatagcaaggacaactacaaacgagtgactggaacttcattaggggggggaactttccttggactgtgctcgcttctaactggctgtgaatcgtttgaagaagctctggagatggcatcaaagggcgactccacacaggccgataagctcgtgcgagacatttatggaggcgattatgaaaggtttggcctgccagggtgggccgtggccagctcctttggcaacatgatctacaaagaaaaaagagaatcagtaagcaaggaggacttagcaagagcaaccctcgtgaccattacgaataacattgggtctgtcgcaagaatgtgtgcagtgaacgaaaagattaacagagtggtgtttgttggaaatttcctcagagtgaataccttgagtatgaaactgttagcttacgccctggattactggagcaaaggccaactgaaggcactcttcctcgaacacgaaggttactttggcgccgtgggcgcactcctgggactcccaaatttcagttag

SEQ ID NO: 198646 - DNA, 2322 bp, synthetic construct
  misc_feature 1..2322: note = Description of Artificial Sequence: Synthetic coding sequence
  source 1..2322: mol_type = other DNA
atggccgagtgcggcgccagcggcagcggcagcagcggcgacagccttgacaagagcatcacattacctccagacgagatctttagaaacctcgaaaatgctaaacgttttgccatcgacataggcggatcccttacgaaactggcttactacagcaccgtgcagcacaaagtggcaaaggtcaggagcttcgatcacagcggcaaagataccgaacgggagcacgagcctccgtatgaaatttcagtgcaggaggagattaccgcccgcctccattttatcaaattcgagaacacctacatagaagcctgtttggactttataaaagaccacttggtgaacaccgaaacaaaagtcatacaagccaccggaggcggtgcctataagtttaaggatctgattgaggaaaaactgaggctcaaagtggataaagaggacgtcatgacttgtttgattaaagggtgtaattttgtgctgaaaaacatccctcatgaggccttcgtttaccagaaggattccgatccggagtttcgcttccaaacaaatcatccacatatatttccgtaccttcttgtgaatataggcagcggggtgagcatcgtgaaagtggaaaccgaggatcggttcgaatgggttggggggagcagcatcggaggagggacattctggggacttggggcactactcacaaaaaccaagaaattcgacgaactgcttcatcttgcctccagaggccagcactctaatgttgatatgttagtccgagatgtgtacggcggcgcacatcagactttgggtctgagcggtaacttaattgctagctcttttggaaaatcagccaccgctgaccaagagttctctaaagaggacatggcaaagtccctgttgcacatgatttctaatgatatcggacagctggcttgcctgcatgctaggctgcacagtctcgatagagtgtatttcggcggctttttcatccgtggccaccctgtcacaatgagaactatcacttacagcatcaactttttctctaaaggcgaagtgcaggccctctttcttcggcatgaagggtatttgggcgcaatcggtgcctttctcaaaggcgccgaacaagataacccaaatcagtactcatggggagagaactacgcaggctcatcagggctgatgagcgcatctccggagcttggcccagctcagagggctcgttccgggacttttgatctgctggagatggatagactagaaaggcccctcgtggatctccctttgctgctggaccccccttcatacgtgcccgatactgtggacctgaccgatgacgctttggcacgaaagtactggctgacatgttttgaagaagctctggatggagtggtcaagcgtgccgtggcctctcagcctgattctgtagacgccgccgagcgggcagaaaagtttcgacaaaaatattggaacaagctccaaaccttacgccagcaacccttcgcttacgggacactgaccgtccggagcctgctggacactagggagcattgccttaacgaatttaacttccccgatccatactcaaaggtcaaacagcgagagaatggcgtggcacttaggtgtttccccggagtggtgagaagtctggacgccctcgggtgggaggagcgtcagcttgccctggtcaagggattactggccggtaacgtcttcgactggggcgctaaagccgtgtctgcagttttggaaagcgacccgtattttggcttcgaagaagccaagagaaaactccaggaaagaccatggctggtggattcctactccgaatggcttcagagactgaagggtcctccccacaaatgtgctttaatcttcgctgacaactctggaatagacataatactcggcgtctttccttttgttcgagaactgctcctgaggggtactgaggtgatcctggcctgcaatagtggccctgccctcaatgatgtcacccacagcgaatcactgattgtggctgaaaggatcgccggcatggatcccgtggtacattctgctcttcaagaagaaagacttctgctggtacagacagggagtagctccccttgcctcgacttgtcacgcctggataaagggctcgcagcattggtacgcgagagaggtgcagacctggtcgtcatcgaagggatggggcgcgctgttcatacgaactaccacgcagctttgcgctgcgaaagcttgaagctagctgttatcaaaaacgcatggctcgccgaacggctgggagggcgcctgttctccgtcatttttaagtacgaggtccccgctgaatag

SEQ ID NO: 198647 - DNA, 1455 bp, synthetic construct
  misc_feature 1..1455: note = Description of Artificial Sequence: Synthetic coding sequence
  source 1..1455: mol_type = other DNA
atgttccccaacagcatcctgggccggccccccttcacccccaaccaccagcaacacaacaatttctttaccctatcaccaactgtttactcgcatcagcagctgattgatgcccagttcaacttccaaaacgccgatctcagtagagcagtgagcttacagcagcttacttatgggaatgtatcccccatacagacaagtgcaagcccactattccgggggcggaaacgtctgtccgacgagaagaatctaccgctggatggaaaaagacagcggttccactctcctcatcaggaacctacagtggttaaccagattgtacccctctctggggaaaggagatactctatgccgcccctcttccacacccactacgtccctgacatagtcaggtgcgtacccccttttcgcgagatcgcctttcttgaaccccgagaaatcactcttccagaggccaaggataaattgagtcagcagatacttgaactgtttgaaacatgccaacaacagatcagcgacctcaagaaaaaagaattgtgcagaacacagctgcaacgggagatccagctgctcttcccccagtctcgcctcttcctggtcggcagtagtctcaacgggtttgggacccgttcctccgatggggacctatgtctggtggtgaaagaagagccttgcttttttcaggtcaaccagaaaacagaagctcggcatatcctgactcttgtgcacaagcatttttgtacccgcctttcaggctacattgagaggccgcagctgatccgcgccaaagtcccaattgtcaagtttagagataaggtttcatgcgtggaattcgatctcaacgtgaacaatattgttggaattcgtaacacatttctgctgagaacctacgcctacctagagaatagggtacggcctttggtgcttgtcatcaaaaagtgggcctcacaccaccagattaacgacgcatcccggggcactttatcttcttattctctagtgctaatggtgctgcattacttgcagaccctgccagaaccaatactcccaagtcttcagaaaatctatcccgagagcttcagtcctgccatccagctccacttagtgcaccaagctccgtgtaatgttcccccttatctcagcaagaatgagtccaacttgggagacctccttcttgggttcctgaaatattatgcaactgagtttgattggaactcacagatgataagcgtacgcgaagcgaaggcaatacctcgtccggacgggatcgagtggcgaaataaatatatctgcgtggaggagccattcgacggcactaatactgcaagagctgtgcacgagaagcagaagttcgatatgatcaaagatcaattcctcaagtcctggcaccgcctgaaaaataagagggatctcaattccatcctgcccgtgcgggccgccgtactgaagcgttag

SEQ ID NO: 198648 - DNA, 1443 bp, synthetic construct
  misc_feature 1..1443: note = Description of Artificial Sequence: Synthetic coding sequence
  source 1..1443: mol_type = other DNA
atgttccccaacagcatcctgggccggccccccttcacccccaaccatcaacagcacaataattttttcaccttgagcccgacagtgtactcacatcagcagctgatagatgctcagtttaactttcagaacgccgatctgagcagggctgtgagtctgcaacaactgacctacggtaatgtatcccccattcaaactagtgctagtccgctctttagaggacgcaagcggctttctgacgaaaagaacctgcccctggacggaaagcgccaacggttccattcacctcaccaggagccaacagtcgtcaatcagattgtccccttatcaggtgaacgccgctacagtatgccccccctgttccatacccattacgtgcctgacattgtgcgatgcgtgcccccctttcgcgagatcgcgttcctcgagccccgggagatcactctgcccgaagccaaagataagctgagccaacaaatcctggagctcttcgagacctgccaacagcagatttccgatttgaagaagaaagaactctgcaggacccaattgcagagggagatccagctccttttccctcagtctagactctttttggttggcagctctctgaatgggtttggtactagatcttctgatggggacctatgtctggtagtgaaagaagagcccgtgaaccagaagactgaagcccgacacatactgacattagtgcacaaacacttctgtacccgcctgtctgggtacattgagagaccgcagttgatccgagccaaagtgccaattgtgaaatttagggacaaagtgtcttgcgtggagtttgacttaaacgtgaacaatattgtcggaatccgcaatacgttcctgctacgcacctatgcctacctggaaaacagggttaggcccctggtgctggtgattaagaagtgggctagccatcatcagataaacgatgcttcccggggcacactgagctcctactcattggttctgatggttttgcactacctgcagaccttgccagaaccaatcctgccttctttacagaagatttatcctgaaagcttcagccccgcgatacagctccacctggtgcatcaggcgccctgcaatgtgcccccatatttgtcaaagaatgagagtaacctcggtgatctgctgttgggattcctgaaatactacgctaccgagttcgattggaatagccaaatgattagcgttcgggaggcaaaagccatcccgcgcccagatggcattgaatggcgtaacaaatacatttgcgtggaggagccgttcgacgggactaacacggcaagagccgtacacgaaaagcagaagtttgatatgattaaagaccaattcctgaaaagctggcaccgactgaaaaacaaaagagacctcaacagtatcttaccagttagggccgccgttttgaagcggtag

SEQ ID NO: 198649 - DNA, 1455 bp, synthetic construct
  misc_feature 1..1455: note = Description of Artificial Sequence: Synthetic coding sequence
  source 1..1455: mol_type = other DNA
atgttccccaacagcatcctgggccggccccccttcacccccaaccatcagcagcacaataacttcttcaccctctcccccactgtgtactcacatcagcagttgattgatgcccagttcaatttccagaacgccgatctcagtcgcgctgtgtctttgcagcagttgacctatgggaacgtcagcccaattcagaccagcgcctcccctctattccggggacgaaaacgcttaagcgacgaaaagaatttgcctcttgacggaaagcgacagcggttccattcaccgcatcaggagccaacagtcgtgaaccagattgtccccctgtctggggagagacgctattcaatgcccccacttttccatacccactatgtcccggacatcgtacgctgtgtccctccctttcgtgaaatcgcgtttcttgagcctcgcgagatcactttaccagaggcgaaagacaagctgagccagcagattctggagcttttcgagacatgtcagcagcagatttctgacctgaaaaagaaggagctctgtcgtacacagctacaacgggaaatccagctgctttttcctcagagtcgcttattcttagtaggatccagcctcaatgggttcggtacacgctcatcagatggggatctctgtctggttgtgaaggaagaaccttgcttcttccaggtgaaccaaaagactgaagccagacatatcctaacactggtgcataaacatttttgtacccgactgtccgggtatatcgaaagaccgcagctgatacgcgcaaaggtcccaattgtcaaattccgagataaggtgtcctgcgtggagtttgatctcaatgtgaataatattgtaggtatccgtaacactttcttgcttcgaacctacgcgtacctggagaatcgcgtaagaccccttgtacttgtaatcaaaaaatgggcaagtcaccatcagatcaacgacgcctcccgtggcaccctgtcatcctattccctggttctgatggtgctgcactacctgcagactctgcccgagccaattctgccaagcctgcagaagatctacccagaaagtttttcacccgccatccagctgcatctggtgcaccaggcaccttgcaacgtacccccgtatttgagcaagaatgaatccaatctgggcgaccttttgctaggcttcctgaaatattatgccacagagttcgattggaactctcagatgattagcgtcagagaggctaaggccatccccagacccgacggaattgagtggagaaacaaatatatttgcgttgaggaacctttcgatggcaccaacaccgcccgcgccgttcacgagaagcagaagtttgacatgatcaaagatcagttcctgaaatcctggcaccgcctgaaaaacaaaagagaccttaattctattttaccagtccgcgctgcagttctgaagagatag

SEQ ID NO: 198650 - DNA, 1455 bp, synthetic construct
  misc_feature 1..1455: note = Description of Artificial Sequence: Synthetic coding sequence
  source 1..1455: mol_type = other DNA
atgttccccaacagcatcctgggccggccccccttcacccccaaccaccagcagcataacaatttcttcacactatccccaacagtgtactcccatcagcagttgatcgacgcacagtttaatttccagaacgcagacctcagccgcgccgtgtccctgcagcagttgacctacggtaacgtaagtcctatccaaacatcagcttctcccctctttagagggaggaagcggctgtcagatgagaaaaacctgccgttagacgggaagagacagaggttccactccccacaccaagagccaactgtggttaaccaaatagtcccgctcagcggcgagcgaaggtactccatgcccccactatttcatacacattatgtacccgatattgtaagatgcgttcccccattcagagagatagccttcctagagccacgtgagataactctgccggaggccaaggataaactttcacagcagatcttggaacttttcgaaacctgtcagcagcagatttcagatctaaaaaagaaggaactgtgccgcacccagctgcagcgcgaaatccagctcctgttcccgcaatccaggctattcctcgtcgggagctcactgaacggatttggaacacggtcgagcgacggcgacctgtgtctcgttgttaaagaggagccgtgtttctttcaggtgaaccaaaagactgaggctcgccatatcctcacgctggtgcacaaacatttctgtacacgcctgtccgggtacatcgaaagaccacagcttattagggcaaaggtgccgatcgtaaaatttcgtgacaaggtcagttgtgtggaatttgacctgaacgtgaataacattgtgggcatccgtaatacattcctcctgagaacctacgcctatcttgagaatagggtgcgaccacttgttttggtgataaaaaagtgggcatctcatcaccagattaacgacgcctcacgcgggaccctgtcgagctacagtttggtactgatggttctccactacttacagaccttaccagaacctatcctgccatctctgcagaaaatctatcctgaaagctttagtcccgcaatccaactccatcttgtgcatcaggcaccatgtaacgtgcccccatatcttagcaagaacgagtcaaacctcggagatctgctccttggttttttgaagtactacgccaccgaattcgattggaattctcagatgatctccgtgcgagaggctaaggcaatcccccgcccagatggcattgagtggaggaacaaatatatatgtgtagaggaacccttcgacggcaccaacactgctcgagccgtgcacgagaagcaaaaatttgatatgatcaaggatcagttcctgaagtcttggcatcgactgaagaataagagggatctgaacagcatactcccagttagggccgcggtcctgaaaagatag

SEQ ID NO: 198651 - DNA, 1476 bp, synthetic construct
  misc_feature 1..1476: note = Description of Artificial Sequence: Synthetic coding sequence
  source 1..1476: mol_type = other DNA
atgagcctggtggcctacgccagcagcgacgagagcgagcccgacgaagctgagcccgagccagaggaggaagaggcagtcgcacctacttccgggccagcgctcggaggcctgttcgcctccctccctgctccaaaagggccagctctgctgccccctcctccacaaatgctcgctcccgcctttcccccccctcttctactgccccctccaacaggcgatcccaggctgcagcctccgcctcctctgccattcggcttgggcggttttcctccccctcccggagtgagccccgcggaggcggccggagtgggtgagggcctcggtttaggcctgcccagtccccggggtcccggcttgaatctccccccgcccatcggtggtgctggcccccctctggggcttcccaaaccaaagaaacggaaggagccagtgaaaattgccgcgccggagctgcacaaaggcgactccgactccgaggaagacgagccaactaagaagaagacgatactgcaggggagtagtgagggcactggtctctctgccctcttgccacagccaaagaatctgacagttaaagagacaaatcgactgctcctgcctcatgcattcagtcgcaagccctccgatgggagcccagacacaaagcctagtcgactggcttctaagaccaagacaagctcgctggcccctgtggtcgggaccaccaccaccactccttccccatccgcgataaaagccgccgccaagtcagccgctctgcaggttaccaagcaaattacacaggaggaagacgattcagacgaagaggtcgcccccgaaaacttcttttctctgcccgagaaggctgaaccgcccggagtggagccatacccatacccaataccaacagtgcccgaggagctacccccagggaccgagcctgagcctgcatttcaagacgacgcagccaatgctccactggagttcaagatggccgctggctcgtccggagcgccttggatgccaaagccaggcgacgattatagctacaaccaattcagcacctatggggatgctaatgccgccggcgcctactaccaggactactatagcgggggctattatccagcacaagatccagcccttgttcccccccaggagatcgctccagatgcctcatttatagatgatgaggcattcaaacgtctccagggcaaacgaaataggggaagagaggaaattaattttgttgaaatcaaaggggatgatcagttgagtggtgcccaacagtggatgaccaaaagccttacggaagagaagacaatgaaaagcttttctaaaaaaaagggcgaacagcctaccggccagcagaggcggaaacatcagatcacttatttgatccatcaagccaaggaaagggagctggagcttaaaaacacctggtcagagaacaaattgagtcgccggcagacccaagctaagtacgggttctag

SEQ ID NO: 198652 - DNA, 1380 bp, synthetic construct
  misc_feature 1..1380: note = Description of Artificial Sequence: Synthetic coding sequence
  source 1..1380: mol_type = other DNA
atgagcctggtggcctacgccagcagcgacgagagcgagcccgacgaggccgagccagaaccggaggaggaagaagctgtagcgccaaccagtggacctgcactagggggactgtttgcctcactgcccgcccccaaaggccccgctctgctcccccccccaccacagatgctcgcgcccgcctttccccccccactcctgctaccccctcctaccggtgacccacggctccaacctcccccaccacttcccttcgggctaggcggctttcccccccctccgggtgtaagccccgccgaagccgcaggcgtgggcgagggtctcgggcttgggctgcccagcccccgtggacctgggctgaatctgccaccaccaattgggggcgctggtccacctctcggattgcccaagccgaagaagagaaaggagccagtaaagatcgcggctccggaactacacaaaggcgactcagattctgaggaagatgaacccacgaaaaaaaaaacaatcctccagggttcctctgagggaaccggattatctgccctgcttccccaacccaagaatctgacagtgaaagagactaatcgcctgctgctcccacacgcgttcagccgcaagccttccgatggttctcccgatacaaagcccagcagactcgcttccaagactaagactagttccctggctcctgtcgttgggaccacgaccaccacccctagcccctcagccataaaagccgccgctaaaagtgcagccctgcaggtaactaagcaaatcactcaggaggaagacgattctgacgaagaggtggctcctgagaactttttcagtctgccagagaaggctgaacctcctggtgttgaaccctacccctaccccatacccactgtgccggaggagctgcctcctgggacagagccagagccagctttccaggacgatgctgccaacgcgcccctggagtttaaaatggcggctggctcctcaggcgccccatggatgcctaagcccggagacgactactcttataaccaatttagcacgtatggagatgccaatgctgccggggcttactaccaatttaagcgcctccagggcaagcggaatcgtggccgagaagagattaactttgtggaaatcaaaggcgacgaccaactgtccggcgcccagcagtggatgacaaagtcgttaactgaagaaaagacgatgaagagcttctctaagaaaaagggagagcagcctaccggtcagcagagacggaagcaccagatcacatatttgatacaccaggctaaagagcgagaactggaactgaagaacacctggtccgagaataagctgtcacgtaggcagacccaggctaaatacgggttttag

SEQ ID NO: 198653 - DNA, 1404 bp, synthetic construct
  misc_feature 1..1404: note = Description of Artificial Sequence: Synthetic coding sequence
  source 1..1404: mol_type = other DNA
atgctggcccccgccttccccccccccctgctgctgcccccccccaccggcgatccgaggctgcaacctccacctcctctgccttttgggctcggggggtttccgcctcctccgggcgtgtcacctgccgaggccgcaggggtaggggagggcttaggccttggacttcccagtcccagaggcccaggcttgaatctgcctccacctatcgggggtgccgggccgcctctgggtctcccaaagccaaaaaagagaaaggagcccgtgaaaatcgccgccccagaactccataagggcgattctgattccgaggaagatgaaccgacaaagaagaaaaccatccttcagggtagtagcgaagggacaggattgtccgcgctcttaccccagcccaagaatcttacggtaaaggagaccaatcggctactgctgccccatgcgttctcacggaaaccatcagacggttccccagacaccaaaccttccaggctggctagcaagaccaagacctctagtctagcccctgtagtagggaccacaaccactacacctagtccctctgccatcaaagccgccgctaagagcgctgcccttcaggttaccaagcaaataacacaggaggaggacgatagcgacgaggaagtcgcccctgagaatttcttttccctgccagaaaaagccgaacctcctggcgtcgagccttacccatacccgataccaactgtccctgaagaactgccgcccggcactgaaccggagccagctttccaggatgatgcggctaatgctcctcttgaatttaaaatggcagccggttcatctggtgccccctggatgcccaagcctggggatgattatagttataatcaattctcaacttacggcgacgccaacgccgctggggcctactatcaaggcctgcagcagcacctaggccatagcccactgaggggtatcatgcgatttctgaacagcaagagtgggaaaaggacctgctttgtgccatccttcgactactacagcggaggttactacccagcacaagatcctgctctcgtcccgcctcaggagatagcccctgacgccagtttcatcgatgacgaggcctttaagcgactccagggcaagaggaacagggggagagaggagataaatttcgtcgagattaaaggtgacgatcaactcagcggggcacagcagtggatgacaaaaagcctcacggaggaaaagacgatgaagagtttttcaaagaaaaagggggaacagccaaccggtcaacagcggcgcaaacatcagatcacctatctgatccaccaggccaaagaacgggagctcgaactgaagaatacctggtccgagaacaaactcagtcgcaggcaaacccaggccaagtatggcttctag

SEQ ID NO: 198654 - DNA, 3096 bp, synthetic construct
  misc_feature 1..3096: note = Description of Artificial Sequence: Synthetic coding sequence
  source 1..3096: mol_type = other DNA
atgaaggtgaccgtgtgcttcggccggacccgggtggtggtgccctgcggagatgggcatatgaaggtcttttccctcattcaacaagccgttacgaggtacaggaaggcaattgctaaagatccaaattactggatccaggtgcatcgcctggaacacggtgacggcgggatcctggatctggatgacatcctctgcgacgtcgctgacgacaaggaccgtctggttgccgtttttgatgaacaggacccccaccatggtggggacgggacctctgcgtcatcaacagggactcaatcacctgagatcttcggctcagagttaggcaccaacaatgtgagcgctttccaaccctatcaagccacatccgaaattgaggtcacaccaagcgtattgagagcgaacatgcccctgcatgtgaggcgaagtagcgatccggccctcataggactctctacatctgtttcggactcaaacttcagtagcgaggaaccatcccgcaagaatcccaccaggtggtccacaactgctgggttcctaaaacagaatacagccgggtctccgaaaacctgcgatagaaagaaggatgagaattacagatcactccccagggacactagcaattggtccaatcagttccagagagataatgcaaggtcttcgctgagcgccagccaccctatggttgggaagtggcttgaaaagcaggaacaggacgaggacgggacagaggaggataattctagggtcgagcccgtcggccacgccgacacaggactggaacacattccaaatttttcgcttgatgacatggtgaagttggtcgaggtgccgaacgacgggggcccccttggaatccatgttgttccgttcagtgccaggggaggccgcaccctgggcttactggttaagaggctcgaaaaaggcgggaaggctgagcatgagaatctttttcgcgagaacgattgtatagtgaggattaacgacggcgacctgcgtaatcgtcggttcgaacaggctcagcacatgttccggcaagctatgcggacacccattatatggttccacgtcgtgcccgcagccaataaggaacagtacgagcaattgagtcagtcggagaaaaacaactactattcaagccgtttctccccggattcccagtatattgataatcggagcgtcaacagcgctgggctccataccgtccaacgggcacccaggctgaaccacccaccagaacagatcgacagtcatagccgcctgcctcacagcgcccacccaagcggaaagccgcccagcgcacccgcctcagctccacagaatgtgttctctaccacggtcagctctgggtataataccaaaaaaatcggaaagagactgaatattcagctgaagaaggggaccgagggcctgggctttagcataacctcacgggatgtgacgatcggtggctccgccccaatctacgtgaaaaacatcttacctcgtggggccgccattcaggatggccggctgaaagccggagaccgattgatagaggtgaacggggtcgatttggtgggcaagtctcaggaggaggtggtgtcgctcctcaggtcgaccaaaatggagggcaccgtctcactgctggtgtttcggcaggaagatgcattccatccacgggagctcaacgcagaaccgtcccagatgcagatcccaaaggaaacgaaagccgaggatgaagatattgtcctgactcctgatggaactcgggaattcctgacctttgaggtgccgctgaatgacagtggttccgcgggcctaggcgtcagcgtgaagggcaaccgcagcaaggaaaaccacgccgatctgggcatctttgtgaagtcgatcataaatggaggcgctgcaagtaaggacggacggttgcgggttaatgaccagttgatcgccgtcaacggcgaatccttgctgggaaagaccaaccaggatgctatggagacacttcggcgttcaatgtccaccgaggggaataagcgaggcatgatccagttgatagttgctaggcgcatatctaaatgcaacgagcttaaatcacctggctctccgccaggacccgaactgcccatagagacagcactggatgaccgggaacgccgcatttctcatagtctgtacagcgggattgaagggctggacgagtcgcctagcaggaacgcggccctgtccagaataatggggaagtatcaactgagtcctacagtcaacatgccccaggatgataccgttataattgaggatgatagattgcccgttcttccaccccacctgtctgatcagagctcctcctcctctcatgacgatgtgggatttgttaccgctgacgccggtacctgggccaaggccgccatcagcgactcagccgactgttctttgtccccagacgtagatccggtgttggccttccagagggagggattcggccgccagagtatgtctgagaaacgaaccaagcagttctctgacgcatcccagctagatttcgtcaagactagaaaatcaaaatccatggacttggggatagctgacgaaacgaaactaaacaccgttgatgatcagaaagcgggaagtccatctagagacgtcgggccttccctgggtctgaagaagtcatcaagtttagaatccctgcagaccgctgtggcagaggtaacactgaatggtgacatcccatttcacaggccacgaccaaggataatccgaggccgggggtgtaacgagtcttttcgggccgcaatagataaatcttacgataagcccgcagtcgatgacgatgatgaagggatggagactttggaggaagacacggaagagtcctctcggtcgggtagggagagcgtctctacagccagtgaccaacctagccactccctagaaaggcaaatgaatggcaatcaggagaagggtgataaaaccgaccgcaagaaggacaagacaggcaaagagaaaaaaaaagacagagacaaggaaaaagataagatgaaggccaagaaaggaatgctgaaagggctcggtgatatgtttagtctagctaagttaaagcccgaaaagcgctag

SEQ ID NO: 198655 - DNA, 3960 bp, synthetic construct
  misc_feature 1..3960: note = Description of Artificial Sequence: Synthetic coding sequence
  source 1..3960: mol_type = other DNA
atgaaggtgaccgtgtgcttcggccggacccgggtggtggtgccctgcggggacggacacatgaaggtcttttctctgatacagcaagcggttacacggtacaggaaggccatagccaaggatccaaactactggatccaagttcatcgtctggagcacggcgacggtggaatcctcgatctggacgacattctttgtgatgttgccgatgacaaagatcggctagtggccgtgttcgatgagcaggatcctcatcatggaggggatggcactagcgcttcttccacaggcactcagtctcccgagatcttcggaagcgagctgggaacaaacaatgtctctgcgtttcaaccctatcaggcaactagtgagattgaggtgacaccctccgtgttgagggctaacatgcctctgcacgtccggagaagcagtgacccagccttgatcggactgagcacctccgtgtctgactccaatttctccagtgaggagccctcgagaaagaatccgacaagatggtccaccacggctggctttctgaaacagaatacagcaggcagccctaagacttgcgatcggaaaaaggacgagaactatcggagtctccctagggatacctctaattggagcaaccagtttcagcgagacaatgcaaggtccagtttaagcgcatctcacccgatggtaggcaaatggctggagaagcaggaacaggatgaagatgggacagaggaagataattctagggtagagccagtgggacacgccgacactggactggagcatatccctaacttttctttggacgatatggttaaactggttgaggtccctaacgatggcgggcctctcggcatccatgttgtccccttctcggcgaggggtggaaggacgctcggactcctggtcaaaaggctggaaaagggtgggaaggccgaacatgagaatctgttcagagagaatgactgtattgtccgcatcaatgacggggatctgcggaaccgccggttcgaacaggcccaacacatgtttcggcaggctatgcggactcctattatttggtttcatgtggtccctgccgccaacaaagagcagtatgagcagctcagtcagagcgaaaagaacaattattactcctctaggttcagtcccgatagccagtacatcgacaatcgcagtgtcaatagtgccggtctgcatactgttcaaagagccccgcggctgaatcacccacctgagcagatagacagtcactcccgcctgccacactccgcacatccgtcaggcaaaccaccctccgcccctgccagtgcacctcaaaatgtattttccaccacagtcagtagcggttataataccaaaaaaatcgggaagagactgaacattcagctgaagaagggtaccgaagggctgggattctcaattactagccgagatgtcaccatcggtgggagcgcgcctatctatgtgaaaaacatactgccaagaggtgcagctatccaggatgggcgcctcaaggccggcgatagactcatagaggtgaacggcgtcgatctcgtcggtaagagccaggaggaggtggtctctttgctgaggtctacaaaaatggagggaactgtgagtttattagtattcaggcaggaggatgcatttcatccaagagaattgaatgctgagccctcgcaaatgcagattcccaaagaaactaaagcggaggatgaagatattgtgcttacccccgatgggacccgagagtttctcacttttgaagtccccttgaatgatagtggctccgcaggactaggcgtgtccgtgaaaggcaaccgctctaaggagaatcacgccgatctaggaattttcgtcaagagcatcataaatggaggagccgcctctaaagacggaagactgcgagtgaacgaccagctcatagctgttaatggggagagcctgctcggcaagaccaaccaggacgcaatggaaaccctgcggcggtctatgtctactgagggcaacaaaaggggcatgattcaactgattgtggcaaggagaatctccaaatgtaacgaactaaagtcacctgggagtccacccgggcccgaactgcctattgagactgctttagacgaccgagagcggcggatttcgcacagtctgtattctgggattgagggtctggacgaatccccttcccgaaacgctgccctgtccagaatcatgggagagtccgggaagtaccaactgtctccaaccgttaacatgccacaagacgataccgtgattatcgaagacgataggctgccggtcctccccccacacttgtctgatcagtccagctcctccagtcatgacgatgtaggcttcgtcacagctgacgccggcacatgggccaaggccgcaatatccgactcagccgattgctctctgagccctgatgtcgaccccgtcttggcctttcagcgggaagggttcggacgccaatctatgtccgagaaaaggacaaagcagtttagcgatgcgagccagctcgactttgtcaagacccggaaatctaagtctatggacctgggcatagcagatgagaccaagttgaacactgtagacgaccagaaagctggttccccatcccgggatgttggaccatcgcttggtctcaagaaatcatcaagcttagaatctctccagacagcagtcgccgaggttaccctgaacggagacatcccctttcaccgaccgcggccaagaatcataaggggccggggttgtaacgagagctttcgtgcagcaatcgacaagtcttatgacaagcctgccgtggacgacgatgatgagggtatggagacactcgaggaggataccgaagagagcagcagatcagggcgcgagtcggtctcaactgcctctgatcagccatcccatagtttggaaaggcagatgaatgggaaccaggagaagggagacaaaacagatcggaagaaagataaaacaggaaaggaaaaaaaaaaagatcgggataaggaaaaagacaagatgaaggccaaaaaaggaatgctgaagggtctcggcgacatgtttaggatacaggccaagactcgcgaattcagggagcgccaggccagggaaagggattatgcagagattcaggacttccatcggacctttggctgtgatgacgaactaatgtatggaggggttagctcttacgagggttctatggcccttaatgcccgccctcagagcccacgcgaaggccacatgatggatgccctgtacgctcaagtaaagaaaccaagaaactccaaaccctcaccggtagatagtaaccgctcaacaccatccaatcacgacagaatacaacgattgaggcaggagtttcaacaggccaagcaagatgaggacgtggaggatcgcagacgaacctattcattcgagcagccctggcctaatgccagacccgccacccagtccggtagacacagtgtgagcgttgaagtgcagatgcagaggcagcggcaggaagaacgcgagagcagccagcaggctcagaggcagtattcttccctccctcgccaaagtagaaaaaacgccagctccgtgtctcaggattcttgggagcagaactattcccccggcgaaggctttcagtccgccaaggaaaacccccgctattcaagctatcaaggcagtaggaacgggtacctcgggggtcatggctttaatgcgagagtgatgctcgaaacccaggagctcctcagacaagagcagcgacgaaaggaacagcagatgaaaaaacagccaccctctgagggtccttctaattacgacagttataaaaaagtacaagaccctagctatgcgccacctaaagggcccttccgccaagatgtgccaccttccccttcccaagtcgcccggctgaaccggcttcagactccagaaaaggggagaccattctattcatag

SEQ ID NO: 198656 - DNA, 3933 bp, synthetic construct
  misc_feature 1..3933: note = Description of Artificial Sequence: Synthetic coding sequence
  source 1..3933: mol_type = other DNA
atgaaggtgaccgtgtgcttcggccggacccgggtggtggtgccctgcggggacggacacatgaaggtgttcagtttaatccaacaggctgtgaccagataccgcaaggccatcgctaaggatcctaattactggatacaggtgcacaggctcgaacacggagatggcgggatactcgacctggacgacatcctatgtgacgtggctgacgacaaggatcggctggtggcggtgttcgacgaacaggaccctcatcacgggggcgatggcaccagcgcctcctccaccggtactcagagcccggagattttcggatcggagctgggaaccaataacgtttctgcgttccagccttatcaagcaaccagtgagattgaagtgaccccctctgtgttgagagctaacatgccattgcacgtaagacggagttctgacccagccctgattggcctcagtacctccgtttcagattcaaatttctcgtcagaggaaccctcaaggaagaacccaactcgctggagcaccacggccggattccttaaacagaataccgccggctccccaaagacttgtgatcggaagaaggatgaaaactaccgttccctccccagagacacatccaattggtctaaccaattccagagggacaacgcccgcagtagcttatccgccagccaccctatggtcggcaagtggttggaaaagcaagagcaggacgaggacggaactgaggaagacaattcgcgggtcgaaccggtgggccacgctgataccggactggagcatatcccaaatttctcactcgacgatatggtcaagctcgttgaagtgccgaatgacgggggtccattggggattcacgttgtaccattctcagctaggggcggacgtaccctcggacttctcgtgaaacgcctggagaagggcggcaaggctgaacatgaaaacctgtttcgagagaacgactgtatcgtgaggatcaatgatggcgacttacgtaaccggcgctttgaacaggcccaacacatgttcaggcaggccatgagaaccccaattatctggtttcatgtcgtgccagccgccaataaagagcagtacgaacaactgtcgcagagcgagaagaacaattactacagtagccgcttttcaccagacagccagtacattgataacagatctgttaattccgccggcctgcatacagtgcagcgcgcgcctcgactcaatcacccaccggaacaaatagactcccatagtagattaccacacagtgcccacccctctgggaaacctccctccgctcccgcatctgcacctcaaaatgtcttctccacaactgtgtcgtctgggtacaacacgaaaaagatagggaagagactgaacatccagctgaagaaaggcaccgagggccttgggttctcaataacaagtagggatgtgacaataggcggaagcgcacccatttatgtcaagaatatattgccccgaggcgccgccatccaagatgggcgtctgaaggccggggataggctgatcgaagtgaatggtgtggacctagtcggaaaaagccaggaagaggtagtgagcctactgaggagcacaaaaatggaaggcactgtcagtctcctggtgtttcgccaggaggatgcttttcaccccagagaacttaaagccgaggacgaagatatcgttcttaccccagacgggacccgggaattcctgaccttcgaggttccccttaacgatagtgggtccgccgggctgggtgtctctgttaaaggcaatcgttccaaagagaatcacgcggatctcggcattttcgttaaaagtatcattaacgggggggccgcttccaaggacgggcgattaagggtgaatgaccagttgatcgcagtgaacggcgagtctcttctcggaaagactaaccaggacgctatggaaacgctgcgacgttccatgtcgaccgagggtaacaaacgagggatgattcagctaatagtggctcgcagaatttccaaatgcaatgaactgaaatccccaggctcacccccaggacctgaactgccaattgagaccgctttggatgaccgcgagcgccgcatcagccattctctctatagtggaatcgaggggttggatgagagcccttcaagaaacgcagcactctctcgtatcatggggaagtatcagctctctcccactgtgaacatgccacaggatgataccgtaattattgaggatgatcggctgcccgttctgcccccacacctgtccgatcagtcctcttcctcaagccacgatgacgtaggcttcgtaacagctgacgccgggacatgggctaaggcagctatatcagacagtgcagactgcagcctttcgccagatgtagaccccgtgctagcttttcagcgtgagggattcggccgccagattgccgacgaaactaaattaaacactgtggacgaccagaaggctggatcaccttctagagatgttggtccgagccttggcttgaagaagagctctagtttggaatccctgcagaccgcggtagctgaggtgactctcaacggagatattccatttcaccgaccccgcccgagaatcatcagaggtcggggctgtaatgagtcctttagagccgctattgataaatcttatgacaagccagccgtagacgatgatgacgaaggcatggaaactctggaagaagatacggaagaatcgtcaagatcaggcagggagagcgtgtctacagcctcggaccaaccctcccacagtctggaaaggcaaatgaacgggaaccaggagaaaggtgataaaaccgaccgaaagaaggacaagaccggaaaagagaagaaaaaagatcgtgacaaggagaaagataaaatgaaagctaagaaggggatgttgaaggggctcggagacatgttccgcttcggcaaacatcgaaaggatgataaaatcgagaagaccggaaagatcaaaatccaggaaagttttacttccgaggaagaaaggattcgcatgaagcaagaacaagaaagaatccaggcgaagacacgagaattccgggagaggcaggcccgggaaagagactatgccgagatccaggatttccataggacattcggatgcgacgatgaactgatgtatggcggcgtatctagctacgaaggaagcatggccctgaatgcacgcccacaatcaccccgagaagggcatatgatggatgcgctttacgcgcaggtgaagaagccccggaactccaaacctagtccggtggatagtaatcggtccaccccaagtaaccatgatcggattcaacggctgagacaggaatttcagcaggcaaagcaggacgaagacgttgaagacagaaggagaacctactcatttgaacagccctggccaaacgcacgacccgctacacaatctggacgacactccgttagcgtagaagtacagatgcagaggcaacgacaggaggagcgagagtcaagtcagcaggctcagcgacagtacagcagtctcccacggcagagccggaagaacgcctcctctgtatcacaggactcttgggaacagaattactcccctggggagggctttcagtccgcgaaagaaaatcctaggtactcttcgtatcaaggttccaggaacggctatctcggcgggcatggatttaacgctagagtcatgctggaaactcaggaactacttagacaggagcaacgccgaaaggaacaacagatgaaaaagcagccgccctcagagggaccaagcaattacgactcctacaagaaagttcaggaccctagctatgctccccctaagggcccctttcgccaggacgtgcctccatctccctcacaggtcgcccgactgaatcgattgcagactccggaaaaagggagacccttctatagctag

SEQ ID NO: 198657 - DNA, 540 bp, synthetic construct
  misc_feature 1..540: note = Description of Artificial Sequence: Synthetic coding sequence
  source 1..540: mol_type = other DNA
atgcagatccccaaggagaccaaggccgaggacgaggacatcgtgctcactccagatggcactcgggagttcttgaccttcgaagttccactcaacgactccggcagcgcaggcctgggagtctctgtcaaaggcaacaggtctaaggagaatcacgcagatctgggaatctttgtaaagagtatcattaacggcggggcagccagcaaggatggccgcctccgggtgaatgatcagctcattgctgttaacggcgaatcgctactagggaaaactaatcaggatgctatggaaacgctccggcgctcaatgagtactgaaggaaataaacgaggaatgattcagctaattgtggcccggagaatttctaagtgtaatgagctgaaatcaccaggatcccccccaggccccgagctgccgatcgaaacagccctggatgacagggaacgaagaatctcacacagtctctacagcggaatcgaagggctggatgagagtccaagtaggaatgctgccctgtctcgtataatggggacttag

SEQ ID NO: 198658 - DNA, 3006 bp, synthetic construct
  misc_feature 1..3006: note = Description of Artificial Sequence: Synthetic coding sequence
  source 1..3006: mol_type = other DNA
atgaaggtgaccgtgtgcttcggccggacccgggtggtggtgccctgtggcgacggtcacatgaaggtcttcagcctcatccagcaggccgtgacccggtaccggaaggcaatagccaaggatccaaattattggatacaagtgcaccggctggagcatggggatggaggtatcctggatcttgatgacattctctgtgacgtagcagatgacaaggaccgcctggtggcggtctttgacgaacaggaccctcatcacggcggcgacggcaccagcgccagctcaactggaacccagtcccctgaaatatttgggtcagaactcggcacaaataatgtctccgcatttcaaccctaccaggcaacaagcgaaattgaagtgactccatctgtcctgcgggccaacatgcctctgcatgtccgccgaagctctgacccagccctgattgggttgagtaccagcgtatccgacagtaatttttcatccgaagaaccttccagaaaaaatcctacaagatggtcgaccaccgctggcttcctgaagcagaacaccgccgggtcacccaaaacttgtgatcgaaagaaagatgagaactatcggtccctgccccgtgacacctctaattggtccaatcagtttcagcgggacaacgctcgctccagtctgtcagcttcccatcccatggtagggaaatggttggaaaagcaggagcaggatgaggatgggacagaggaagataattcacgggttgagccagtgggccacgcagataccggactggaacacataccaaacttttctctggatgatatggtcaaactggttgaagtgccgaatgacggcggtcctctcggcatccatgtagtgcctttcagtgcccgagggggccgcaccctcggacttctggtgaaaagactcgaaaagggaggcaaagctgaacacgaaaacttatttagggagaacgattgtattgtccgaattaacgacggggacttgcggaaccggcgttttgaacaagcccaacatatgtttaggcaggctatgagaacacctatcatttggttccatgtggtccccgctgcgaacaaggagcagtacgaacagttgtcccaatctgagaagaataattattacagctctagattttctcctgactcccagtacatcgataatcgatcagtaaactctgcaggactgcataccgtccaacgcgcacccagactaaatcacccccccgaacaaatcgactctcacagcaggctcccccattcagctcacccaagcggaaagcccccaagcgcaccagctagcgccccacaaaatgtcttttcgaccaccgtgtcctctgggtacaacacgaagaaaatcggtaagcgactcaacatacagcttaagaagggtacagagggcctcggattctctattactagtcgagatgtaaccattggtgggagtgctccaatttatgtgaagaatatattacctagaggagcagcaatacaggacggaagactaaaggctggcgatagactgatcgaggtcaatggagttgatctggtagggaaatcacaggaagaagtagtctccctattgcgcagcacgaaaatggaagggacagtttctctgctcgttttccggcaggaagatgcattccatcccagggaattgaatgctgaaccttcccaaatgcaaattccgaaagagacaaaggctgaagatgaagacatagtgctcacccctgatggtacacgggagtttctgacctttgaagtgcccctgaatgattctgggtcagccggcctgggcgtgtcagtaaaggggaatcggtcaaaagaaaaccacgccgacttgggtatctttgttaaatccatcatcaacggcggcgctgcctcaaaagacggccgactgcgcgtgaatgaccagttaatagcggtaaacggagagtcccttctcggcaaaactaaccaggatgcaatggagaccctgaggcggagtatgagcacagagggaaacaaacgcggcatgattcagctcattgttgcaaggcgcattagcaagtgcaatgaactaaaaagccccggctcaccccccggacctgagctgcctatcgaaacagccctcgacgacagagagcgccggatttcacattcgctctattccgggatagaaggcctggacgaatcaccatctcggaatgccgcactcagccgaatcatggggaagtaccaactaagtccaactgtcaatatgccccaagacgacaccgtaattatcgaggacgaccggctgcccgttttacctccacatctttcggaccagtccagtagttcatcacatgatgacgtaggctttgtcactgccgatgcggggacctgggcaaaggcagcaatatctgactctgcagactgctctctctccccagatgtggatccggtgctggccttccagcgggagggtttcgggagacagattgccgacgagaccaaactaaacactgtggatgatcaaaaggctggatccccatccagagatgttgggccgtccctaggactgaagaagagttcttctctcgaatcactacagacagccgtggcagaggttaccctcaatggagatatccctttccacaggccccggcccaggatcatacgtgggagaggatgtaatgaatccttccgcgcagcaattgacaagtcatatgacaaacctgctgtcgatgacgatgatgagggcatggagaccttggaggaggacacagaagagtcttctagatcgggtcgcgagagtgtgtctacagcctccgaccagccctctcacagcttggagagacagatgaacgggaaccaggagaaaggcgataaaaccgatcggaaaaaagataagaccggaaaagagaagaagaaagaccgggacaaggagaaggataaaatgaaggccaagaaaggcatgctgaaaggtctaggggatatgttctctctcgctaagctgaagcctgaaaaacggtag

SEQ ID NO: 198659 - DNA, 2967 bp, synthetic construct
  misc_feature 1..2967: note = Description of Artificial Sequence: Synthetic coding sequence
  source 1..2967: mol_type = other DNA
atgaaggtgaccgtgtgcttcggccggacccgggtggtggtgccctgtggagacgggcacatgaaggtgttcagcctgatccagcaggcggtcacgaggtacagaaaggcaattgccaaggaccctaactactggattcaggtccaccgcctcgagcacggcgacggtggaatccttgatctggacgacattctctgcgacgttgccgacgataaagaccgtctggtggctgtgttcgacgagcaggatcctcatcatggtggagacggcacttcagcaagcagtaccggtacccagtcccctgagatcttcggatctgaactgggcaccaataacgtttcagcgttccaaccttaccaggccacttccgagatagaagtcaccccatcggtcctgagggctaatatgcctctgcatgtgcgcaggtcgagcgaccctgcacttatcggcttgtcaacctcagtgagcgacagcaatttcagttccgaagagccctcccggaagaaccccacgaggtggtccacgacagccggcttcctgaagcaaaacaccgctggttctccgaagacttgcgacagaaaaaaggacgagaattaccgttcccttccacgcgatacttctaattggagcaaccagtttcaacgcgataatgctcgctcttcactctctgcttcccacccgatggtgggcaaatggctggaaaaacaggagcaggacgaagacgggacggaagaggataacagccgggttgaacccgtgggccatgctgataccggactggagcatataccgaatttcagcctcgacgacatggtgaaactcgtggaggttccaaatgacggcggccccctcggaatccatgtggttccatttagcgcccggggtggcagaactcttggcctccttgtgaagaggctcgagaaaggggggaaagccgagcatgagaatctgtttcgcgagaacgattgcatagtgcggatcaatgatggcgacctgcggaacaggcgtttcgagcaggcccagcacatgtttcggcaggccatgcgcaccccaattatatggttccacgtggtgccagccgccaataaggaacaatatgagcagctttcacagagcgagaagaataattattatagtagtcggttctcccccgactcgcaatacattgacaacaggtccgtcaacagtgccggcctgcacacagtgcagagagccccccgattaaatcatccccccgaacagatcgactcccactctaggctgcctcactccgcccatcccagcggaaagccgccaagcgcacctgcctccgctccacagaacgtcttctcgactactgtgtcaagtggctataataccaaaaagattggcaaacgtctaaacatccagttgaagaagggcacagagggtctggggttcagcattacgtcacgggacgtcacaatcggcggaagcgcgccaatctatgtgaagaacattttgccccggggggccgctatccaggatgggaggctgaaggcaggggatcgactgatcgaagtgaatggggtggatctcgtcggcaaatctcaggaggaggtggtttccctgcttagatctacaaaaatggaggggactgtgtcactgttagtgtttaggcaggaagatgccttccacccccgagaactgaaggccgaagatgaggacattgtcctcacacctgacggcacccgggagttcctcactttcgaagtgccactaaacgatagcggcagcgcggggctgggtgtgtccgtgaaaggaaatagaagcaaagagaaccacgcagacttgggaatcttcgtaaagtcgattatcaacggcggggccgcctccaaggatggaaggctccgggttaatgatcagcttatcgcggttaatggagagtcactgttaggtaaaacgaatcaggacgccatggaaacactgagaagaagcatgtcaaccgaaggcaacaaaaggggaatgatccagctcattgtcgcccggcggatttcaaagtgtaacgagcttaagtctcctggcagccctcctggtcccgaactgcccattgagaccgctttagacgaccgggaacgtaggatctcacacagcctgtacagtggaatagaaggtctcgatgaatcaccctcccgaaatgctgcactgtccagaattatgggtaagtaccagctcagtccaaccgttaacatgccccaagacgacactgtaatcattgaggacgataggttacccgtgctgcctcctcatctgtcagatcagtctagcagtagctctcatgatgacgtcggcttcgtcaccgccgacgccggtacatgggccaaagccgcaatctcagacagtgctgactgctcactttctccagacgtggatccagttctggcgtttcagagagaaggatttggcagacagatagccgacgaaaccaaacttaatacagtggatgatcagaaggccgggtcgccatcccgagacgtagggccatccttggggctaaaaaagtccagctctctggagtccctacagaccgccgtggcagaggtgaccctaaatggcgacattcctttccaccgcccacgccccagaattatcaggggcaggggctgcaacgagtcttttagggccgccatcgacaagagttatgacaagcctgccgtagatgacgatgatgaggggatggaaacactagaggaggacactgaggagtcgtctaggagcgggcgggagtcagtttccaccgcaagcgatcagcctagccatagcttggagcgacagatgaatggcaaccaggaaaaaggagataagaccgatcgcaaaaaagataagactggtaaagaaaaaaagaaggacagggataaggagaaagacaagatgaaggccaagaagggcatgctcaaagggctgggtgacatgttttcattggccaagctgaagccagagaagagatag

SEQ ID NO: 198660 - DNA, 4062 bp, synthetic construct
  misc_feature 1..4062: note = Description of Artificial Sequence: Synthetic coding sequence
  source 1..4062: mol_type = other DNA
atgaaggtgaccgtgtgcttcggccggacccgggtggtggtgccctgtggcgacggtcatatgaaggttttctccttgatacaacaggctgtgacaaggtaccggaaagccatagctaaggacccaaattattggatccaggtgcatcgcctcgaacatggagacgggggtattctggaccttgatgacatcctttgtgatgtcgctgacgataaggatcgccttgtggcagtgttcgacgaacaggatcctcatcatggaggtgacgggacctctgcctcttcgacaggcacacagtcacccgagatcttcggctccgagctagggacgaacaatgttagcgcctttcaaccttatcaggccacctcagaaatcgaggttaccccctcagtgctacgcgcaaatatgccacttcacgtgaggcgcagctctgaccccgcactgattggcttaagcacctccgtgtctgactccaatttcagtagtgaagagcctagccggaagaacccgactagatggtccaccaccgctggctttcttaaacagaatacagccggctccccaaagacatgtgaccgaaagaaggatgaaaactataggtcattaccccgggatacatcaaattggagcaatcagtttcagcgagacaacgcgcgctcgagcttaagcgccagccaccccatggttggaaaatggctggagaaacaagagcaggacgaagacggcaccgaagaagataactctagggtcgaaccggtcggccatgcagatacgggccttgagcacatccctaattttagcctggacgacatggtcaagctggtggaggtccccaacgatggcggtccgctgggtattcacgtcgtgcctttctcagcacgcggtggacgcacattaggtctattagtaaaaagactagagaaggggggtaaagcggagcatgagaacctttttcgggaaaacgattgcatcgttagaattaatgatggtgatttacggaaccggaggtttgagcaggcgcagcacatgttcagacaggcgatgcgtactcccattatctggttccatgtcgtgcctgcagcaaataaggaacagtacgagcagctctctcaatcagaaaagaacaattactactccagtcgattcagtcccgattcacagtatatcgataacagatccgttaattccgccggtcttcataccgttcaacgtgcacctaggttgaaccacccccccgaacagatcgactcccactcccgacttcctcattcagcccaccctagcggtaaacctccctctgccccagccagtgcccctcagaacgtgttcagtacaactgtctcatcaggctataacacaaagaagatagggaagcggttaaacatccaactaaagaagggtaccgagggcctagggttttccatcacatcccgggacgtaactatcggaggctcagctcctatttacgttaagaatattttgcccagaggcgccgcaattcaggacggccgactgaaggcaggggacagactgatagaagtaaacggtgtggacctggtcggcaaaagtcaggaagaggtggtgagccttctcagaagcactaagatggaaggaaccgtatctcttctcgtctttagacaagaagacgcattccaccctagggaactgaatgctgaacctagccagatgcagatccctaaggaaacgaaggcagaggacgaggacatagtgctgacccccgatggcacccgcgagttcctgactttcgaagtaccactaaatgactctggatcagcggggctgggcgtctccgttaaaggtaatcgctcgaaagagaatcacgcggaccttggcatctttgtcaagtctatcatcaacggtggggccgccagcaaggacggcagattgagagttaatgaccagctgatcgccgtcaacggagaatcactgctgggcaagacaaaccaggacgcaatggagaccctgcgaagatctatgtctaccgaagggaataagcgcggcatgattcagctcatagtggcaaggaggatatcaaagtgtaatgagctgaaatcccctggcagtccaccagggccagaactgcccatcgaaactgctctcgacgacagagagaggaggatcagccacagtctctactccggcatcgagggattggacgaatccccttctcgaaacgcggctttgagccgcatcatgggcaagtatcaactgagccccacagtcaacatgcctcaagatgatacagtcatcatagaagacgatcggttacctgttctgcctcctcatctttccgatcaaagtagttcaagttctcatgatgatgtcggcttcgtgaccgccgatgccggcacctgggccaaagctgccatcagtgatagtgcagactgctctctcagccctgacgtggaccccgtcctagctttccagcgggaagggtttggccgccagagcatgtcagagaagcgaactaaacagttcagtgacgccagccagctagacttcgtgaaaactcggaagtcaaagagcatggatctagggatagctgatgaaactaaactgaacactgtcgacgatcagaaggctgggagcccctcaagagacgtgggaccgtccctgggtctaaaaaaatcttcctcccttgagtcgcttcagaccgccgtcgcagaagtgactcttaatggtgatattccttttcatcgccctagaccacgcatcatccgagggaggggatgcaacgaaagttttcgtgcagcaattgacaagtcctacgacaaacccgccgtagatgatgacgatgaggggatggagacattggaagaggatacagaggaatctagtagaagcgggcgcgaatcagtatcgaccgcaagtgaccagccttctcactcactcgaacgccagatgaacggcaaccaggaaaaaggggacaagacagacaggaaaaaggacaaaacgggcaaggagaagaagaaggacagagacaaagagaaggataagatgaaggccaagaagggcatgctgaaaggactgggggacatgtttcggtttgggaagcacaggaaagacgataaaattgagaagactggaaagatcaagatccaggaaagcttcacaagtgaggaagagcgaatcaggatgaagcaggagcaggagaggatccaagccaaaacgagagagttccgagagaggcaggcacgagaaagggattacgcagagattcaggacttccatcggaccttcggctgcgacgacgagttaatgtacggaggagtctcttcctatgagggctcaatggccctgaatgcaaggccccagtctccccgcgagggacacatgatggatgccctgtacgcccaggttaagaagccacgtaacagcaagccatcccccgttgacagtaatcggtctacacctagtaaccacgaccggatacagcgcttgcggcaggaattccagcaggccaagcaagacgaggacgtcgaggaccggcggagaacttactctttcgagcaaccttggcccaatgctaggcctgcgacccaatctggcaggcacagcgtgagcgtggaggtgcagatgcaaaggcagaggcaggaagagcgggaaagcagccaacaggcccagagacagtatagctcactgccaagacagtcccggaagaacgccagctctgtctctcaagatagttgggagcagaactattcacctggggagggttttcagagtgccaaagaaaatcccagatactcatcctaccagggctctcggaatggttatctgggagggcatgggtttaacgctcgggtcatgctggagacccaggaattattgaggcaagagcaacgaagaaaagagcagcagatgaagaaacagcccccttctgagggcccgtccaactacgacagctacaagaaagtgcaagatccttcatatgccccccctaaaggccccttccggcaggatgtaccgcccagcccatcccaagtagccagactgaatagactgcaaacgccagaaaaagggagacctttctactcttag

SEQ ID NO: 198661 - DNA, 4071 bp, synthetic construct
  misc_feature 1..4071: note = Description of Artificial Sequence: Synthetic coding sequence
  source 1..4071: mol_type = other DNA
atgaaggtgaccgtgtgcttcggccggacccgggtggtggtgccctgcggggatggccatatgaaagtgttttcacttatccagcaggctgttacaaggtatcggaaagccatcgcaaaggaccctaactattggattcaggtgcacaggctggagcacggcgatggcggcatcctcgatctcgacgatattctctgtgacgtcgccgacgataaagatcgcctcgtcgccgtcttcgatgaacaggacccccaccacgggggagatggaacctccgcaagttccacaggaacccagagccccgagatctttggaagtgaacttggaacaaacaacgtgtccgcttttcagccgtatcaggctacaagcgaaattgaggttaccccttctgtattgagggcaaatatgcctctacatgtccgccgctcatctgatccggctttaatcggtctgtcaaccagtgtgagcgattctaacttttcttcagaggagccatcacggaaaaacccaacgagatggagtactacagcagggtttcttaagcagaatacagccggaagcccgaagacgtgtgataggaagaaggatgaaaattaccggtcgctgccaagagatacttctaattggtcgaaccagtttcaacgcgacaacgctcgctcaagcctgtccgcttctcatcctatggtgggcaagtggctggagaagcaagagcaggacgaggatggaaccgaggaagataactcccgagtagagcccgtgggccacgcggacaccggtctggaacacatccctaacttcagcttggacgacatggtgaagttggtggaggttcccaatgacgggggcccgctgggaatccatgttgtgcctttttcggctaggggtggaaggacattaggcctgctggtcaagaggctggagaagggtggcaaagccgaacacgaaaatttattccgggagaatgactgcatcgtgagaataaacgatggggaccttagaaatcggcgattcgagcaggcccagcacatgtttcggcaggccatgcgcacccctatcatttggttccacgttgttcccgccgcaaataaggaacagtacgaacagctgtctcagtctgaaaaaaacaattactactctagtaggttttcgcctgattctcagtacatcgacaacaggagtgtgaacagtgcgggcctgcatacagtgcaacgagccccaaggcttaaccaccctccagagcagatagatagccattcacgcttgccccattctgcccacccatcaggtaaaccaccatctgctcctgcttccgccccacagaatgtcttctcaacaaccgttagttctggatataacactaaaaaaatcggcaagagacttaatattcagctgaagaagggaaccgagggcctgggtttcagtattacttcgcgtgacgtgaccatcgggggctccgcacccatctacgtgaaaaatattctgccgcgcggcgctgccattcaagatggtaggctgaaagcgggggatcggttgatcgaggtgaacggagttgacctggtaggtaagagccaggaagaagtagtgtccctcctccggtctacgaagatggaaggcactgtcagcctcctggtgtttaggcaggaagatgccttccaccctcgagagcttaacgcagagccgtcccagatgcagatccccaaagaaaccaaagctgaagatgaggatattgtgttgacaccagatggaacgagggaattcttaacattcgaggtgccccttaatgactccggctcagcaggccttggggtgtcagtgaagggaaataggtctaaagaaaatcacgctgatctgggaattttcgttaagagtatcatcaacggcggagctgcctcaaaagacggcaggctccgcgtgaatgaccagctgatagctgttaacggcgagagtttactcggaaagacgaatcaggatgcaatggagacgctgcgtagatctatgtcaacagaaggcaataagcggggaatgattcagctcatagttgctcgacggatcagcaagtgcaacgaattaaaatctccaggctcaccacctggaccagaattacctattgaaacggctttggatgaccgagaacggcgcatcagtcactctctgtacagcggaattgagggccttgacgaaagccccagcagaaatgctgccctgtcacggatcatgggggagtctgggaagtaccagctgagccctacagtgaacatgcctcaggacgacactgttataattgaggacgacagactaccagtactccccccccacctcagcgatcagagtagcagcagttcgcatgatgatgtaggcttcgtcactgccgatgcagggacttgggcaaaggcagcgatcagtgactccgccgactgcagcctcagccctgatgttgatcctgtacttgcgtttcagcgagaaggctttggccgccagtccatgtccgagaagcgcacaaagcagtttagcgatgcgagtcagttggatttcgtcaaaacgcgtaagtccaaaagtatggatttgggaattgctgatgaaaccaaactaaacaccgtggatgaccagaaggctggatccccttctcgcgacgttggtccttctctcggactaaaaaaatcctcatccctagaatctctgcagacagctgtcgccgaggttactctcaacggtgacatccccttccatcgcccccgaccacggatcatacggggaagaggttgcaacgagtctttccgagcagccatcgacaaatcttacgataagcccgctgtcgatgatgatgacgagggaatggaaaccttagaggaagatacagaggagagctcccgttccggccgcgagagtgtaagtaccgccagtgatcaaccctcccacagtttggagcgccaaatgaatggaaatcaggagaagggtgacaaaaccgatcgaaaaaaagataagactggcaaggaaaaaaagaaggatagagacaaggagaaagacaagatgaaagcaaagaaagggatgttaaaaggccttggtgacatgttcaggttcggaaaacataggaaggatgataaaatcgagaaaacaggcaagataaagattcaggagagcttcacaagtgaagaggaaagaatccgcatgaaacaggagcaggagcggattcaggccaagacaagagaatttagagagcggcaggctagggagcgagattacgctgagatacaggattttcaccgcacttttggctgcgatgacgagctgatgtatggaggtgtgagcagctatgagggcagtatggccttgaacgctagaccccaatcccctcgggagggacacatgatggatgccctgtatgctcaggtaaagaagccacggaacagcaaaccgagcccagtggactctaacaggtccaccccatctaaccacgaccgaatacagcgacttcggcaagagttccagcaggcaaagcaagatgaggacgtcgaagatagacgcagaacatactcttttgagcagccatggccgaatgcccggcctgctacccagtccggccggcatagtgtatctgtggaggtgcagatgcagcgccagagacaagaggaacgcgagagctcacaacaggcccaacgccaatactctagcctgccccggcagtcacggaaaaacgcgtcttcagtgagccaggacagttgggagcagaactacagccccggcgaggggttccagtctgccaaggaaaaccctcgctacagctcttaccagggctctagaaacggctaccttggaggtcacgggtttaatgcacgcgtgatgctggaaacccaggagcttttgcggcaggaacaaagacggaaggagcagcagatgaaaaagcagccacctagcgagggccctagcaactacgatagctataaaaaagtccaggacccatcatatgcccccccaaaaggtcccttccgccaagatgtcccgccgtccccgagtcaggtggcccgtctaaacaggttgcagacacctgaaaaaggcagacccttctattcttag

SEQ ID NO: 198662 - DNA, 3891 bp, synthetic construct
  misc_feature 1..3891: note = Description of Artificial Sequence: Synthetic coding sequence
  source 1..3891: mol_type = other DNA
atgaaggtgaccgtgtgcttcggccggacccgggtggtggtgccctgcggagatggacatatgaaggtgttctcactcatccagcaggccgtgactcggtaccgtaaggctatagcaaaggatcctaactattggatccaggtgcacagactcgaacacggggatgggggcatcttggacctggacgatatcctttgcgacgtggccgacgataaggaccgccttgtggcagtcttcgacgaacaggacccacaccatggaggcgatggaacctccgctagctcgactggtacacagagtccggagatattcggttcagagctggggacaaacaacgtgagtgcgtttcaaccctatcaggcgacctccgagatcgaggtgactccttcggtgctgcgggccaatatgcccttacacgtccggagaagtagtgatcctgcgttgataggcttgtccactagcgtgagtgacagcaattttagctccgaggaaccttctcggaagaaccctacaagatggagcaccacagctggtttcctgaagcagaacacggcgggctcaccaaagacatgcgacagaaaggacgaagacggaacggaggaagacaattcccgcgttgagccagttgggcacgccgacactggactggagcacattcctaattttagtcttgatgatatggtgaagctcgtggaagtgccaaacgatggcgggcctttaggaatccatgtggtgccttttagtgctcgcgggggccggaccttaggcctgttggtgaagaggcttgagaaaggcggaaaggccgagcacgagaatctctttcgagaaaacgactgcatagtccgcatcaacgacggtgatctccgcaaccgacggtttgagcaggcccagcacatgttcaggcaagctatgcgaacacccataatatggttccatgtcgtgccagcagccaataaagagcagtatgagcagttgtcgcaaagtgaaaaaaacaactactattcctcccgtttttctccagactcccaatatatcgacaatcggtctgtgaatagtgcaggattacacaccgtgcagagagcccccaggctcaaccacccaccagagcagatcgatagccattctaggctcccccactcagcccatcccagcggcaaaccccccagcgcccccgcatcagctccccagaatgtgttctcaactacggtttcttccggctacaataccaagaagattggaaagcgattaaacattcagcttaaaaaggggactgaagggcttggtttttctatcacttctcgggacgtaaccattggaggctcagctccgatctatgtgaagaatatcttaccacgtggggcagcgatccaggatggcagactgaaggccggggatcggctcattgaagtcaatggggtagatttggttggaaaaagccaagaggaggtggtctcactgctccgctccacgaagatggagggaactgtaagtcttctggtgttccgacaagaggatgccttccaccctcgtgaactgaaagctgaagacgaagacattgttctgactccggacggcacccgcgagtttttgacatttgaggtgcccttaaatgattctggcagtgctgggctgggagtgagcgtgaaaggaaaccggtctaaggaaaaccacgctgatctggggatctttgttaagagcatcattaacggaggagccgctagcaaagatggcagactccgggtaaatgaccagttgatcgctgtgaatggggagtccctccttgggaagacaaaccaggatgccatggagactctccgaagaagcatgagcactgagggcaacaagcgggggatgattcagctgatagtcgcccgtaggattagtaagtgtaatgagctaaagagcccagggtcccctcccgggcccgaactccctatcgaaacagctcttgacgatcgggaacgtagaatctcccacagcctctactccgggatagagggtctggatgaatctccaagcagaaatgctgctctatctagaattatgggcaaatatcagctctctccgacagtgaacatgcctcaggatgatacagtaatcatagaggacgacaggttgccagtgttgcccccacacctttcagaccaatcctccagctcttcccacgacgacgtcggatttgtgaccgccgatgccggtacctgggccaaagccgcaatctcagacagcgccgactgttctctgtcgccagatgtggatcccgtcctggcctttcaacgggagggctttgggaggcagtcaatgagtgaaaaaaggacaaaacagtttagtgatgccagccaattagacttcgtgaagactagaaaaagcaaaagcatggacctgggcatcgccgatgaaacaaaactaaataccgtcgacgaccaaaaagccggctcacccagccgggatgttggcccgagcctgggattgaagaagagttccagtcttgagagcttgcagacagcagtggctgaggtcaccctgaacggtgacattccatttcataggcctcgtccccggattatccgaggcaggggttgcaatgaaagcttccgagcagccattgacaaatcatacgacaagcccgctgtcgacgatgatgacgaaggcatggagactcttgaggaggacactgaggaaagtagcagatccggacgagagtctgtgtcaaccgcatcagaccagccgtcgcacagcctcgagcgccaaatgaacggcaatcaggagaagggtgacaagaccgatagaaaaaaggataaaaccggaaaggagaaaaagaaagatagggacaaagagaaggacaagatgaaggctaagaaggggatgcttaaaggactgggtgacatgttccgattcgggaagcaccggaaggatgataaaatcgagaaaactggcaaaattaagattcaggaaagttttacatccgaggaggagcggataaggatgaagcaggaacaggaaaggattcaggccaagacacgtgagtttcgcgaacggcaggcgagggagcgagattatgcagagatacaagactttcacaggacctttgggtgtgatgatgaactcatgtacggaggagtgagctcctacgaagggtcaatggctcttaacgccaggccacaaagccccagagagggacatatgatggatgcattgtatgctcaggttaaaaaacctagaaactcaaagccgtcgccagtggattcaaatcgctcaactcccagcaaccatgacaggatccagcggcttcgccaggaatttcaacaggctaagcaggacgaggacgttgaggatcgccggaggacatactctttcgagcagccatggcctaatgcacggccggcgactcagtcaggacgacactctgtcagtgtggaggttcagatgcagaggcagcgccaagaggaacgcgagtccagtcaacaggctcagcggcagtattcatccctgcctcgtcagagccgcaaaaacgcatcctctgtgagtcaggactcctgggaacagaattactctccaggagagggtttccagtctgctaaagagaacccacgctactccagctaccaggggagtcgcaacggttatctggggggacacggctttaatgcccgcgttatgctggagacccaggaacttctcaggcaggagcagcgccggaaggaacaacagatgaagaagcaaccaccatctgaaggcccaagcaactatgacagttataaaaaggtacaggacccctcctacgctccacctaagggcccattccgccaggatgtgcctcctagtccgtcccaagtggctcggctgaataggctgcaaacacctgagaagggtaggcctttttactcgtag

SEQ ID NO: 198663 - DNA, 3735 bp, synthetic construct
  misc_feature 1..3735: note = Description of Artificial Sequence: Synthetic coding sequence
  source 1..3735: mol_type = other DNA
atgaaggtgaccgtgtgcttcggccggacccgggtggtggtgccctgtggcgatggacatatgaaggtttttagtttgatccagcaggccgtcactagatatcgaaaagcaatcgcgaaagatccaaactactggatccaggtacaccggctggaacacggagatggaggtattctcgacctcgacgacattctctgcgacgtggctgacgataaggaccgtttggtcgccgtttttgatgaacaggacccgcatcacggaggagacggtacctctgcaagcagcacaggtacacagagcccagagatcttcggctccgaactgggcacaaacaatgtgagcgctttccagccatatcaggcaacatcagagattgaggtgaccccctctgtgctgagagcaaacatgccgctccatgtcagacggtcgtcagaccctgccctgataggtttatccactagtgtgagcgactcaaatttctctagcgaggaaccatcgagaaaaaatccaacgcgatggtctaccacggctgggttcctcaagcagaacacggcaggctcaccaaagacatgtgaccggaaagatgaggacggaactgaggaggacaatagtcgggtcgaaccagttggacatgccgacactggactcgaacatatacccaacttttctctggatgatatggtaaagttagtggaagtgccgaacgacggaggacccctcggtattcacgtcgtccctttctccgctcgaggaggtcgcactctgggcctcctggtcaaacggctcgaaaagggcggaaaggcagagcacgagaatctgtttagagagaatgactgtattgtcaggattaatgacggtgatctccgtaacaggcgctttgaacaggcccagcacatgtttaggcaggccatgaggacgcccattatttggtttcacgtggttcctgccgccaacaaagaacagtacgaacaactgtcccagagtgaaaaaaacaattactactcctctcgattcagccctgatagtcagtacattgacaatcgctcggtcaattccgccgggctgcatactgtgcagcgcgcgcccagactgaatcatccccctgagcaaattgattcccactctagactgcctcactcagctcacccctcaggcaaacccccaagcgcgcccgcgtccgcaccccagaacgtcttttcgaccactgtttcatcaggctacaacactaagaagatcggaaagaggctcaatattcagctgaaaaagggcacagaaggcctgggtttctccattacctctagggacgtgaccatcggaggttcagctccaatctacgtcaagaacattctcccacggggggctgctattcaggatgggagactgaaggcgggtgaccgacttatcgaggtaaatggtgtggacctcgtgggcaagtctcaggaagaggttgtctctctgctccgctcaaccaagatggaagggaccgtgtccctgttagtctttaggcaggaggatgcttttcacccaagggagctgaaagcggaggatgaagacatcgttctcacacccgacggtactcgggagttccttacattcgaagtgcccttaaatgattcgggctcagccggactgggggtatcagtcaagggaaatcggtccaaagaaaaccacgctgatttggggatcttcgttaaaagtattataaatggcggagcggcttccaaggatggcagactgcgagtgaacgatcaactgattgcagtgaacggtgaatccctcctgggcaaaactaatcaggatgctatggaaaccctccgcaggtccatgtctaccgagggcaacaagcgaggaatgatccagcttattgtcgctcggaggatttctaagtgcaacgagctcaaatcccctggttcaccacccggccctgagctaccgatcgagaccgccttggacgacagggagagaaggatttcacacagcctctactctggcatcgaaggcttggacgagtcgcctagtagaaatgctgctctttcccggatcatgggcaaataccagctttctcccaccgttaacatgccccaagatgatacggtcatcatcgaggatgacaggctcccggtcctgcccccgcacttaagtgaccagagtagttcttccagccacgacgacgttgggttcgtcaccgccgatgcaggaacctgggccaaggccgccatttcggattcagctgattgcagtcttagccccgatgtcgacccagtccttgccttccagagggagggctttggcaggcagtccatgagtgagaaacggaccaaacagttctctgacgcctcccagctggacttcgttaagacccgcaagtcaaagtctatggacctcggatcttctccatccagggacgtgggaccatcactgggattaaagaaaagcagttctctagagtctctgcagaccgccgtggcggaggtcaccctgaatggggatattccattccatcgcccccgtccccgcattattcgcggcagagggtgtaacgagagctttcgggctgccatcgacaaaagctatgacaaacctgccgtggatgacgatgacgaaggcatggagacgctcgaggaggatacagaggaatcctccaggagcgggcgtgaaagtgtcagcaccgcctctgaccagccctctcacagtctggagcgacaaatgaatggtaaccaagaaaaaggcgataaaactgataggaagaaagacaagaccggaaaggagaagaaaaaggatcgggataaagagaaggataaaatgaaagccaagaaggggatgttgaaaggattgggtgacatgtttcgtatacaggcaaagactcgagagtttcgggagagacaggcacgagaaagggattacgccgagattcaagacttccaccggacattcgggtgtgacgatgagctgatgtacggcggtgtatccagttatgaagggtccatggcactgaacgccaggccccaatccccacgcgaaggccacatgatggatgcactgtacgcacaagtcaagaaacctcgtaattccaagccgtcaccggttgattctaatcgtagcacgccctccaatcatgataggatacagcgcctcaggcaagaatttcagcaagcgaagcaggatgaagatgtagaggacagacgtcggacgtactcctttgaacagccttggcccaacgctcgaccagccacgcagtccggacgacatagtgtgtcagtggaggtgcagatgcagaggcagcgacaagaagaacgcgagtcatcacaacaggcacagagacagtacagctccctccctcggcagtctcggaagaacgcaagttcagttagccaggacagttgggaacaaaattactctccaggggagggttttcaatctgcgaaagagaatcctcgatacagtagttatcaaggcagcaggaacgggtacctgggaggacacggattcaacgcccgggtgatgttagaaacccaggaacttcttcgacaggagcagaggaggaaggaacagcaaatgaaaaagcaaccaccaagtgaaggcccgagcaactacgactcatacaagaaagtccaagacccctcatatgctcctccaaagggccccttcagacaggacgtgccaccctctccatcccaggtagcacggcttaatcgactccaaacccccgagaaaggacgaccgttttatagctag

SEQ ID NO: 198664 - DNA, 2244 bp, synthetic construct
  misc_feature 1..2244: note = Description of Artificial Sequence: Synthetic coding sequence
  source 1..2244: mol_type = other DNA
atggtgaagctggtggaggtgcccaacgacggcggccccctgggcatacacgtggtacccttctccgctcgcgggggacggacacttggcctgctcgtgaaaaggctcgaaaagggcggaaaagccgaacatgaaaatctctttagggaaaacgattgtattgtcaggatcaatgacggcgacctccgcaaccgccgcttcgagcaggcccagcacatgtttagacaagctatgcggacgcctataatttggtttcacgtggtgcccgccgcaaacaaggagcagtatgagcagctctctcaatccgagaaaaacaattattactccagtcgcttctccccagacagtcagtatatcgataataggagcgtgaatagcgccgggctacacacagtccagagggcacctagattgaaccaccccccagaacagattgattcgcactctcgtttaccacattcagcccaccctagcggaaaacctccctctgccccagcatcggcaccccagaacgtctttagtacaaccgtgagcagtggctacaataccaaaaagatcggaaagagactgaatatccagttgaaaaaaggaacagaaggcctcgggttcagtataacttcccgggacgtaactattggcggaagcgcacctatatatgtgaaaaacatactgccacggggggcagctatccaggacggacggcttaaggccggcgaccgactcattgaagtgaatggggtcgatctcgtcggtaagtctcaggaggaggtcgtgtcgttgctgagatctacgaagatggagggcacagtttctcttctggtgtttcgccaggaggacgccttccatcctcgggagctgaaggccgaggatgaagacatcgtgctgacaccggatggaacgagagaatttctgacatttgaagtgcccctcaatgactcgggctctgccggtctgggagtcagcgtgaaagggaaccggagcaaggaaaatcatgcagatctggggattttcgtgaaaagtatcattaatgggggggctgcctctaaagacgggaggctccgcgttaatgatcagctcatcgccgtgaatggagaatcccttctcggcaagactaaccaagatgctatggaaaccttaaggcgctcaatgagtacggaagggaacaagagggggatgatacagctgatagtcgcacgcaggatttctaaatgcaatgagctaaagagcccaggcagcccacccgggccagagctgcccattgaaacagccctagatgaccgcgaacgaagaatcagtcattctctctactctggtatcgaagggctggatgagtctccgtctcgcaatgccgcactcagcagaatcatgggcaagtatcagctatcgcccaccgttaacatgcctcaggacgacaccgtcatcatcgaagacgatagactgccagtactgccaccgcacctcagcgatcagagcagctctagtagccacgacgacgtaggctttgtgaccgcagatgctggcacttgggcgaaagctgcaatttctgacagcgcagattgctctttgagccccgatgtggatcccgtcctggcatttcagagggaaggcttcggccggcaatctatgagtgaaaagcggacaaagcagttcagcgatgcgtcacagctggactttgtcaaaacccgcaagtcaaagagtatggacctcgttgcggatgaaacaaaactgaataccgttgatgatcagaaggcaggttccccgtcacgcgacgtcggcccttcgctggggctgaagaaaagtagctctcttgaatccctgcaaactgctgttgccgaagtgaccttgaacggggacatacccttccaccggcctaggcctaggattattcggggcaggggatgcaacgaatctttccgagctgcgattgacaaatcttacgacaagccagcggttgatgacgacgacgagggtatggaaactttagaggaggacacagaagaatcttcccgctccggcagagagagtgtgtccacagcctccgatcagccctcccacagcctcgaaaggcagatgaatgggaaccaggaaaagggggataaaactgatcgaaagaaggataaaacgggtaaggagaaaaagaaggacagagataaagagaaagataaaatgaaagctaagaaagggatgctcaagggactcggagatatgttctcccttgccaaactgaaaccagagaaacgctag

SEQ ID NO: 198665 - DNA, 3801 bp, synthetic construct
  misc_feature 1..3801: note = Description of Artificial Sequence: Synthetic coding sequence
  source 1..3801: mol_type = other DNA
atgaaggtgaccgtgtgcttcggccggacccgggtggtggtgccctgtggcgacggtcatatgaaagtgttctccctcatacagcaggctgtcacccgttaccgaaaagctatagccaaagatcctaattactggatccaggtacaccgtctggaacatggagatgggggtatcctcgacctggatgacattctatgcgatgtggctgacgataaagacagactcgttgcagtgtttgacgagcaggacccccaccatggaggcgacggtaccagtgcttctagcaccgggacccagtctcctgagatctttggcagcgaactggggacaaataatgtcagtgccttccagccataccaggcaacatccgagatcgaggtgacacccagtgtgctgagagctaatatgcccttgcatgtacggagaagttctgaccctgcgctgatcgggctctctacctccgtgtccgattcgaacttcagtagcgaggaaccctctcgcaaaaacccaactagatggtccacaacagcaggattcctgaagcaaaatactgccggaagcccaaagacctgcgatcggaaagacgaagacgggactgaagaggacaacagcagagtggagcccgtgggtcacgcagacaccggcctggagcatatccccaacttcagtctcgacgacatggtgaagctggtcgaagtgcctaacgatggcggtcctctcggcatccatgtagtgcccttcagcgcccgcgggggtcgcaccttaggcctcctcgttaagcgtcttgaaaaagggggtaaggcggaacatgagaaccttttcagagagaatgactgtattgtgaggattaacgacggcgatctgcgcaatcggcgcttcgaacaggctcagcatatgttcaggcaggccatgagaactcccattatttggtttcatgtggtcccggccgccaataaagagcagtatgagcagctgtctcaaagcgaaaaaaataattattacagcagccgcttctcacctgattcacagtacatagataataggagcgttaactcggctgggcttcatacggtgcaaagagcgccccgccttaatcaccctcccgagcaaattgattcccactcccggcttcctcattccgcacatccttctggcaaacctccatctgctccagcgtctgcaccccagaacgtcttctccaccaccgtctctagcggctataacacaaaaaaaattgggaaaagactcaatattcagttgaagaaaggcacggagggcctcggattctccattacttcccgtgatgtgacaatagggggctccgcacccatctacgtcaaaaatattctccctcgcggcgcagcaattcaggacgggcgattgaaagctggagaccggctgattgaggttaatggcgtcgacctggttggcaagtcccaagaagaggtcgtgtctctgctaagaagcacaaaaatggaggggacagtctctctgctggtcttccgccaggaggatgccttccacccacgcgagctcaaagccgaggatgaagatattgtcctcaccccagacggcactagggaatttttaacattcgaagttccactgaacgattccggctctgccgggctaggcgtatctgttaagggtaatcgctcgaaggagaaccacgctgacctggggatctttgtgaagagcattatcaatggaggcgcagccagtaaggatggccgcctgagagtaaacgaccagctgatcgcagtaaacggtgaatcattgctggggaagacaaatcaggatgctatggaaactctgaggagaagtatgtccaccgaaggcaacaagcgaggcatgattcaactgattgtggcccgacgcatctcaaaatgcaatgagcttaaatcgcccggatctccaccgggccccgagctgcccattgagaccgccctggatgaccgggaaagacggatctcacattccctttatagtggtattgagggcttagatgaaagtccatctaggaacgccgcccttagtcgaatcatgggaaagtatcaactatcccctacagtcaatatgccccaggacgatacagtcattattgaggacgaccgtctgcccgtgctgcccccacacttgtcagatcagagctcgtcaagtagtcacgatgatgtcggcttcgtaaccgcagatgccggcacctgggctaaggctgctatttcggacagtgctgattgctcactgagtcctgatgtcgatcctgtgctcgctttccagagagaggggtttggaaggcagattgcagatgaaaccaaactcaataccgtggacgatcagaaggcagggtctccaagtagggatgtcggaccgtccttggggctgaaaaaatcgtcttccctggagagtctccagactgctgtggctgaagtaacactcaatggggatatcccttttcaccggccgcgtcctcggatcattcgagggagagggtgcaatgaaagcttcagagcagctatcgataagtcatacgataaaccagccgtggacgacgatgatgaaggaatggagacattagaggaggatacagaagagagcagccgttcggggcgagagtctgtttccacagcttccgatcaaccctcccactccctcgagcgtcaaatgaacggaaaccaggagaagggggataaaactgatagaaaaaaggacaaaaccggaaaggagaagaagaaggaccgagataaggaaaaggacaaaatgaaagctaagaagggcatgctgaaaggcctcggcgacatgttcagatttggaaaacaccgaaaggatgataaaatcgagaaaacaggaaaaatcaagattcaagagagtttcacttctgaagaagagagaatcagaatgaaacaggagcaggagagaatacaagccaaaacacgtgagtttcgggagcgccaagcaagagagagagactacgccgaaatccaggattttcataggacgttcggttgcgacgatgagcttatgtatggtggggtttcctcctatgaagggagcatggcactcaacgcgcgaccacagtctcctagagagggtcacatgatggatgctttgtatgcccaggtcaagaagccgcgtaattcgaagccctcacccgtggactcaaacaggagcacaccatctaaccacgacaggattcagcgcctacggcaggaatttcagcaagctaagcaggacgaagacgttgaggataggcgaagaacttacagttttgaacagccatggcctaatgcccggcctgccacccagagcggccggcactctgtcagtgtcgaagtccagatgcaacgacagcgccaggaagagcgagaatctagccagcaggcccaaagacagtattcatccctgccgcggcaaagccgtaaaaatgctagtagcgtttcccaggacagttgggaacaaaactacagcccaggcgagggttttcagagcgcaaaggagaaccctagatacagctcatatcagggctcccgtaacggatacctaggaggccatggctttaatgcccgggtgatgctggagacacaggagctgctgagacaggaacagcggcgtaaagaacagcaaatgaaaaagcaacctccctctgaggggccctcaaattacgattcctacaagaaagttcaagatccttcctatgccccccctaagggcccattcagacaagacgtgccaccttcacctagccaagtggcacggcttaacagactgcaaacacccgaaaaagggagacccttctacagctag

SEQ ID NO: 198666 - DNA, 4023 bp, synthetic construct
  misc_feature 1..4023: note = Description of Artificial Sequence: Synthetic coding sequence
  source 1..4023: mol_type = other DNA
atgaaggtgaccgtgtgcttcggccggacccgggtggtggtgccctgcggcgacggtcatatgaaggttttttccctcatccagcaagcagttacgcggtatcgtaaggctatcgctaaggatcccaactattggatacaggtgcaccgacttgaacatggggatggcgggatcctcgacctggatgacatcttgtgtgatgtggctgatgacaaggaccggctcgttgcagtcttcgatgaacaagacccacaccatgggggggatggcacatccgcgtccagtactggtacacagtcaccagagatatttggttctgaactgggcactaacaacgtctccgctttccagccataccaagccacaagtgaaattgaagtgacaccctccgtgctgagggccaacatgcctctccatgtgcgtcggtcatccgacccagccctcatcggtctgtcaacttctgtctccgacagcaacttctcaagcgaggaaccctcgagaaagaatccaacaagatggagcacaaccgccggtttcctcaaacagaacactgctggttctcctaaaacctgtgatcgaaaaaaagatgagaactaccggtctctgccaagagatacctctaattggtctaaccagtttcagcgggataacgcacgttcctcgctctctgcatcacatccgatggtcggtaagtggttggaaaagcaagaacaagatgaagacggaaccgaagaggataatagccgcgtcgagcccgtggggcacgctgacaccggcctggaacatataccaaatttcagccttgacgacatggtcaaactagtcgaggtcccaaacgacggtgggcctctcggcatccacgtggtccctttcagtgcccgtggaggtcggaccctggggctgctggtaaagagacttgaaaaagggggtaaggcagagcacgagaatctcttcagagaaaacgattgcatagttcggatcaatgatggggaccttcgcaatagacggtttgagcaagctcagcacatgttcagacaagccatgagaactccaattatctggttccacgttgtcccagctgcgaataaagagcaatacgaacagctctcacagagcgagaaaaacaactattatagttcccggttttcccccgactcacagtacatagacaatagatctgttaatagcgccgggttgcatactgtccagagggcaccccgcctcaaccacccccctgaacagattgatagtcactctagactgccccatagtgcccacccttctgggaagcccccaagcgctccagcatccgcgccccaaaacgtattcagcactaccgtttcttctggctacaacacaaagaagatcggaaagcgactgaacatacaactgaagaaaggcacagaaggcctcgggttcagtattacttctcgtgatgtgacaatcggtggctccgctccaatttacgtcaagaatattctgccgcggggagccgccatacaagatgggagactgaaggcgggcgatagattaatcgaggtcaacggcgtggaccttgtggggaaatcccaagaggaggtagtgagcctcctccgttccaccaagatggaaggtacggtgagcctcttggtgttccggcaggaggacgcattccatccaagagaactcaaagccgaagacgaagacattgttcttacccctgatggcaccagggagtttctcaccttcgaagtccctctgaatgacagtggatccgccggtttaggggtatctgtaaagggtaatcggagcaaagaaaatcacgcagatttggggattttcgtaaagtctatcattaacggtggggccgcctctaaggacggccgactgcgggtcaacgaccagctcatcgccgttaacggcgagtctctgctggggaaaaccaaccaggacgccatggaaaccctccgtagatctatgtcaaccgaagggaacaaaaggggtatgattcagctgatagtggccaggaggattagtaaatgtaatgagctgaaaagtcccgggtctccaccagggccagaactgcccattgaaaccgctctagacgaccgcgagaggagaatttctcactcactgtacagcggcatcgaggggcttgatgagtcaccaagtagaaatgccgcgctgagtcgaatcatggggaagtaccagttgtctccaactgtgaatatgccccaagatgataccgttattatcgaggatgaccgcttacccgtcctgccaccccatctctccgaccagtctagttccagttctcacgatgatgttggctttgtaaccgctgacgctggaacatgggcgaaggccgcaatttccgattccgctgactgtagcttgagtcccgacgtagaccctgtgttggcctttcagcgtgagggtttcggccggcagagtatgtccgagaagcgcactaagcagttctccgatgctagccaactggatttcgtgaagacccgcaaatctaagagtatggatctggggatagcagacgaaactaagctgaatactgtggatgaccagaaggctggttccccatcccgcgatgtgggcccatccctgggtctgaagaaaagtagcagcctggaatcattgcaaacagccgtcgctgaagtgacccttaacggcgatatcccctttcaccggcccagacctcgcattatcagaggccgcggttgcaatgaatcctttcgggctgctatcgataaatcctacgacaagccagcagtagacgatgacgacgaaggcatggagacactggaagaggacaccgaggagagcagcaggtcagggagagaaagtgtttcgacagcttctgaccagccaagccactctttggaaaggcagatgaacggtaatcaagaaaagggagacaaaacagaccggaagaaggacaagaccggaaaggagaaaaaaaaggatcgcgacaaggaaaaggacaaaatgaaggcaaagaaggggatgttgaagggacttggcgatatgtttcggttcggcaagcaccgcaaggacgataagatcgagaagacaggtaaaattaaaatacaagagagcttcacttccgaggaagagcgcattagaatgaagcaggagcaagagcgcattcaggctaaaaccagagaattccgggaacggcaggctcgggagagggactacgctgagatacaggatttccataggacgttcggatgcgacgatgaacttatgtatggcggagttagcagctacgagggatctatggccctgaatgcccggccccagtcgcccagagagggccacatgatggatgccttatacgctcaggtgaagaagcctagaaatagcaaaccctcccctgtggacagcaacagaagtactccgtcgaatcatgaccgaattcagagactgagacaggaattccaacaggccaagcaagatgaggatgtggaagatcggcgccgcacgtacagctttgaacagccctggccaaacgcaagacccgccacacagtcaggacggcactctgtgtctgtggaggtacagatgcagagacagcggcaggaggagcgcgaatcttcacaacaggcccagcgtcagtactccagtcttcctcgacagagtagaaaaaacgcttctagcgtgtcacaggacagctgggagcagaattatagtcccggagaggggtttcagtccgccaaggagaatccacggtactccagctatcaaggtagccgcaatggatacctgggtggccacgggtttaatgcgcgcgtgatgttggagacccaagaacttctacggcaggagcagcggcgaaaggagcagcagatgaaaaaacaaccacccagcgaaggtccctctaactacgatagttacaagaaggtgcaggacccctcctacgcacctccgaaaggcccctttcggcaggatgtccccccgagcccctcacaggtggcgcggctaaacaggctccagacccccgagaagggccgacctttctactcctag

SEQ ID NO: 198667 - DNA, 1119 bp, synthetic construct
  misc_feature 1..1119: note = Description of Artificial Sequence: Synthetic coding sequence
  source 1..1119: mol_type = other DNA
atgaaccggagccaccggcacggcgccggcagcggctgcctgggcacaatggaagtgaagtccaaatttggcgcagaatttagacgcttctctttggaacggagcaaaccaggaaagttcgaagaattttacggtctgctgcagcacgtgcacaagatccccaacgtggacgtgctagtgggctatgctgacattcatggagacctgctccctatcaataacgatgacaactaccacaaggccgttagcacagccaacccactgctgaggattttcatccaaaaaaaagaagaagctgactactctgcttttgggactgacacgctcatcaagaaaaagaatgtcttgactaacgtgctccgcccggataaccacagaaaaaagccccatattgtgatcagtatgccccaggatttccggccagtctcatccatcattgacgtggatatactacccgaaactcatagacgcgtacgactgtataaatacgggacggaaaaaccactgggattctacatccgggacggctcgagcgtgcgggtgacaccccatgggctggagaaggtgccgggaatcttcatttcccgcctggtgcccggtggactggcccaatccactggcctgctagctgtcaatgatgaggttctggaggtgaatggaatcgaggtgtcaggcaaatctcttgaccaggtgacagacatgatgatcgccaactccaggaatctgatcatcactgttagacccgctaaccagcggaacaacgtagtgcgtaattcacgcacctcgggatcgtctggccagagcaccgataattctctcttagggtacccacagcaaattgagccatcttttgaacccgaggacgaggatagcgaggaggatgacatcattatcgaagataatggggtcccacagcagatccctaaagcagttccaaacactgaatctctcgaaagcctgacacagatcgagctgagcttcgaatccgggcagaacggatttatcccttctaacgaagtgagcctggctgccatagctagttcctcgaataccgaatttgagacacatgcgccagaccagaagctcttagaagaggatggcaccattatcacattgtag

SEQ ID NO: 198668 - DNA, 1131 bp, synthetic construct
  misc_feature 1..1131: note = Description of Artificial Sequence: Synthetic coding sequence
  source 1..1131: mol_type = other DNA
atgaaccggagcttccacaagagccagaccctgcggttctacgactgcagcgccgtggaggttaaatcaaaatttggagccgaatttcgaagattctccctcgaccgacacaagcccggaaagttcgaagatttctacaagctagtggtgcatacacaccatatctccaacagtgacgtgaccataggttatgccgacgtgcatggcgacctcctgcctatcaacaacgacgacaacttttgcaaggccgtgagcagcgccaatcccctgctccgggtctttatccagaagcgcgaggaggctgagaggggcagccttggcgccggtagcctttgccgccgtaggagagctctgggcgccctacgcgatgaaggtccgagaaggcgcgcccacctcgacatcggccttcccagagattttcggccagtaagttccattattgacgtggaccttgtgcctgaaacgcatcggcgggtgcggttacatagacacggatgtgagaaaccactcgggttctacatccgtgacggcgcctcagttagagtgaccccccacggcctggaaaaggtgcccggaattttcattagccggatggtgcctggagggctagccgaaagtacagggcttctagctgtaaacgacgaggtactggaagttaacgggatcgaagtggccggtaagactttggaccaggtgacggatatgatgatcgccaacagtcataatctgatagtgacagtaaagcctgccaatcaacgtaacaatgtagtgagggggggccgggctctgggttctagtggacctccaagtgatgggacagccggattcgtaggaccacccgccccccgagtactgcagaactttcaccctgacgaagcagaatccgacgaggacaacgatgttgtcatagaggggacactagaaccggctcgtccaccccagaccccaggggctcctgctggctcattgtctcgggttaacggggctgggctcgcccagagactgcagcgggatctggctctagatggcggactgcagagattacttagcagccttagggctgacccacggcacagtttggcactccctcccgggggggtcgaggagcacgggcccgctgtgacactatag

SEQ ID NO: 198669 - DNA, 1236 bp, synthetic construct
  misc_feature 1..1236: note = Description of Artificial Sequence: Synthetic coding sequence
  source 1..1236: mol_type = other DNA
atggccgaggccgagctgcacaaggagcggctgcaggccatcgccgaaaagagaaagcggcagactgagatcgaaggtaagcgtcagcagctggacgaacagatcctgctgctccagcattccaagtcaaaagtcttgagggaaaaatggctgcttcagggtattccagcgggtacggctgaggaagaggaggctaggagaaggcaatccgaggaagacgagtttagagtcaagcagctggaggacaacatccaaagactggaacaagaaattcaaactcttgaatccgaggagtcacagatttccgcgaaagagcagattattctcgagaaactgaaggagaccgagaagagttttaaagattttcagaaggggttctcttccactgatggagacgccgtaaactacatttcaagccaattaccagatctgcctattctgtgttctagaaccgccgagcccagtcctggccaggacggcacatcccgcgccgcagctgtgtatgctatggaaattaatgtagaaaaggataagcagaccggcgagacaaagattcttagcactagcaccatcgggccagaaggcgtccaccagaagggtgtcaaggtgtatgatgatggcacgaaagttgtgtatgaggtaagatccggcggcaccgtggtggagaatggcgttcacaaactatccacaaaggacgtggaagagttgattcagaaagccggacagtccagtttggggggagggcacgtgagtgagcggactgtgatcgccgacggcagcctgtctcacccgaaggaacatatgctgtgcaaggaagcgaagctggaaatggtgcacaagtcaagaaaagaccactcatcaggcaatccgggtcagcaggcacaggctccatcagccgctgggccagaagcaaacctcgatcaaccagtcacaatgatattcatggggtaccagaacatcgaagacgaggaggaaacaaaaaaagtccttggctacgatgagactataaaggcggagctggtcttgatagacgaggacgacgagaagtctctgagagaaaagacagtgaccgacgtgagcacaatcgacgggaacgcagcagaactggttagcggcagaccagtatctgataccaccgagccatcgtctcccgaagggaaggaggagtcactggccacagaaccagcccccggtacccaaaaaaaaaaacgatgccagtgctgcgttgtgatgtag

SEQ ID NO: 198670 - DNA, 1140 bp, synthetic construct
  misc_feature 1..1140: note = Description of Artificial Sequence: Synthetic coding sequence
  source 1..1140: mol_type = other DNA
atggagatggccgaggccgagctgcacaaggagcggctgcaggccattgctgagaagcggaaacggcaaacagagatagaaggaaagaggcaacagctggatgagcagatactcttgctgcaacattcaaaatccaaggtcctgagggaaaaatggctgctgcagggcattccagccggaactgcggaagaggaggaggccaggcgaagacaaagcgaagaggacgaatttagggtaaaacaactggaggacaatattcaaagacttgagcaggagattcagactttagagtctgaggagtctcagatctccgctaaggagcagatcattctagagaaactaaaggagactgagaagtcattcaaggattttcagaaaggcttttcctccaccgacggagctgtatatgccatggagatcaacgttgaaaaggacaagcagacaggagagactaagattctgagcacgtccaccattggtccagaaggcgttcaccagaaaggcgttaaagtctatgatgacggcaccaaggttgtctacgaagtaagaagcggaggcactgtggttgaaaatggggtccataaactttcaacaaaggacgttgaagagctgattcagaaggcgggccagtcttctctcggcggaggccatgtttctgaacgcaccgtgatagccgatggaagtttgtctcaccccaaggaacacatgctctgtaaggaagcaaagctggaaatggtacataaatctcggaaagatcattccagcgggaaccctgggcaacaggcgcaggctccttcagctgccggtccggaagccaaccttgatcaacctgtcacaatgatctttatggggtatcagaatattgaagacgaggaggaaacaaagaaggtactcggctacgatgagaccattaaagctgagctggtgttgatagacgaagatgatgaaaagtccctgcgcgagaagacggtgacggatgttagcaccatcgatgggaacgcagcagagctcgtgagtggccgacccgtgtctgatacaaccgaaccatcttcccccgaaggaaaggaagaatcactggccaccgagcccgcccccggaacacagaagaagaagagatgccaatgttgcgtggtaatgtag

SEQ ID NO: 198671 - DNA, 1242 bp, synthetic construct
  misc_feature 1..1242: note = Description of Artificial Sequence: Synthetic coding sequence
  source 1..1242: mol_type = other DNA
atggagatggccgaggccgagctgcacaaggagcggctgcaggccattgccgaaaagaggaagcggcagacagaaatcgagggcaaaaggcaacagcttgacgagcaaattcttctgctgcagcactcgaaatctaaggtcctgagagagaaatggttattgcagggtattccggccgggaccgccgaggaggaggaagcgcgacggcggcagtctgaggaggatgagttccgggtcaaacagcttgaggacaatatccagagactggagcaggaaatccagacactggaaagcgaggaaagccagattagcgccaaggagcagattatcctcgagaaactcaaggagaccgaaaagagcttcaaggatttccagaaggggttcagcagcactgatggcgacgccgtcaactacatctcctctcagctaccagatctgccaattctgtgctccagaactgctgagcccagtccaggtcaagacggcaccagtcgggctgcagccgtgtatgctatggagattaatgtggaaaaagataagcagacaggcgagactaagatcctgtcaacctctaccatcggccccgaaggagtccaccagaagggcgtgaaggtgtatgacgacgggacgaaagttgtctacgaggtgcggagtggtggaaccgtggtggaaaacggggtacacaagctgtccacgaaggatgtggaagaactgatacagaaggctggtcagagctcactgggcgggggccatgtttccgagcggactgtgatcgctgacggttctttgtcgcatccaaaagagcacatgctgtgcaaagaagctaagcttgaaatggttcataagtcaagaaaagaccactcttctggcaaccccggacaacaggcccaggcaccctcggccgccgggccagaggccaacctggaccagcctgtgactatgatttttatggggtatcagaatattgaggatgaggaagaaactaagaaggtcttgggttatgacgagaccataaaggctgagctcgtgttaatcgatgaggacgacgagaagagccttagggaaaagacagtgaccgacgtgtccaccattgatgggaacgccgccgagttggtgtcagggcgtcctgtgtctgacacgacagaacctagctcaccagagggcaaagaggagtctctggctacagagccggctcctggcacccaaaaaaagaagcggtgccagtgctgcgtggtgatgtag

SEQ ID NO: 198672 - DNA, 1167 bp, synthetic construct
  misc_feature 1..1167: note = Description of Artificial Sequence: Synthetic coding sequence
  source 1..1167: mol_type = other DNA
atgggccgggcccggcggttccagtggcccctgctgctgctgtgggccgcagcagccggacccggtgcagggcaggaggttcagacagagaatgtgactgtggcggagggaggggttgctgagatcacctgtaggctgcatcaatacgacggttctattgttgtaatccagaatcctgcccggcagaccctctttttcaacgggactcgggcccttaaagacgagaggttccaattagaagagttttctcctcgcagagtccggatcagactttctgatgctcggttggaggatgagggaggctatttctgtcagctttataccgaagatacccatcaccagatcgctaccttgaccgtgttagtggcaccagagaaccctgtggtggaagtacgggagcaggcggtggaaggaggggaggtggaactatcatgcctcgtccctagaagccgccccgctgcaacactgcgatggtatagggatagaaaggaactcaaaggcgtgtcttcttcgcaggaaaacggcaaggtgtggtcggtggctagtactgtgagatttagggtggatcggaaagatgacggcggaatcatcatttgcgaggctcaaaaccaagccctgccgagtggacactcaaaacaaactcagtacgtgttagatgtgcagtactctcctactgccaggatccatgcctcccaagcagtagtcagagagggcgacaccctggtgctgacttgcgccgtcacaggcaacccgcggcccaaccaaatccgttggaatcgaggcaacgaaagtctgccggaaagagccgaggcagtgggagagacactgaccctgcctggcctcgtttctgctgataacggaacttacacgtgtgaggccagcaataagcatggccacgctagagctctgtacgttctggtggtctacgatcccggcgctgtcgtggaggctcaaacctccgtaccttacgcgatcgttgggggcattctcgcgctcctggtttttttgattatttgtgtgcttgtggggatggtttggtgctctgttagacagaagggctcctacctgactcacgaagcttcaggcctcgacgagcagggagaagcccgagaggcctttctaaacggctctgacggccacaagagaaaagaggaatttttcatctag

SEQ ID NO: 198673 - DNA, 1068 bp, synthetic construct
  misc_feature 1..1068: note = Description of Artificial Sequence: Synthetic coding sequence
  source 1..1068: mol_type = other DNA
atgggcaagctggtggccctggtgctgctgggcgtgggcctgagcctagttggggaaatgtttctggccttcagggagcgtgtgaacgcgtccagagaagtagaaccggttgagcctgaaaactgccatcttatcgaggagctggaaacaggtagtgaagatttggagatcctgcccaatggcttggcgttcatttcttcagggttgaagtaccccggcattaaatcatttaatcccaacagcccgggaaagattcttctaatggatctcaacgaggaggatcccacggtgctggagctaggaataacaggcagcaagttcgatgtcagttcctttaatcctcacggcatcagtacattcacagacgaggacaatgccatgtacctgctggtggtcaaccacccagacgccaaatctacagtggaactatttaagttccaagaggaagagaaatcattgctgcaccttaaaacaatccggcataagctgttgcccaatctcaacgacattgtggcagtgggacctgagcatttctatggaaccaacgatcactactttcttgacccctaccttcagtcttgggagatgtatctggggctggcgtggagctacgtagtgtactacagtccctctgaggtccgagtcgtggccgaaggattcgattttgcaaacgggatcaatatcagcccggacggtaagtacgtttacattgcagaacttttagctcacaaaatccatgtctatgaaaaacatgccaattggaccctaacacccttgaagtctctggacttcaacacactggtggacaatataagcgttgacccagaaacaggagatttatgggtcgggtgccaccccaacggcatgaagatctttttctatgattccgagaaccccccagctagcgaggtcttgcgaatccaaaacatactgactgaagaacctaaagtgacgcaggtctacgcagaaaacggaaccgtgctgcagggtagtacagtggcctctgtgtataaaggtaaattgctgattgggacagtgttccacaaggccctctactgtgaactctag

SEQ ID NO: 198674 - DNA, 1017 bp, synthetic construct
  misc_feature 1..1017: note = Description of Artificial Sequence: Synthetic coding sequence
  source 1..1017: mol_type = other DNA
atggccgccggctgcagcgaggccccccggcccgccgccgccagcgatggcagcttggtgggacaggctggtgtactcccttgcctcgagctaccaacttatgccgctgcatgcgcactggtgaactcccgatattcatgcctggtcgcgggacctcatcagcggcatattgccctcagtcctcgctatctgaacaggaaacgcaccggaatacgagaacagctggacgcagagctgctgaggtactctgaatccctgctgggtgtcccgatcgcctatgataacattaaggtggtcggagagttgggcgatatatatgacgaccagggccatatccatctgaatatagaagcggactttgtcatattttgtcccgaacctggccagaagctcatgggaatagtcaacaaggtgtcatcgagccatatcggttgtttagtacatgggtgctttaacgcctctattccgaagccagagcagctgtccgcagaacagtggcagacgatggaaattaacatgggcgacgagctggagttcgaagttttcagactggatagcgatgcagccggggttttctgtattcgcggtaaattgaatattacaagtctccagtttaagcgttctgaagtgtctgaagaagtgaccgagaacggaactgaagaagccgctaaaaaaccaaagaaaaagaaaaagaagaaggatcctgaaacttacgaagttgacagcggcacaaccaaactggctgatgatgccgatgatacccccatggaggagagtgcactccagaacactaataacgcaaacggcatttgggaggaggaacccaagaaaaaaaagaagaagaagaaacaccaggaggttcaggatcaagaccccgtttttcagggttccgattcctctggttaccagtccgaccataaaaaaaagaagaagaagcgaaagcatagtgaggaagccgagtttactccgcccttgaagtgctcccccaaacggaagggcaagagcaacttcctctag

SEQ ID NO: 198675 - DNA, 1059 bp, synthetic construct
  misc_feature 1..1059: note = Description of Artificial Sequence: Synthetic coding sequence
  source 1..1059: mol_type = other DNA
ggcgccgccggcggctgcggcctggccggcgaccgggccggcctgggagaaaggttactcgcactccgcaatagactgaaagcatctcgggaagtggaaagcgtagatctgcctcattgtcacttgattaagggaatagaggctggaagcgaagacattgacatactacccaacggtcttgccttcttcagcgtagggctgaaattccccggcttgcatagttttgctccggataaaccagggggtattctcatgatggatttgaaggaagaaaaacccagagcaagggagctgcgtattagccgtggtttcgacttagcctctttcaaccctcatggaattagtacatttatcgataacgacgacacagtatacctcttcgtcgtcaaccatcctgagttcaagaataccgtggagattttcaaattcgaggaagccgaaaattctttgctccacctcaaaactgtgaaacacgaacttctcccttccgtaaacgacatcaccgcggttgggcctgcccacttctatgccacaaacgatcactactttagtgatccttttctcaaatatctcgagacctacctaaatctccattgggccaacgtggtgtactactctcccaacgaggtgaaggttgtggcagagggatttgacagcgccaacggaatcaacatttcaccggatgacaaatacatatacgtagcggatattcttgcacacgaaatccacgtattagagaagcacactaacatgaatctaacacagctgaaggtgctggagctggatactttggttgacaacctgtccattgacccctcgtcaggcgatatttgggtcggctgccatccaaatggtcaaaaactctttgtctacgatccaaacaacccgccctcttcagaagtactacggatccaaaacatcttgtccgagaaaccgacggtcactactgtctacgctaataatgggagcgtcttgcaaggcagtagcgtggctagtgtttacgacggtaagctgctgatcggcactctttatcatcgagccctgtactgcgagctttag

SEQ ID NO: 198676 - DNA, 1128 bp, synthetic construct
  misc_feature 1..1128: note = Description of Artificial Sequence: Synthetic coding sequence
  source 1..1128: mol_type = other DNA
atggccccccccaccgagctgctggcccggcccgagcggggcagcgccccaggatccagggccatggggcgcctggtggctgtggggctgctgggcatcgccctggccctactcggcgagcgcctgcttgcactgaggaatcggctcaaggcgagtagagaagtagaatccgtcgacctcccgcattgccacctgataaaaggaatcgaggccggttcagaggatatagatatcctgcctaatggcctcgcattcttctccgtgggactgaaattccctggtttacacagctttgcacctgataaacctggggggattttgatgatggacttaaaggaagaaaaaccccgggctagggagctcagaattagccggggcttcgacctcgcctcgttcaatccgcacggcatcagcacattcattgacaatgatgacaccgtgtatctatttgttgttaaccacccggagtttaagaatacagtggaaatctttaaatttgaagaggctgagaattcccttctgcatcttaagacggtgaagcacgagcttttaccgagcgttaacgacattacagccgtggggcccgcccatttctacgcgaccaatgatcactactttagtgatccctttttgaagtatctagaaacttaccttaatttgcactgggctaacgtcgtgtattactctcctaacgaagtcaaggtggttgccgaggggttcgacagcgccaacggaatcaacatatcacccgacgataaatatatatatgtagcagatatcctggcccatgaaatccacgtgttggagaagcacacaaatatgaacttgacccagttgaaagtcctggagttggacactttagtggacaacctgagcattgaccctagtagtggagatatctgggttggatgccaccctaacggtcagaagctgtttgtctacgatcccaataatccgccaagttctgaagtgctgagaattcagaatattttgagtgaaaagcctactgttaccacggtttacgccaacaacggctctgtgctccagggtagcagcgtcgcctccgtgtacgatggcaagctgcttattggaacactgtaccatcgtgcactttactgtgagctatag

SEQ ID NO: 198677 - DNA, 1029 bp, synthetic construct
  misc_feature 1..1029: note = Description of Artificial Sequence: Synthetic coding sequence
  source 1..1029: mol_type = other DNA
atgggccggctggtggccgtgggcctgctgggcatcgccctggccctgttgggcgaacggctattggcccttcgtaaccgactgaaggcaagcagggaggtggaaagtgtggaccttccacattgccaccttatcaagggcattgaggccggctctgaggacatcgacatcctgcctaacggcctggcctttttttcggttggattaaagtttccaggattgcactcatttgccccagacaaacctggcgggatccttatgatggaccttaaggaggaaaaacctagggcccgggagcttagaatcagtagggggttcgatctggcttctttcaacccccacggcatatcgacatttatcgataacgaatttaagaacaccgtcgaaatctttaagttcgaagaagccgaaaactcgttactgcatctcaaaacggttaagcacgaactgcttccatccgttaacgacatcactgctgtgggccccgcgcacttctacgctaccaacgatcattacttttccgacccgtttcttaagtacctcgaaacttacctgaacctccactgggccaatgtggtgtattacagtccaaatgaggtaaaagtagtggcagaaggattcgattcagccaacggcataaacatctctcctgacgataagtatatatacgtggccgacattcttgcccatgagatccacgttttagagaaacacaccaacatgaatttgacgcagctgaaggttctggagcttgacactttggtggacaatctgtcaatcgatcctagtagtggcgacatttgggtgggttgtcacccaaatggccaaaaattgttcgtgtacgatcccaacaaccccccttcaagtgaggtgttgagaatccagaacatcctctcagaaaagccgacagtgaccacagtgtacgccaataatggaagcgttttgcagggttcatcggtggcatcggtgtacgacggcaaactgctcatcgggacactgtatcatcgggctttgtattgcgaattatag

SEQ ID NO: 198678 - DNA, 1065 bp, synthetic construct
  misc_feature 1..1065: note = Description of Artificial Sequence: Synthetic coding sequence
  source 1..1065: mol_type = other DNA
atgggcaagctggtggccctggtgctgctgggcgtgggcctgagcctggttggagagatgttcctcgccttcagagagcgggtgaatgcctcccgtgaggtcgagcccgttgagcctgagaactgccacctgatcgaagaattggaatccgggagcgaagatatcgacatcctcccatcagggctggccttcataagcagcgggctgaagtatccaggaatgcctaatttcgcccccgacgaaccgggaaaaatctttctaatggacctgaacgagcaaaatcccagagcccaagctctggagatcagtggcggcttcgataaagagctttttaatccccacgggatctccatctttatcgataaggataacactgtgtacctgtatgtcgtgaaccaccctcacatgaaaagtaccgtagaaatcttcaagttcgaggaacagcagcgcagcctcgtctacttaaaaaccattaaacatgaactcctgaaatcggtgaacgatatcgtggtcctgggacctgaacagttttatgctaccagagatcattacttcacaaactcattactatcatttttcgagatgatcttagatttacgctggacgtacgttttgttctactctccccgggaagtgaaggttgtggcaaagggattctgcagtgctaacggaattactgttagtgccgatcaaaaatatgtctatgtggccgatgtggcagcaaagaatattcacattatggaaaagcatgacaactgggatctaacacagcttaaggtaatccagttaggaacgcttgttgacaatttaacagttgatcccgctactggggacattctggcaggctgtcaccctaaccctatgaagctccttaactacaaccccgaggatccacccggatccgaggtgcttcgcatccagaatgtactgtccgagaaaccacgggtttcaaccgtgtacgccaacaacggcagcgtactccaggggacatcagtcgcctccgtttatcacgggaagattctgataggaacggtatttcacaaaaccctctactgcgagctatag

SEQ ID NO: 198679 - DNA, 1572 bp, synthetic construct
  misc_feature 1..1572: note = Description of Artificial Sequence: Synthetic coding sequence
  source 1..1572: mol_type = other DNA
atgatgctgcggggcaacctgaagcaggtgcggatcgagaagaaccccgccaggctgcgcgccctggaatcagcagtcggagaaagtgagcccgccgcggcagctgctatggcactggcattggccggagaacccgcaccgcccgcccctgccccaccagaggaccatcctgatgaagagatgggcttcacaattgacatcaagagttttcttaaaccaggcgaaaaaacatatacccaaaggtgcagactgtttgtcggcaatctacctactgacattaccgaagaagatttcaagaggctctttgaacgatacggggaaccctcggaagtttttattaatcgcgacagaggttttggctttatccggcttgaaagccgcacactggccgagattgccaaggcagagcttgacgggaccatcctgaagtcccggcctttaagaattaggttcgccacacacggtgccgcactgaccgtgaaaaacctaagtcccgttgtctctaatgaacttctggaacaagcctttagccagttcgggcctgtggagaaagccgtagtggtggtcgatgaccggggccgagcgacaggtaagggatttgtggaattcgctgctaaaccacccgctagaaaagctctggagaggtgtggtgatggtgcttttctactgaccaccactccccgcccggtgatagtggagcctatggagcagtttgatgacgaggatgggcttccagagaagctaatgcaaaagactcagcagtatcataaggagcgagaacagcctccacggtttgcccaaccaggtactttcgagtttgagtacgcatcccgatggaaagctcttgatgagatggagaaacaacagagggaacaggtagacaggaatataagggaggccaaagagaaattagaggctgagatggaggccgcgcgacatgagcatcagctcatgcttatgagacaagatctgatgaggagacaggaagaactgcgacgtcttgaggaactgcgtaatcaggaattacaaaagcgcaagcagatccaactccgacacgaggaggagcacagaagacgtgaagaggagatgatccgccatcgggagcaagaggaactgcggagacagcaggagggctttaaacctaattatatggagaatagagagcaggaaatgaggatgggcgacatgggccctaggggcgccatcaacatgggagatgccttctccccagcccctgcagggaatcagggaccgccccctatgatgggtatgaatatgaacaatcgcgctacaattccaggacctcccatgggcccaggcccagcgatgggccccgagggagctgccaatatgggtacccccatgatgcccgacaatggtgccgtgcataacgaccgttttccccaggggccacccagccagatgggttcaccaatgggaagccgtacaggatccgaaaccccccaagcaccaatgagcggcgtcgggcctgtcagcggcggacctggcggattcggcagaggatcacagggtggcaactttgagggtcccaacaaacggaggcggtattag

SEQ ID NO: 198680 - DNA, 1392 bp, synthetic construct
  misc_feature 1..1392: note = Description of Artificial Sequence: Synthetic coding sequence
  source 1..1392: mol_type = other DNA
atgggcttcaccatcgacatcaagagcttcctgaagcccggcgagaagacctatacacagagatgtagactgttcgtcggcaatctgcccaccgacataaccgaggaggattttaaacggttgttcgagcgatatggagagcccagcgaagtattcatcaaccgggacagggggttcggtttcattcggctcgagagccggaccttagcggagatcgccaaggccgagctcgacggaactattttaaagagccgacccctacgaattaggttcgctacacacggagcggccttaactgtcaaaaatctctcgccggtggtttccaacgagctgctggagcaggccttttcacagttcggacctgtggagaaggccgtagtggtggtggacgaccgcggcagggccacaggaaagggttttgtggaattcgcagccaagccacctgcaaggaaggctctcgaacgctgtggcgacggggctttcctcctcaccacaacaccgcgccccgtgatcgtggaacctatggaacagtttgacgatgaggacggcctacccgaaaaacttatgcagaagacacagcaataccacaaggagagggagcagcccccgcgtttcgcgcaacctggtactttcgagttcgagtacgccagccgctggaaagcattggatgagatggaaaagcaacagagagagcaggtagataggaatataagagaagctaaggaaaaattggaagcggaaatggaagcggcgcggcatgagcaccaactaatgcttatgcgtcaggatctcatgcggcggcaggaggagctacgcagactcgaggagctgaggaatcaggaattgcagaagcggaagcaaatccagctgagacacgaagaagagcaccgacgaagggaagaggaaatgatacgtcatagggaacaggaagaattgagaaggcagcaggaagggttcaagcccaactacatggagaacagagaacaagaaatgcgcatgggagacatggggcctagaggtgccatcaacatgggcgacgccttctccccagctccagctggtaaccagggtccgccgcccatgatggggatgaatatgaacaatagggctactataccagggccacctatgggacccggtcctgctatgggacctgaaggggccgctaatatgggcacccccatgatgcctgacaatggcgcagtccacaacgaccggtttccgcagggacctccaagccagatgggctccccaatgggatccaggaccggttcggagactccacaggcccctatgtcaggcgtggggccagtgagcggggggccgggcggctttgggcgcggaagccaaggtggcaactttgaaggtcccaacaaacgccgccgctactag

SEQ ID NO: 198681 - DNA, 747 bp, synthetic construct
  misc_feature 1..747: note = Description of Artificial Sequence: Synthetic coding sequence
  source 1..747: mol_type = other DNA
atgatgctgcggggcaacctgaagcaggtgcggatcgagaagaacccagcgcggctgcgagcattggagtctgcagtgggcgagagcgagcccgccgcagccgcagccatggcactcgcactggccggtgagccagcaccacccgcccctgctccccccgaagaccatcctgacgaggaaatgggattcaccattgacattaaaagcttcctgaagccaggggaaaaaacctacactcaaaggtgcaggcttttcgtcggtaacctgcccaccgacattaccgaggaggatttcaaacgattatttgaaaggtatggggagccaagtgaggttttcattaatagagaccggggattcggttttattcggcttgagagcaggacactggctgagatcgccaaagctgaactggacggtacaattcttaagtctcgccccctgaggatcaggttcgccactcatggagccgctctgaccgttaagaacctttctccagtagtgtctaatgagcttcttgaacaggcattttcacaattcgggcccgttgaaaaggccgtcgtggtagtcgacgaccggggacgggctaccgggaaggggtttgttgaattcgctgccaagccacccgcaaggaaggccttggagcggtgcggcgatggggctttcctccttaccactacccctcgccctgtgatcgtggaacctatggagcagttcgatgatgaagacggactgccggagaaactatag

SEQ ID NO: 198682 - DNA, 309 bp, synthetic construct
  misc_feature 1..309: note = Description of Artificial Sequence: Synthetic coding sequence
  source 1..309: mol_type = other DNA
atgagcgagaagagcgtggaggccgccgccgagctgagcgccaaggatttgaaggaaaagaaggaaaaagtcgaagagaaggcctccaggaaggagcggaaaaaggaggtcgtggaggaggaggagaatggagcagaagaagaggaggaagagactgctgaagacggggaagaggaggatgagggcgaggaagaagatgaagaagaggaggaagaggacgatgaaggtccagcccttaagcgggctgccgaagaggaagatgaggcagatcctaaacggcagaagacagagaatggagctagtgcctag

SEQ ID NO: 198683 - DNA, 315 bp, synthetic construct
  misc_feature 1..315: note = Description of Artificial Sequence: Synthetic coding sequence
  source 1..315: mol_type = other DNA
atgagcgagaagagcgtggaggccgccgccgagctgagcgccaaggacttgaaagagaagaaagaaaaagtagaggagaaagcgagccgaaaggagcgtaaaaaagaggtggtcgaggccccggtgcccttggtggttatggtaggcaaagcctgttctcagcctgaggccactcctagccccggaccccataggcgaagacggacaggcctacgaaggaaaaagaagaagctgccacgcatggaaagaagaaagatgaaaggcaaaaagaaaatgcgtaagaagaaaaaacggatgatgaaaggtcctaggtag

SEQ ID NO: 198684 - DNA, 306 bp, synthetic construct
  misc_feature 1..306: note = Description of Artificial Sequence: Synthetic coding sequence
  source 1..306: mol_type = other DNA
agccgggaccccgcctgccgggccgccgagctgagcgccaaggacttaaaggagaagaaggaaaaggtggaggaaaaggctagtaggaaggagcgcaagaaggaggttgtcgaggaagaggagaatggcgccgaagaagaagaggaggagacagccgaggatggtgaagaagaagatgaaggcgaggaagaagacgaggaagaggaggaggaggacgacgaggggccagccctgaagagggcggctgaggaggaggatgaggcagatcctaagagacagaaaacagaaaatggtgcgtcagcctag

SEQ ID NO: 198685 - DNA, 528 bp, synthetic construct
  misc_feature 1..528: note = Description of Artificial Sequence: Synthetic coding sequence
  source 1..528: mol_type = other DNA
atgcagcggcggctggtgcagcagtggagcgtggccgtgttcctgttaagctacgcggtgcccagttgcgggcggagtgtggaggggctgtctaggcgccttaagagggctgttagcgaacaccagttgttacatgataagggtaagtcgatccaggatttgcggcgcaggttctttctgcatcacttgatcgctgaaatccatacagctgagatccgagccacaagcgaagtgagcccaaactccaagccttctcctaacacgaagaaccatccggtgcgtttcgggagcgacgatgaaggcagatatttaacacaagagactaacaaggtggagacctataaagagcagccacttaaaacccccggaaagaagaagaaaggaaagcctgggaaaaggaaggagcaggagaaaaagaagcggaggacaaggagtgcttggttagattctggtgtgacaggctctggcctggaaggggaccatctttccgacacatccactactagtctggagttagactcccgctag

SEQ ID NO: 198686 - DNA, 630 bp, synthetic construct
  misc_feature 1..630: note = Description of Artificial Sequence: Synthetic coding sequence
  source 1..630: mol_type = other DNA
atgcagcggcggctggtgcagcagtggagcgtggccgtgttcctgctatcgtacgccgtaccctcctgcggcagatctgtggagggattgagccggagactcaagagagctgtgtccgaacatcaactcctgcatgacaaagggaagtccattcaggatctgcggagaaggttttttctgcaccacctaatagccgaaattcataccgctgaaatccgcgctacgtcagaggtctcccctaattccaagccgtcacctaacactaagaatcaccctgtgagattcgggagcgatgatgaggggcggtatttaacccaggaaaccaacaaggtggagacctacaaagagcagcctctgaaaacaccagggaagaagaagaagggcaagccaggcaaaaggaaggaacaggaaaagaaaaaacggagaacgcggtctgcctggctggactctggggttactggatccggcctggaaggggaccacctttctgacaccagcacaactagcctggaactggactctagaaccgccttgctgtggggactcaaaaagaagaaagagaataatcgccgtacccaccacatgcaactgatgatctcgttgtttaagagcccacttcttctgctatag

SEQ ID NO: 198687 - DNA, 528 bp, synthetic construct
  misc_feature 1..528: note = Description of Artificial Sequence: Synthetic coding sequence
  source 1..528: mol_type = other DNA
atgcagcggcggctggtgcagcagtggagcgtggccgtgttcctgctatcatacgccgtcccatcttgtggaaggagtgtcgaggggctgtctaggcgactcaagcgcgccgtcagcgaacaccagttactgcatgacaaaggcaagtccattcaggatttgaggcgacgcttttttttacatcacttaattgcagaaatccataccgcagaaatacgcgcgacttccgaggttagtcctaacagtaaacctagtcctaacactaagaaccaccctgtgcgatttggcagcgacgacgagggaagatacttaacccaggagaccaataaagtcgagacttacaaagaacaacctctgaagactcccggtaaaaaaaaaaaggggaaacccggtaaacggaaagaacaggaaaaaaagaagcgcagaactaggagcgcctggctagattcaggagtcaccgggagcgggttagagggagatcatctgagtgacaccagcacaacttccctagagttagattcgcggtag

SEQ ID NO: 198688 - DNA, 534 bp, synthetic construct
  misc_feature 1..534: note = Description of Artificial Sequence: Synthetic coding sequence
  source 1..534: mol_type = other DNA
atgcagcggcggctggtgcagcagtggagcgtggccgtgttcctgttgtcctacgcagtcccgtcttgcggacgctccgtggaaggcctgagtcgccgcttgaaacgggccgtgagcgaacaccagctgctgcacgacaaagggaaatccatccaggatctccgccggcgttttttcttgcaccatttgatcgctgagatccacaccgctgagattcgggcaaccagcgaggtgtcgccgaattcaaaaccctccccaaataccaagaaccacccagtgaggttcggctccgatgacgaaggaagataccttacacaggagacgaacaaagtggagacatacaaagagcaacccttgaaaacacccggaaaaaagaaaaaggggaaacccggaaagcgaaaggaacaggagaaaaagaagcgccggacaagatcagcttggctagattccggagttactggctccgggctggaaggcgaccacttaagtgatacgtctactacaagcctcgagctcgattcccgccgccattag

SEQ ID NO: 198689 - DNA, 528 bp, synthetic construct
  misc_feature 1..528: note = Description of Artificial Sequence: Synthetic coding sequence
  source 1..528: mol_type = other DNA
atgcagcggcggctggtgcagcagtggagcgtggccgtgttcctgttgtcctatgccgtgcccagctgtgggagaagcgttgagggcctttcgaggcgcttgaagcgagcggtatcagaacaccagctcctccatgacaagggtaagagcatccaagatctgcggaggcggttttttctgcaccacctgattgctgaaattcataccgctgagatcagggctaccagcgaagttagtccaaactctaaacctagcccgaacaccaagaaccaccctgtgaggttcggatctgacgatgagggacgctatctgacccaggagaccaataaggtggaaacctacaaggagcagccactgaaaactccgggcaaaaagaagaaggggaaacctggcaagcgaaaggaacaggaaaagaagaaacgtcggacccgcagcgcctggttagacagcggagttaccggaagtgggctggagggcgaccatcttagtgacaccagcactacgagcctggaactggacagccgttag

SEQ ID NO: 198690 - DNA, 81 bp, synthetic construct
  misc_feature 1..81: note = Description of Artificial Sequence: Synthetic coding sequence
  source 1..81: mol_type = other DNA
accgccctgctgtggggcctgaagaagaagggcaagcagcagaagaacacttcctatgccaccaacgacctcataatctag

SEQ ID NO: 198691 - DNA, 630 bp, synthetic construct
  misc_feature 1..630: note = Description of Artificial Sequence: Synthetic coding sequence
  source 1..630: mol_type = other DNA
atgcagcggcggctggtgcagcagtggagcgtggccgtgttcctgctaagctacgccgtcccaagctgcggacgcagcgtggaggggctttcaagacgactcaaaagagccgtgtccgagcaccagctgctgcatgataaaggtaagtcaattcaagacctgagacgaaggttctttttacaccaccttatcgccgagattcacacggcggagatccgcgcaacttctgaggtctctcctaattccaagccctctcccaacactaagaatcatcccgttaggtttgggtcagacgatgaaggaaggtatctaacacaggagaccaacaaagtggagacttacaaggaacagccccttaagactcctgggaagaagaagaaaggaaagcctggcaaacgcaaggaacaagaaaaaaagaagagacggacacggtctgcatggctggactcaggcgtgactgggagcggtttggagggcgatcacctcagcgacacgagtaccacgtctctggagctcgattctcgtacagcgctactgtgggggctgaaaaaaaagaaggagaataacaggcggacccaccacatgcagctgatgattagcctgttcaagtcccctctcctactgctgtag

SEQ ID NO: 198692 - DNA, 534 bp, synthetic construct
  misc_feature 1..534: note = Description of Artificial Sequence: Synthetic coding sequence
  source 1..534: mol_type = other DNA
atgcagcggcggctggtgcagcagtggagcgtggccgtgttcctgttgtcttatgcagtaccaagctgtggccgctccgtggagggcctgtcccggcggttgaagcgtgccgtgtccgaacaccagctactgcacgataaggggaagtcaatacaggacctacgccgcaggttctttctccaccatctcattgccgaaatccatacagccgagatcagggctaccagcgaggtctcccccaattccaagccaagtcccaacaccaaaaaccacccagttcggttcggctctgatgatgaggggcgttacctgactcaagagaccaataaggtggagacttacaaggaacagcccttgaaaactccgggcaagaaaaaaaaaggcaagcctggcaaacgcaaagaacaggaaaaaaaaaaacgccgcacccgtagtgcctggctggacagtggcgtcacaggttctggactggaaggggatcacctctccgacacatcgacaacaagcttagagctggactcgaggagacactag

SEQ ID NO: 198693 - DNA, 519 bp, synthetic construct
  misc_feature 1..519: note = Description of Artificial Sequence: Synthetic coding sequence
  source 1..519: mol_type = other DNA
atgcagcggcggctggtgcagcagtggagcgtggccgtgttcctgctttcctacgccgtgccctcatgcggaagatccgttgaaggtctgtccagacgccttaagagagcagtttcggagcaccaactgctgcacgacaaaggaaagtccattcaagatctgcgaagaagatttttcttgcaccacctgattgctgaaatccacacagcagagattcgtgccacgagtgaggtgtcaccaaattcaaagccgtctcccaacacaaaaaatcacccggtccgctttggcagtgatgatgaaggcagatatttaactcaggagacaaacaaggtagagacctacaaggaacagccgctcaaaactcctgggaaaaaaaaaaagggcaaacctggcaagcggaaagaacaggagaaaaagaagaggagaactcgatccgcatggctagattctggcgtaactggaagcggacttgaaggcgaccatctttccgacacctccaccacctccttggagctctag

SEQ ID NO: 198694 - DNA, 534 bp, synthetic construct
  misc_feature 1..534: note = Description of Artificial Sequence: Synthetic coding sequence
  source 1..534: mol_type = other DNA
atgcagcggcggctggtgcagcagtggagcgtggccgtgttcctgttgtcttacgctgtacctagttgcggccgctctgtggaaggcttatccaggagactaaaaagggccgtgtccgaacatcagctgctgcacgacaaggggaagtccatccaggacctgaggaggagattcttcttgcaccaccttatcgctgaaatccacaccgcagagatccgcgctacctcagaggtctcccccaactccaagccgagtccaaatacaaagaatcaccccgtcaggttcggatccgatgacgaggggcggtatctgactcaggagactaataaggtggagacttacaaagaacagccattaaagacacccggaaaaaaaaagaagggaaaaccaggaaaacggaaagaacaggagaaaaagaaacgacgaactcgttcggcctggttggattcaggcgtgactggatctggactagagggagaccacctgagtgacacatctacaacatctctggaactagactctcgacgccactag

SEQ ID NO: 198695 - DNA, 891 bp, synthetic construct
  misc_feature 1..891: note = Description of Artificial Sequence: Synthetic coding sequence
  source 1..891: mol_type = other DNA
atggtggccgagaaggagaccctgagcctgaacaagtgccccgacaagatgccaaaaaggactaaactccttgcccagcaaccgctgcccgtgcaccaaccacattcactggtgtccgaaggatttactgtgaaagccatgatgaaaaatagcgtcgttcgcggaccacctgcagcaggcgcattcaaagaaagacccaccaaaccaaccgcttttcggaaattttacgagaggggtgactttcctatagcccttgaacatgacagcaaagggaataagattgcctggaaagtggagatagagaagctcgactatcaccattatctgcctctgttcttcgatgggctttgtgagatgacttttccctatgagttcttcgcacgtcagggtatccacgacatgttggaacacggaggcaataaaatcctccccgtgctgccccagctcattattcctattaagaacgccttaaatctgcgtaaccgccaggtcatatgcgtgactctgaaggtgctgcaacacctcgtggtgagcgccgaaatggtcgggaaagcgctcgtgccctattataggcagattctccccgtactgaacatattcaaaaacatgaatggaagttactcgctgccaagattagaatgtagcggcgccatcatggcacgctgcaatctcgatcacctcgggtcgtcggaccctccaacatcggcctctcaggtggccgaaatcatcgtgaatagtggggatggtatcgactactctcaacagaagagagagaatatcggagacctgatccaggagaccttggaagccttcgaaaggtacggaggcgagaatgcctttattaacatcaagtatgttgtcccaacatatgagtcctgcctcctaaactag

SEQ ID NO: 198696 - DNA, 774 bp, synthetic construct
  misc_feature 1..774: note = Description of Artificial Sequence: Synthetic coding sequence
  source 1..774: mol_type = other DNA
atggtggccgagaaggagaccctgagcctgaacaagtgccccgacaagatgcccaagcggacgaaattgctggcccagcagccgctcccggttcaccagccgcattcacttgtatccgagggtttcacggtgaaagccatgatgaagaactcagtggtgcggggcccacccgccgccggcgccttcaaggaacgaccaactaagcccacggcttttcggaagttctacgaaaggggcgactttccgatcgccctggagcacgactctaaggggaataaaatcgcttggaaggtggagattgaaaagctggactaccatcattacctgccactatttttcgatggactgtgtgagatgacattcccttacgagtttttcgccaggcagggtatacacgatatgctggagcatggcggtaataagatcctcccggtccttccacagctcattatccccatcaagaacgccctcaatcttagaaatcgccaggtaatttgtgtgaccctgaaggtgctacagcatttggtcgtttccgcggaaatggtgggtaaggcgctcgtgccctattaccggcagattcttcccgtcctgaacatattcaagaatatgaacgtgaactcaggtgacggcatcgactacagccagcaaaagagagagaacattggggacctcatccaggaaacgctggaggcttttgaacgctacgggggagaaaatgccttcataaatatcaaatatgttgtccccacttacgaatcctgtctgctcaattag

SEQ ID NO: 198697 - DNA, 774 bp, synthetic construct
  misc_feature 1..774: note = Description of Artificial Sequence: Synthetic coding sequence
  source 1..774: mol_type = other DNA
atggtggccgagaaggagaccctgagcctgaacaagtgccccgacaaaatgccaaagcgtacaaagctgctggcccagcagcctctgcccgtgcatcagccacatagcctggtttcagaggggtttactgtcaaggctatgatgaagaattcagtggttcgagggccaccggctgccggagctttcaaggagcggcccacaaaacccacagcctttcgcaagttctatgaaagaggtgactttcctattgccctcgagcacgacagcaaaggcaataaaatcgcttggaaggttgagatcgaaaaactggactaccaccattacctcccccttttttttgatgggctgtgcgagatgacgttcccctatgagttcttcgctaggcaaggaattcatgatatgctggaacacggcggaaacaagattctcccagtgctgccacagctcataattcctatcaaaaatgcccttaatctgcgaaacagacaggtgatctgcgtaaccctcaaggttctgcaacatttagtagtttcagctgaaatggtcggcaaagctcttgtgccttattatcgacagatactgcctgtgttaaatatatttaaaaacatgaacgtcaattctggcgacggcatcgattactctcagcagaagcgggagaatataggcgaccttatccaagaaactcttgaggcatttgagagatacggtggagagaacgccttcattaacatcaagtacgtggtacccacatacgaatcctgtttactaaattag

SEQ ID NO: 198698 - DNA, 825 bp, synthetic construct
  misc_feature 1..825: note = Description of Artificial Sequence: Synthetic coding sequence
  source 1..825: mol_type = other DNA
atgagcggcgagtgccagagcccccactgccccggcaccagcgccgaatttttcttcaagtgtggggctcatccgacgagcgataaggagacaagtgtagctctgcatttaatcgccacgaacagccgcaatatcacctgcatcacctgtacagatgttcgctcaccagtgcttgtgtttcagtgcaattcacggcacgtaatttgcctcgattgttttcatctgtattgtgtgactaggctgaatgaccgccagtttgtgcacgatccacagctggggtattccctgccttgcgtggctggatgccctaacagtctgattaaggagcttcatcatttcaggattctcggagaggaacaatataaccggtatcagcagtatggagccgaagaatgcgtgctccagatgggtggtgtgttgtgcccacgccccggctgcggtgcgggacttctgccagaacccgaccagcgaaaagtgacctgcgagggaggaaacggcctcggatgcggatttgctttctgccgggagtgcaaggaagcataccatgaaggcgagtgttcagctgtttttgaggcctctgggaccaccacccaggcctacagagtggatgaacgggccgcagagcaggctaggtgggaagccgccagcaaggagaccattaagaagacaacaaaaccatgccccaggtgtcacgtaccagttgaaaagaacggaggctgtatgcacatgaagtgcccccaacctcagtgtaggctggaatggtgttggaactgtggatgtgagtggaacagggtgtgtatgggcgatcactggttcgatgtgtag

SEQ ID NO: 198699 - DNA, 1107 bp, synthetic construct
  misc_feature 1..1107: note = Description of Artificial Sequence: Synthetic coding sequence
  source 1..1107: mol_type = other DNA
atgatcgtgttcgtgcggttcaacagcagccacggcttccccgtggaagtcgacagcgatacaagcatattccagctgaaggaggtcgtcgccaaacgtcaaggagtgccagcggaccaattgcgcgtgatatttgctggcaaagagctgagaaacgactggacagtgcagaattgtgatctggatcagcagtctattgtgcacatcgtccagaggccttggcgcaagggccaagagatgaacgcaacgggaggcgatgatcccaggaatgcagcagggggatgtgaacgcgagcctcaatccttgacccgggtcgacctgtcttctagcgtgctgcccggggactccgtcggactggccgtgatactgcacactgactcccggaaggactcccctccggcaggctcccctgccggcagaagcatctacaattctttctacgtgtactgcaaaggtccctgtcagcgggtgcagccgggaaaactgagagtacagtgctccacctgcagacaggccacacttacactgactcaggggcctagctgctgggatgatgttctgatcccaaaccgtatgtcgggtgagtgccagtccccgcactgcccgggcacctccgctgaattctttttcaagtgcggggctcatccaacatctgataaggagacctcggtggctctgcaccttatcgccacaaactcacgaaacattacatgtatcacttgtaccgacgtgaggtctcccgtcctcgtctttcaatgcaatagtcgccatgtgatttgtctggattgttttcatctgtattgtgtgacaaggctgaatgatcgacagtttgtgcacgatccccagctcgggtattcacttccatgcgttgcaggatgtcctaacagccttatcaaagagttgcaccattttcgcattctgggggaggagcagtacaaccggtaccagcagtacggggctgaggagtgcgtgctgcagatgggaggtgtgctgtgccctcgacctggatgtggcgctgggttattgcctgagccagaccagcggaaggtcacctgcgaaggcggaaacgggctcgggtgcggatacggtcagcggagaacaaagtag

SEQ ID NO: 198700 - DNA, 825 bp, synthetic construct
  misc_feature 1..825: note = Description of Artificial Sequence: Synthetic coding sequence
  source 1..825: mol_type = other DNA
atgagcggcgagtgccagagcccccactgccccggcaccagcgccgaattttttttcaagtgtggcgctcatccaaccagcgacaaagaaacttcagttgcattacatcttatagcaaccaattctcggaacataacgtgtatcacttgtaccgatgtgagatctccggttctcgtgttccagtgcaattcacggcatgtcatctgcctggactgcttccacctctattgtgtcactaggctgaacgatcgacagttcgtgcacgacccacagttgggatattctcttccttgtgtggcaggttgccccaattcactaataaaggagctccatcactttcggatactgggtgaagaacagtataatcgttaccagcagtacggcgccgaggaatgcgtattacagatggggggagttttatgcccgcgccctggctgtggggccggccttctcccagagcccgaccagagaaaggtgacatgcgaaggcggcaacggactgggctgtgggttcgctttttgtagggagtgtaaggaggcataccacgagggggagtgctcagctgtctttgaggccagcggcaccacgacgcaggcctatagagtggacgaacgcgcagcggagcaggcgcggtgggaagcagcgagcaaagaaaccattaagaaaactacaaagccttgtcctagatgccacgtgcccgtggaaaagaatgggggatgtatgcacatgaaatgtcctcagccccagtgtaggttagagtggtgttggaactgtggctgtgaatggaatagagtgtgtatgggggaccattggtttgacgtatag

SEQ ID NO: 198701 - DNA, 657 bp, synthetic construct
  misc_feature 1..657: note = Description of Artificial Sequence: Synthetic coding sequence
  source 1..657: mol_type = other DNA
atgaacgccaccggcggcgacgacccccggaacgccgccggcggctgcgaaagggaaccgcagagcctgacaagagtggatctcagcagttccgtactgcccggggattccgtggggctggctgtaatcctgcataccgattcgcggaaagactcccccccagcgggtagtcctgccggcagaagtatttataatagcttttatgtgtattgcaaggggccatgccagcgtgtccaaccggggaagctgagggttcaatgtagcacttgcaggcaggctacattgacactgacacaaggacctagttgctgggacgacgtgttgattcccaataggatgtcaggtgaatgtcagagtccacactgccccggaaccagcgctgaattcttttttaagtgcggcgcccaccctaccagcgacaaggagacctccgtggccctgcacctgattgctaccaatagtagaaatattacatgcatcacctgtaccgatgtgaggagtcccgtcttagtgttccaatgtaattcacgtcatgtcatatgtcttgactgtttccatctgtactgcgtgactcgcctgaatgacagacagttcgtgcacgacccgcaattaggctatagtctcccttgcgttgtgagcctcctgcctagccagtag

SEQ ID NO: 198702 - DNA, 951 bp, synthetic construct
  misc_feature 1..951: note = Description of Artificial Sequence: Synthetic coding sequence
  source 1..951: mol_type = other DNA
atgatcgtgttcgtgcggttcaacagcagccacggcttccccgtggaggttgactcagacacttcgatttttcaattaaaagaagtggtagccaaacgacagggcgtgcccgctgaccaattgagagttatctttgctggcaaagaacttcggaatgattggactgtccaagagttcttctttaaatgtggtgcccatccaacatccgacaaagagacttccgtggccctgcaccttatcgctaccaactccagaaatattacgtgcatcacatgcaccgacgtgcgcagtcctgtccttgtttttcagtgcaatagcagacacgtgatctgtctggattgttttcacctgtactgcgtcacaaggctgaacgaccgccagtttgtgcacgacccacagctcgggtattctttgccatgtgtggccggctgcccaaactccctcatcaaggagctacatcacttcaggatcctgggtgaggagcaatataaccgttaccagcagtatggggcagaggaatgtgtgctccagatgggaggcgttctgtgtccccgcccggggtgcggagctggattactgccggagcctgatcaacggaaagtgacctgcgaagggggtaatgggctggggtgcgggttcgccttctgcagagaatgtaaagaggcctaccacgagggagaatgcagtgcggtcttcgaggccagtgggacaacaacgcaggcttaccgggtcgacgagcgggcggccgagcaagctcgctgggaggctgctagcaaagaaacaatcaagaagaccactaagccctgtcccaggtgtcatgtgcctgtggagaaaaacggggggtgcatgcacatgaaatgccctcagccgcagtgtaggctcgaatggtgctggaactgtggctgcgagtggaatcgggtttgcatgggggaccattggttcgacgtttag

SEQ ID NO: 198703 - DNA, 1314 bp, synthetic construct
  misc_feature 1..1314: note = Description of Artificial Sequence: Synthetic coding sequence
  source 1..1314: mol_type = other DNA
atgatcgtgttcgtgcggttcaacagcagccacggcttccccgtggaggtggatagcgacaccagtattttccagctgaaagaagtggtcgctaagcgccagggcgttccagctgatcaactgagagttatctttgccgggaaggagcttcgcaatgactggactgtacaaaattgtgacctagatcaacaatcaatcgtgcatattgtgcagaggccgtggcgtaaagggcaagagatgaacgccactggcggagacgacccaaggaacgccgcgggcggctgcgagcgggagcctcagagtctcactcgcgtggacctgagttcttccgtcttgcctggggattcagtggggctggcagtgatcctgcacaccgacagccgaaaggattcaccacccgccgggtcccccgccggacgctcaatctacaactccttctacgtgtactgcaaagggccatgccagcgggtgcaacccggcaaactcagggttcagtgctctacatgtcgccaggcaactcttaccctcactcaggaattcttctttaagtgtggggctcaccctacctctgacaaagagacctccgtcgctctgcatctcatcgcaaccaatagccgaaacataacgtgtattacctgcaccgatgtccgatcccctgtgctcgttttccagtgtaattcccgacacgttatctgccttgactgcttccacctttactgcgtgacaagactgaacgatcgacaatttgtgcacgatccccagctggggtactcgctcccgtgcgtcgccggttgccccaactctctgattaaagaacttcatcacttcagaattcttggggaagagcagtacaatagataccagcagtacggagctgaagagtgcgtgctgcagatgggcggggtgctctgccccagacctggttgtggggccggtttgctgccagagcctgatcagcggaaagtcacatgtgaaggaggcaatggattgggttgtggatttgcattctgtcgggaatgtaaggaggcctaccacgaaggagagtgctccgccgtattcgaagcatcagggactacaacacaggcatatcgagtggacgaacgggcggccgagcaggcccgctgggaagccgcatcaaaggagacaatcaagaagactactaaaccgtgtcccaggtgccatgtccctgtcgagaagaacggagggtgcatgcatatgaagtgtcctcagcctcagtgtaggttggaatggtgctggaattgtggatgtgagtggaatcgcgtttgcatgggcgaccactggttcgacgtatag

SEQ ID NO: 198704 - DNA, 1398 bp, synthetic construct
  misc_feature 1..1398: note = Description of Artificial Sequence: Synthetic coding sequence
  source 1..1398: mol_type = other DNA
atgatcgtgttcgtgcggttcaacagcagccacggcttccccgtggaggtggacagcgatactagcatcttccagctgaaagaggtggtggccaaaagacaaggagtgcctgccgaccagctgagggtgatcttcgccggcaaagaactgcgaaatgactggacggtgcagaactgcgacctggaccagcaaagtattgtccacatcgtccagcggccttggaggaagggccaggagatgaacgcaactggcggggacgatcccaggaatgccgctggaggctgtgagcgggaaccacagtctttaactcgcgtggacctgagcagctcggtcctgccaggtgatagcgtgggcttagctgtcatcctgcacacggactcccggaaagattctccaccggccggctcgcctgctggtaggtcaatctacaatagcttctatgtgtactgcaagggcccttgtcagagagtccaaccagggaagttgcgagtgcaatgttctacatgtcgtcaagccacactcaccctgacccagggaccttcctgctgggatgatgtcctcattcccaaccgcatgtctggagaatgtcagagtccccattgccctggcacgagtgctgagttctttttcaagtgcggcgctcaccccacaagcgacaaggagacatcagttgccctgcatctgatcgcgactaattctaggaatattacatgcatcacttgcactgacgtgcgctcccccgttctggtgttccaatgtaattctaggcatgtgatctgcctggactgtttccatctgtactgcgtcacgcgtctgaatgatcgccaatttgtccatgacccccagctggggtactcactgccatgcgttgccgggtgtcccaacagcctcattaaagaactgcaccatttccgtatcctcggggaggagcagtacaatcggtaccaacaatacggggctgaagagtgtgtactgcagatgggaggagttttatgcccgcggccaggctgtggagccggcctgctccctgagccagatcagcgtaaggttacttgcgaaggcgggaacgggctaggatgtggcttcgccttctgtagggagtgcaaggaagcctaccacgagggggaatgctccgctgtcttcgaggcaagtggtaccaccacacaggcttaccgcgttgacgagagagcagcagaacaggctaggtgggaggcagccagcaaagagactatcaagaagactacaaagccttgtcctcgctgtcacgtccctgtggaaaagaacggaggatgtatgcacatgaagtgtcctcagccccagtgccgcttggagtggtgttggaactgcgggtgtgagtggaatcgggtgtgcatgggagaccattggttcgacgtgtag

SEQ ID NO: 198705 - DNA, 612 bp, synthetic construct
  misc_feature 1..612: note = Description of Artificial Sequence: Synthetic coding sequence
  source 1..612: mol_type = other DNA
atgagcggcgagtgccagagcccccactgccccggcaccagcgccgagttcttcttcaagtgcggggcccacccaacctctgacaaagaaacatccgtcgctttgcatttaattgccacaaacagcagaaatattacctgtatcacttgcacagacgttaggagtcctgtgctggtctttcagtgcaacagcaggcacgttatctgcctagactgttttcacctctactgcgttacaaggctgaatgataggcagtttgttcacgatccacagcttggttattcacttccatgtgtggcaggttgtcctaactccctcataaaggaactgcaccacttccgcatcctgggcgaagagcaatataacaggtaccaacagtatggggcggaagagtgtgtactacagatggggggagtgctttgccccagacccggttgtggggctgggttgctgcctgagccggatcagaggaaggtcacttgtgagggcggaaatgggttaggctgtggttttgccttctgccgtgagtgcaaggaagcctaccacgaaggcgagtgcagcgccgtcttcgaggccagtggcactaccacccaacactctggttgcacttag

SEQ ID NO: 198706 - DNA, 429 bp, synthetic construct
  misc_feature 1..429: note = Description of Artificial Sequence: Synthetic coding sequence
  source 1..429: mol_type = other DNA
agcgtgttcgtgcggttcaacagcagccacggcttccccgtggaggtggacagcgatacgtcaattttccaactgaaggaggtggtggccaaacgtcaaggggtgcctgcggatcagttacgcgtaattttcgcgggcaaagaattgaggaacgattggacagtacaaaattgcgacttggatcaacagagcatagtgcatatcgtccagaggccctggcgcaaaggacaggagatgaacgcaaccggcggagacgaccctaggaacgcagcaggcggctgcgaaagagagccacaaagcctgacacgggttgatttgtccagctcagtgttgcccggtgactctgtcgggttggcagtgattctccacaccgactctaggaaggattctccccccgctggaagccctggaaactgtctgcacggctag

SEQ ID NO: 198707 - DNA, 429 bp, synthetic construct
  misc_feature 1..429: note = Description of Artificial Sequence: Synthetic coding sequence
  source 1..429: mol_type = other DNA
atggccgccgtggtggccgccaccgccctgaagggccggggcgccagaaatgccagggtgctacgtggcattctggccggagccactgccaataaggcgagccataatcggacgagagcccttcagagccacagctcacccgaggggaaagaagaacctgagccactgtcccccgaattagagtacatcccacgaaagcgtggaaaaaacccgatgaaagccgtgggattagcctgggctattggctttccttgtggcatcctgcttttcattctgacaaagcgagaggtcgacaaagacagagtgaagcagatgaaagccagacaaaacatgcgactgtcaaacaccggtgaatacgagagccagagattcagagccagcagtcaatctgcccccagtcctgacgtggggtctggggtgcagacctag

SEQ ID NO: 198708 - DNA, 1086 bp, synthetic construct
  misc_feature 1..1086: note = Description of Artificial Sequence: Synthetic coding sequence
  source 1..1086: mol_type = other DNA
atggcctggcagggctggcccgccgcctggcagtgggtggccggctgttggctgctgttagtgctcgtgctggtcctgctggtcagtccccgaggctgcagggcaaggcgaggactcagagggctcctgatggcacacagccaacgcctgctgttccgtatcggatattctctgtacacacgaacatggcttggctatctattttacagacaacagcttagacgggctcgcaacagatacccaaaggggcacagcaagacccagcccaggctgttcaatggcgtgaaagtgctgccgataccagtgctgagtgataattactcttacctgattatcgacacgcaggcccagctggctgttgccgtggacccatctgacccgcgggctgtgcaggcctcaattgagaaggaaggggtgactctcgtagcaatcctctgtacccataagcactgggaccattctgggggcaatcgggacctgagtaggagacatcgagactgccgggtgtatggttctcctcaggatggcattccatatctcacgcatccactctgtcaccaggacgttgtgtctgttggtcgacttcaaatacgggccttggctactcccgggcatacccagggacatctggtctatcttttggacggcgagccctacaaggggccaagttgtctattctctggcgaccttctcttcctgtctggctgcgggaggacattcgaaggaaatgcagaaacaatgctttctagcctggataccgtgttgggacttggggacgatacactcctctggccgggacatgagtatgcagaggaaaatctggggttcgcgggagtggtggagccggagaacttagcccgagagcgaaaaatgcaatgggtccagagacagcggctggaacgaaagggaacctgtcccagcaccctcggtgaagagcgttcatacaatccgttcttacgaacccattgccttgctcttcaggaagctctaggccccggccccggccccactggtgacgacgattactctagagcacagctgctggaggaactgcggcggttgaaggatatgcacaaatctaagtag

SEQ ID NO: 198709 - DNA, 1158 bp, synthetic construct
  misc_feature 1..1158: note = Description of Artificial Sequence: Synthetic coding sequence
  source 1..1158: mol_type = other DNA
atggccgccgtggtggccgccaccgccctgaagggccggggcgcccgtaacgcccgggttcttcgggggatcctggcaggtgcaactgcaaataaggcctctcacaacagaacccgcgcactgcaatcacacagctcgccagagggcaaggaagagcccgaaccactgagtcccgagctggagtatattccgaggaagcggggcaaaaatcccatgaaagctgtgggtctggcctggtattccctctacacaaggacttggttgggatatctgttctacagacagcagcttagacgggccagaaacaggtatccgaaggggcacagtaagacacagccccggctatttaacggcgttaaagtcctgcctataccagtgctgtcagacaactactcatacttgatcattgacactcaggcccagctggcagtggctgtagatccctccgacccaagagccgtccaggcgtctatcgagaaggaaggtgtcacactggtcgcgatcctctgcacccacaaacattgggaccactccggcggtaacagagatctctctagacgccacagagattgcagagtgtacggcagcccccaggacggcattccatacctgacccatccactgtgtcatcaagatgtcgttagcgtcggacggttacagattagggcgcttgcgacgccagggcatacacagggccacctcgtatatcttctcgatggagagccgtataagggtccctcctgtttgttttcaggcgatctcctattcctgtccggttgcggcagaacattcgaagggaatgctgagaccatgctttcttccctcgacactgtgctggggttaggagatgacacactgctctggccaggccatgagtacgcagaagaaaatttgggcttcgccggcgtggtcgaacctgaaaacctcgccagagaacgcaaaatgcaatgggtccagcggcagcgcctggaaagaaagggaacctgtccatccaccctgggggaggaacgatcttataacccattcctgaggacccattgcctggctcttcaagaagccctaggcccaggacccgggcccacaggggacgacgattatagccgtgctcagctgctcgaggagctgaggcgattaaaagacatgcataagagtaagtag

SEQ ID NO: 198710 - DNA, 1455 bp, synthetic construct
  misc_feature 1..1455: note = Description of Artificial Sequence: Synthetic coding sequence
  source 1..1455: mol_type = other DNA
atggccgccggcggcgaccacggcagccccgacagctaccggagccccctggcaagcaggtatgcgtcacccgagatgtgtttcgtgttttctgatcgttataaatttcggacttggaggcagctctggttatggttggccgaggcagagcagactctcggactccctatcactgacgaacagatacaggaaatgaaaagtaacttggaaaatatcgactttaaaatggctgctgaggaagagaaacgtctaagacacgatgtcatggcccacgtccacactttcggtcattgctgcccaaaagccgctggcatcattcatctcggcgctacttcttgttatgtcggggacaatactgacctcatcatcctgaggaatgccttggacttactgttgccgaaactggctcgagttatttctcgcctggcagattttgccaaggaaagagccagcctgccaacattaggctttactcacttccagcctgcccagctgaccacagtgggcaagcgctgctgtctctggatccaggacctttgcatggacttgcaaaacttgaagagggttcgggacgacctgagatttaggggagtgaaaggcacaaccggtacgcaggcatcctttctgcagttattcgaaggggatgatcataaggtcgagcagctcgataaaatggtgaccgagaaggccgggttcaagcgggccttcattattacggggcagacatacacccggaaagtggatatagaggttctgtccgtgctggcttcgcttggagcatctgtgcataaaatatgcaccgatatcagattgctcgccaatctgaaagaaatggaggagccatttgaaaagcagcagatcggatccagcgcaatgccatacaagagaaaccctatgaggtcggagcgctgctgctccttggcccggcacctcatgaccttggtcatggatccactgcaaacggcttcagtgcagtggtttgaacgaactttagacgatagtgctaacagacggatctgcctggccgaggcctttctgacggctgacactatcctgaacacactgcaaaacatcagcgaagggctggtggtataccctaaagtcattgaacgacggattagacaggagctgccttttatggccacagagaatatcattatggccatggtaaaagcagggggctcaagacaggactgccacgaaaaaatccgggtgttgagccagcaggctgcgtctgtggtaaagcaggaggggggtgacaacgacctcatcgaacgtatccaagtggacgcttatttctcccccattcattcccaactggaccacctgctggacccatctagcttcaccggtcgtgcttctcagcaggtgcagcggttcctcgaggaggaagtgtaccctctgctcaagccgtatgaaagtgtgatgaaagtgaaggccgagctgtgcctgtag

SEQ ID NO: 198711 - DNA, 237 bp, synthetic construct
  misc_feature 1..237: note = Description of Artificial Sequence: Synthetic coding sequence
  source 1..237: mol_type = other DNA
atggtgggcctgaagaagaagagcgccgacgacgtgaagaaggtgtttcacatgttagataaagacaaatccggctttatcgaggaagatgaactggggttcattctgaaggggttcagcccagatgcacgggacctgtcggcaaaggaaactaagatgctgatggcggctggtgataaggatggcgatggcaagattggcgtcgatgagttttcgactttggtggcggagtcctag

SEQ ID NO: 198712 - DNA, 333 bp, synthetic construct
  misc_feature 1..333: note = Description of Artificial Sequence: Synthetic coding sequence
  source 1..333: mol_type = other DNA
atgagcatgaccgacctgctgaacgccgaggacatcaagaaggccgtgggcgccttctctgctactgacagctttgatcataagaaatttttccagatggtggggctgaagaaaaagagtgctgacgatgtgaagaaggtctttcacatgctggataaggacaaatccggctttatcgaggaagatgagctgggcttcattttgaaaggattttctccagatgcccgcgatctgtctgccaaggaaacaaaaatgctgatggccgctggagataaagatggtgatggaaaaattggggtggatgagttctcaaccttagttgctgagtcctag

SEQ ID NO: 198713 - DNA, 306 bp, synthetic construct
  misc_feature 1..306: note = Description of Artificial Sequence: Synthetic coding sequence
  source 1..306: mol_type = other DNA
atgagcatgaccgacctgctgaacgccgaggacatcaagaaggccgtcggagccttttcagccactgacagtttcgatcacaaaaaattctttcagatggtcgggctgaagaaaaagtctgccgacgacgtgaaaaaggtttttcatatgctagataaagacaaaagcggctttattgaagaggacgagttgggcttcatcctcaagggcttctcacccgacgcacgcgatctatcggctaaggaaacaaaaatgttgatggccgccggagacaaagatggcgacggaaagatcggggtggattag

SEQ ID NO: 198714 - DNA, 984 bp, synthetic construct
  misc_feature 1..984: note = Description of Artificial Sequence: Synthetic coding sequence
  source 1..984: mol_type = other DNA
atgagcgacctgcaggaggagggcaagaacgccatcaacagccccatgtccccagctctggtcgatgtgcatcccgaagacactcagctggaggagaatgaggagcgtaccatgatcgaccctacttcaaaggaggaccctaagttcaaggagttggtgaaagttctgctggactggattaatgatgtgctagtggaagaacgaatcatagtgaagcaattggaagaagacttgtatgatggtcaggtgttacagaaactcctggagaagttggctgggtgtaaattgaacgttgctgaggtgacccagtctgaaatcggtcagaagcaaaaactgcagactgtgcttgaggctgtgcacgatctgctgcgcccccgcggctgggcgcttcggtggtccgtcgacagtatccacggaaagaacctggtcgcaatcctccaccttcttgtctcattggcaatgcactttcgtgcccctatccggcttcctgagcatgtgacagtgcaggtggtggtagtcagaaagcgtgaagggttgctccactcatcccatatatcggaagagctgactacaaccaccgaaatgatgatgggtcgcttcgaacgcgacgcgttcgataccctgtttgaccatgcgcctgacaagttgtcagtggtcaagaaaagcttaattacttttgtgaataaacatcttaataagctgaacctcgaagtcaccgagctggagacccagttcgcggatggagtttatctggttttactgatgggcctcctggaagattactttgtccctttgcaccatttctatctcactccagagagtttcgatcagaaggtgcacaacgtgtctttcgctttcgagcttatgctcgacgggggtctcaagaagccaaaagcccggcctgaggatgtagtaaacctcgacctcaagtcaaccctcagagtgctatacaacctatttacaaagtataagaacgtggaatag

SEQ ID NO: 198715 - DNA, 1239 bp, synthetic construct
  misc_feature 1..1239: note = Description of Artificial Sequence: Synthetic coding sequence
  source 1..1239: mol_type = other DNA
atgctgggcatcatccccctgcccttcggcaagccccagccccagtcacgcaggcgacccttgcggcctcctagcgcatcatccgcgtctcgtcctgctcggggcagcctgcggcgagctatggcgacctccccccaaaaatcaccgtctgttcctaaaagtcccactcccaagagccccccaagccggaaaaaggacgactcatttctgggtaaactcgggggcaccctcgctcgccgcaaaaaggcaaaggaggtctctgaactccaagaagagggcatgaacgccatcaacctacctttaagtcccattccgttcgagctggaccccgaggacactatgttagaggagaacgaagtccgcacaatggtggaccctaactctaggagcgatccaaaactgcaggaactcatgaaggtcctcatcgactggatcaatgacgtgttggtgggggaacggattatagtgaaggatttggccgaagacctgtacgatgggcaagtcctgcaaaagctgttcgagaaactggaaagcgaaaagctgaatgtggccgaggtcacacagagcgagatagctcagaagcagaaactccaaactgtgctcgaaaaaataaacgagacgctgaaactgcctcccaggtcgataaaatggaatgtggattctgtacacgcgaagagcctggttgccatcttacatctgctggtggcactatctcaatactttcgcgcccctattcgtttgcctgaccacgtgtctatacaggtcgtggtcgtgcaaaaacgggaggggatattgcaaagccgtcagatccaggaagaaattacgggaaataccgaagctctgagtggtcgccatgagcgcgatgcattcgacacattgttcgatcacgctccagacaaactgaacgtggtcaaaaagacccttatcactttcgtaaacaaacacctcaataaactgaacctggaagtgacagagctggaaactcaatttgccgatggcgtgtatctagttcttctaatgggtctacttgagggctattttgtgccactgcactcattctttctaactccagactcctttgagcagaaagtcttgaacgtctctttcgcgtttgaactcatgcaggacgggggtctggaaaagcccaagccccggccagaggacattgtcaactgcgacttaaaaagtacattacgggtactctacaatctgttcactaagtatcggaatgtcgagtag

SEQ ID NO: 198716 - DNA, 873 bp, synthetic construct
  misc_feature 1..873: note = Description of Artificial Sequence: Synthetic coding sequence
  source 1..873: mol_type = other DNA
atgaacgccatcaacctgcccctgagccccatccccttcgagctggatcccgaggatactatgctggaagaaaatgaggtgaggacaatggtcgaccccaactccagaagcgaccctaaactccaggaactgatgaaagtgcttattgactggattaatgacgtgctggtgggcgagcggattatcgtcaaagaccttgcagaggacctgtatgatggtcaggtgttgcagaagttgttcgagaaactggagtccgagaagctgaatgtcgccgaagtcacccagtccgagattgcccagaagcagaagctgcaaacggtgctggaaaaaatcaacgagacactcaagctgccacctcgttccatcaaatggaacgtggattctgtccacgcgaaatctctggtcgccatattacacttgctggtggctctgagtcagtatttccgggcccccatcagactacccgatcacgtgagcatccaggtggtggtggtgcagaagcgtgaagggattctgcagagtaggcagattcaggaggaaataaccggcaacacagaagcgctgtccggacgacacgagcgggatgcctttgacaccctctttgatcacgccccagataaacttaacgtggtgaagaaagttggaaagggatgtctcgggtggacagagggaagcgaaatgcaacagaatattgggaaaactcacccgtgcagtctgcgcgcatcttgccagaactggtggcaccacctgacctccgcccacaccggattatctcccctcccctctatgtatctctctgtcccgcactggatgctgcacctgggtctcttccctagcatttctatgaattcacttagttcgcaccccggttag

SEQ ID NO: 198717 - DNA, 1119 bp, synthetic construct
  misc_feature 1..1119: note = Description of Artificial Sequence: Synthetic coding sequence
  source 1..1119: mol_type = other DNA
atggccaccagcccccagaagagccccagcgtgcccaagagccccaccccaaagtctccaccaagcagaaaaaaagacgatagtttcttggggaagctggggggaaccttggcacgccggaagaaggctaaagaggtctcagagttgcaggaagagggcatgaatgcgattaacttgcccctgtcaccaattccgttcgaactggatcccgaggataccatgctggaggagaatgaagtacggaccatggtggatcctaactccaggagcgatcccaaactgcaggagctgatgaaagtactgatcgattggataaacgacgtgctggttggtgagcgaattatcgtgaaggatctcgccgaagatctctatgatggacaggttctccaaaaactcttcgaaaagctcgagtcagagaagctgaatgttgcagaagtgacacaaagtgagatcgcccaaaaacagaagctgcagactgtgttagagaaaattaatgagacactgaagctgccacctcgctccatcaagtggaacgtggattcagtacacgccaagtctctggtcgcaattctccaccttcttgtggccctgagtcagtacttccgcgctcctatacggcttccagaccacgtctcaattcaggtggtggtcgttcagaagagggaaggcatcctacaatctcgacaaattcaggaggagatcactggtaatacagaatatgtctctagcaggcacaagcgcgatgcttttgataccctgttcgatcacgctcctgacaaattaaatgtagtgaagaaaacactgatcaccttcgtgaataagcacctaaataagttgaaccttgaggtgacagagctggagacgcaattcgccgacggcgtgtaccttgttctgctgatgggattactggaagggtactttgttcccctccattctttctttctcacaccagacagtttcgagcaaaaggttctgaatgtctcgttcgcctttgagcttatgcaggacggcggcttagagaaacccaaaccccgcccggaggatattgtgaattgtgacttaaaatcaactctccgggtcctatacaatttgttcaccaagtatagaaacgttgaatag

SEQ ID NO: 198718 - DNA, 1119 bp, synthetic construct
  misc_feature 1..1119: note = Description of Artificial Sequence: Synthetic coding sequence
  source 1..1119: mol_type = other DNA
atggccaccagcccccagaagagccccagcgtgcccaagagccccacgccaaagtcaccaccttcaagaaagaaggacgattctttcctgggaaagctaggtggaaccttagctcgccggaagaaagcgaaagaggttagcgagctccaggaagaaggcatgaatgcgatcaatctccctctgtcaccgatcccatttgaactggacccagaagacacaatgctggaagagaacgaggtgcgaaccatggtcgatccaaactccagatccgatcccaagttacaagagcttatgaaagttctcatcgactggatcaatgacgtgcttgtgggcgagaggatcatcgtcaaggatctggccgaggatctgtatgatggccaggttctgcagaagttgtttgagaagctggagtctgaaaagctcaatgttgccgaagtaacacagtctgaaatagcgcagaaacagaaactgcagactgttctggaaaagatcaatgagactctaaaactcccacccagatcgattaaatggaatgtggatagcgtgcatgctaaaagcctggtcgcaatcctgcatctgctcgtggccctctctcaatattttagggcacccattaggctacccgaccacgttagtattcaagtggtggtggtgcaaaagagagaaggtatacttcagtcaagacagattcaggaggaaataacgggtaacactgaagcattgtctggccgacatgagcgcgatgctttcgacacactttttgaccacgccccggacaagcttaacgtggttaaaaaaaccttaataacattcgttaacaagcatctcaataaactcaatttagaggtgaccgagctcgaaacccaattcgctgacggggtctacctagtgcttttaatggggctcctggagggttacttcgttccattgcatagtttttttctgactccagattcctttgagcagaaagtgcttaacgtgtcttttgctttcgaactaatgcaagatggtgggttggaaaaacccaaacccagaccggaggacatcgtcaactgcgatcttaagtccactctgagagtgctctataacctttttactaaatatcgtaatgttgagtag

SEQ ID NO: 198719 - DNA, 1095 bp, synthetic construct
  misc_feature 1..1095: note = Description of Artificial Sequence: Synthetic coding sequence
  source 1..1095: mol_type = other DNA
atgagcagcgccccccggagccccaccccccggccccggcggatgaagaaggatgaaagctttctgggcaaactgggtggcactttggcacggaaacgccgagcaagagaggtctccgacttacaggaagagggcaagaatgccattaatagccctatgagccctgctctggtggacgttcacccggaagatacccagcttgaagagaacgaagagcgcacaatgattgacccaacctcaaaggaggaccccaagttcaaagagttggtgaaagtgctgctggactggatcaacgacgttctggtggaagagaggatcatagtgaagcagttggaggaggacctgtacgatgggcaggttctgcaaaaattattggagaagctggcaggctgcaagctgaacgtggcagaagtgacccagtcagagatagggcagaagcagaaactgcagaccgtgctcgaagccgtccacgaccttctccgtcctaggggctgggctttacgctggtcagtcgacagcatccatggaaaaaacctagtggccatacttcacctcctggtgtcactggccatgcatttcagagcacctattcggctgcctgagcacgtgaccgtgcaggtcgtcgtcgtacgaaagcgggagggcctgctgcactccagccatataagtgaggagctaacaacgacaaccgagatgatgatgggacgtttcgagcgagatgcttttgacactctgttcgatcacgctcccgacaaactctccgtggttaagaagagcttgattaccttcgtgaacaagcatttgaacaaactaaaccttgaggttacagagctggaaactcaattcgcagatggagtctatctggtgttacttatggggctgcttgaagattattttgtaccactgcatcacttttacctaacaccggagtccttcgatcaaaaggtgcacaatgtgtctttcgcttttgaactgatgttagatggcggccttaagaagcctaaggccagaccggaggacgtagtgaacctcgacctgaagtcaacactccgggttctttataacctatttacgaagtacaaaaacgtcgagtag

SEQ ID NO: 198720 - DNA, 1194 bp, synthetic construct
  misc_feature 1..1194: note = Description of Artificial Sequence: Synthetic coding sequence
  source 1..1194: mol_type = other DNA
atgcaccacgtgttcaaggaccaccagcggggcgagaagcggggctttctgtccccggaaaacaaaaactgccggcggctcgaactgaggcgtggctgctcctgcagctggggcctgtgctcccaggctctcatggcgagtctggccggatcacttctcccgggctccgacagatccggcgtggagacatccgagtacgcccagggaggtgtatccgatctgcaagaggaaggcaaaaacgctatcaatagtcccatgtctccagcactcgtcgacgtccaccccgaggacacacagctggaagaaaacgaagagaggacgatgattgaccctaccagcaaggaggaccctaaattcaaggaactcgtaaaggtgctgttggactggatcaatgacgtcctggtcgaagagcgcattatagttaaacagttggaggaggatctctatgacgggcaggtcctccagaagctcctggaaaagctagctgggtgcaaactcaacgtcgctgaagtgacacagtcggaaatcggccaaaagcagaagctgcaaactgtcttagaggctgtgcacgatctcttgcgcccacggggatgggccctgcgctggagcgttgattctatacacggcaagaacctcgtggctatcctacacttgcttgtctccctagcaatgcatttccgggccccaattcggttgccagagcatgtgaccgtccaggtggtggtcgtccggaagagagagggcctccttcactcttcacacatcagtgaagagctgacgacaacgactgagatgatgatgggtcgattcgagcgggacgccttcgacacgttattcgatcatgcgcctgataaactgtccgtagtgaagaaaagcctcatcaccttcgtgaataagcacctcaataagcttaaccttgaagtgacggagcttgagacgcagttcgcagacggagtctatctcgtcctactcatggggctcctggaagattacttcgtacccctgcatcacttttacctcaccccagaaagctttgaccaaaaggtgcacaatgtatcctttgccttcgaactgatgctcgatggtggattgaagaagcccaaggctagacccgaggatgtagttaatcttgacctaaagagtactctgagagtcctgtataatctctttactaagtacaagaacgtcgagtag

SEQ ID NO: 198721 - DNA, 996 bp, synthetic construct
  misc_feature 1..996: note = Description of Artificial Sequence: Synthetic coding sequence
  source 1..996: mol_type = other DNA
atggagcccgagttcctgtacgacctgctgcagctgcccaagggcgttgagccccctgcagaggaagaactcagtaaagggggaaaaaaaaagtacctaccaccaacctctcggaaagaccccaaattcgaggagctgcagaaggtgctgatggaatggatcaatgcgacactactgcctgagcacatcgtcgtgcggtcgttagaggaagacatgtttgacggacttatacttcaccacctgtttcagcggctggcggccctgaagctggaagcagaagatatcgcgctgactgccaccagccagaagcataaattgaccgtggtcctagaagccgtgaatcgtagtctgcaactggaagaatggcaagctaaatggagcgtggaatctatctttaataaagacctcctaagtactctgcacctcctcgtagcactcgcgaagaggtttcagccagatctctcacttcctactaacgttcaagtagaggtgatcacaatcgaatccactaagagcggcttaaaaagcgaaaagctggtggagcagcttaccgagtactctaccgataaggacgaaccgccaaaggacgtgttcgatgaactttttaaactggcgcctgaaaaggtgaacgccgtcaaagaggccattgtgaacttcgtaaaccagaagcttgataggctggggctctctgtacaaaaccttgatacccagttcgccgacggcgtgatcctgctcctccttattgggcagctggagggcttctttctgcatctcaaggagttctacctaactcctaactcccccgccgagatgctgcacaacgtcaccctggctcttgaactgctgaaagatgaggggctactctcttgccccgtctcacccgaggatatcgtgaacaaggacgcaaagagtactctcagggtgttatacgggctgttttgcaagcacacccagaaggctcatagggaccgcactccccacggcgcccccaactag

SEQ ID NO: 198722 - DNA, 81 bp, synthetic construct
  misc_feature 1..81: note = Description of Artificial Sequence: Synthetic coding sequence
  source 1..81: mol_type = other DNA
atggagcccgagttcctgtacgacctgctgcagctgcccaagggcgtcgagccccccgctgaggaagaattgtctaagtag

SEQ ID NO: 198723 - DNA, 93 bp, synthetic construct
  misc_feature 1..93: note = Description of Artificial Sequence: Synthetic coding sequence
  source 1..93: mol_type = other DNA
atggagcccgagttcctgtacgacctgctgcagctgcccaagggcgtggagccgcctgccgaggaggaactgtccaaaggagtctgcccctag

SEQ ID NO: 198724 - DNA, 996 bp, synthetic construct
  misc_feature 1..996: note = Description of Artificial Sequence: Synthetic coding sequence
  source 1..996: mol_type = other DNA
atggagcccgagttcctgtacgacctgctgcagctgcccaagggcgtggagccgcccgcagaggaggaactgagtaaagggggaaagaaaaagtatcttccccctaccagtaggaaagaccccaagtttgaggagctgcaaaaagtgctgatggaatggatcaatgccaccctgctgccggaacacatcgttgtgaggagcctggaggaggacatgttcgacgggctgatactccatcatctgtttcaacgcctagccgcactcaagctggaagccgaggatatcgccctcacagccacctctcagaagcacaaactgactgtcgtcctggaagctgtgaatagaagccttcagcttgaggagtggcaggccaagtggagtgttgaatctatctttaacaaggatcttctgagcaccctgcacctcctggtggcgctggccaagaggttccagcctgacctctcgttacctacaaatgtgcaagtggaagtgatcaccattgagtcaacaaaatcaggccttaagtctgagaagctggtggagcaattgacagaatattcaaccgacaaggacgaacctcccaaggacgtgttcgacgagctatttaaactcgcccccgagaaggtgaacgccgtgaaggaggcaatcgtcaatttcgtcaaccagaaacttgacagacttgggctcagtgtccagaacctcgatacccagtttgccgatggcgtgattttgctgctgctgattggacaactagagggtttcttcctgcacttgaaagagttttatcttacccccaacagcccagccgagatgctgcataatgtaactttggctctcgagctcttgaaggatgagggactgttgagctgtcccgtttctcccgaggatatcgtcaacaaggacgcaaaatccactctccgggtgctgtatggtttgttttgtaagcacacgcagaaagcccacagggaccggaccccacacggggcccctaactag

SEQ ID NO: 198725 - DNA, 996 bp, synthetic construct
  misc_feature 1..996: note = Description of Artificial Sequence: Synthetic coding sequence
  source 1..996: mol_type = other DNA
atggagcccgagttcctgtacgacctgctgcagctgcccaagggcgttgaacccccagccgaagaggagctttcgaaaggcggaaaaaagaaatacctgccaccaaccagcagaaaggaccctaaatttgaggaattgcagaaggtgctgatggagtggataaatgccacactgttgcccgagcatattgtggtaagatcactagaggaggatatgttcgatggcttaattctgcaccacctgtttcaacgacttgccgccctaaaacttgaagccgaagacatcgcattaacagctactagccagaaacataagttgactgtggttctggaagccgtgaaccggtccctgcagttagaggaatggcaggctaaatggtcagtagagagtatcttcaataaggacttgctgagcacactgcacctgctagttgccttggccaaacggtttcaacccgacctgagcttgcctactaacgtgcaggttgaggtgataactattgagtcaacaaagagcggccttaaatcagaaaaacttgtggagcagctgaccgagtactccactgataaagacgagcctcccaaagatgtgtttgacgaactttttaagctcgccccggaaaaggtcaatgccgtaaaggaggcaatagtgaacttcgtgaaccagaagttagaccgcttggggctcagcgttcagaacctggacactcagtttgccgacggcgtcatattactgctcctaattggacagctcgagggattcttcctgcatttgaaagagttttatctgacccccaatagtcccgctgaaatgctgcataatgtcacacttgccttggagctgctcaaggatgaaggcttactgtcatgccccgtgtctccggaagacattgtgaacaaagacgccaaatccacgctccgagttctgtatgggttattttgtaaacatacccaaaaagcccaccgggacaggaccccgcacggggcgcccaattag

SEQ ID NO: 198726 - DNA, 414 bp, synthetic construct
  misc_feature 1..414: note = Description of Artificial Sequence: Synthetic coding sequence
  source 1..414: mol_type = other DNA
atggtgcccgccaaggagcaggtgcccggccggtgcgacagcacccagagatgcttccccggcccttccaactggaccggggcaggaggacgcgccgggagtcagccgttcgtgggggatgggacactaggaactccaaacttctgttgggaccacaaagagaaacgagccgctgaaagccaattacaggcttgggaggcgatggaacctgagttcctctacgatctgttgcaactccccaagggggtggaaccccccgccgaagaagaattgtcgaagggtggaaagaaaaaatatctcccccctacatctcgaaaggacccaaagtttgaagagctgcagaagcatacttggccttcccccgtcaccggcaccggggacacaatctgcgggctggcccgcaagacatggtag

SEQ ID NO: 198727 - DNA, 1083 bp, synthetic construct
  misc_feature 1..1083: note = Description of Artificial Sequence: Synthetic coding sequence
  source 1..1083: mol_type = other DNA
atggccgccgagcggggcgccggccagcagcagagccaggagatgatggaagttgacaggagagtggaatccgaagagtctggtgatgaggagggaaaaaagcatagctcgggcattgtggccgatctttctgagcaaagtctgaaggatggcgaggagcgaggggaggaggatccggaagaggaacatgaactccctgtcgacatggagactattaatctggaccgggatgccgaagatgtggacctgaatcactaccgcatcggaaagattgagggctttgaggttctgaagaaggttaagactctctgtcttcgccagaatctcatcaaatgcattgagaacctggaagagctgcaatctctgcgcgagctcgacttgtatgataaccagattaaaaaaattgagaacttggaggctctgaccgaactcgagattcttgacatctctttcaatctgctgcgcaatattgagggtgtcgacaaactgacgagactcaagaagctctttctggttaacaataagatctcgaaaattgaaaatttgtccaacttacaccagctccagatgcttgaacttggatctaaccggatcagggcgatagaaaatattgataccttgacaaacctggagtcgctgtttttggggaaaaacaaaattacaaagctgcagaatctcgacgcactgacaaaccttacagtgttatccatgcagtctaatcgcttgaccaagatagaagggttgcaaaacctggttaaccttcgcgaattgtacctcagccataacggcatcgaggtcattgaggggctggagaataataacaaactgaccatgctcgatatcgccagcaacaggatcaagaaaattgagaacatcagccacctgacagagctccaggagttctggatgaacgataatctgctggagagctggtctgatctggacgagctgaaaggagccagatccctggagaccgtctacttagaaagaaacccgctgcaaaaggatccccaatatcgccgtaaggtcatgcttgccctcccgtcagtcagacaaatagacgcaacattcgtgcggttttag

SEQ ID NO: 198728 - DNA, 3993 bp, synthetic construct
  misc_feature 1..3993: note = Description of Artificial Sequence: Synthetic coding sequence
  source 1..3993: mol_type = other DNA
atggaggacggcggcctgaccgccttcgaggaggaccagcggtgcttgtcccagtccctgcccctcccagtgtctgccgagggacctgctgctcagaccactgccgaaccttcccgttcgttctccagtgcacaccgacacctttccagaaggaacggactgtcccgtttatgccaaagcagaaccgcactgtcagaggaccgctggtcctcatattgcttatccagtctggcggctcagaacatttgcacaagcaagctgcattgtccggccgcacctgagcacaccgaccctagcgaacctcgcggatccgtcagttgctgttcactcctcagaggactctcttcaggatggtccagtcccctactgcctgcgcctgtctgcaatccaaataaggctatcttcacagtcgacgccaaaactaccgagatcctcgtggcaaacgataaggcttgcgggttgctgggctattcaagccaagatctgatcgggcagaaactgacccagttcttccttcggagcgactcagatgtagtggaagctctatctgaagaacacatggaagccgatggtcacgccgctgtggttttcggaacagtggttgatatcatcagtcgcagtggagaaaagatccctgtgagtgtttggatgaagcgaatgcgccaggagcgcagattgtgctgcgtggtcgtactggaacctgttgaaagagttagcacatgggtcgccttccaatctgatgggaccgtgacatcctgtgacagcctttttgcacacctccatgggtacgtgtctggcgaagacgtcgccggccaacatatcaccgatctcatccccagcgttcagctgcccccttccgggcaacacattccgaagaacctgaagatacagcgctcagtcggacgcgcacgggatgggacaacctttccattgagtttgaagctgaaatcacaaccatcttctgaagaggctaccacaggggaagcggccccagtatccggctaccgggcgagcgtgtgggtgttttgtaccataagcggactgatcacgcttctacccgacggcacgattcatggtatcaaccattcattcgcactcacgctgtttggttacggcaaaaccgaactactgggcaaaaatatcaccttcctgatcccaggattctactcatacatggaccttgcctacaactcctcgttacagctccccgacctggctagctgcttggacgttgggaacgagagcgggtgtggtgagaggaccctggatccctggcaaggacaggatcctgccgaaggggggcaggaccctcgaattaatgtggtcttggcaggcggacacgtggtgcctagggatgagatcagaaaactaatggagtcacaggatatattcacagggacacagaccgagctcatagcaggcgggcagctgttaagttgcctgtcacctcagcctgccccaggcgtggacaatgtcccagagggctctttgcctgtccatggcgagcaggcactgcctaaggatcagcaaatcacagccctgggccgtgaggagcccgtggctatcgagtctccggggcaggatctgctaggagagagtcgctctgaacccgttgatgttaaacctttcgcctcctgcgaagattccgaagcaccagttccagcagaggacggcggcagtgatgcaggaatgtgcggcttatgtcagaaggcacaattggaaagaatgggggtctctggaccatcaggatccgatctgtgggcaggagccgccgtggcaaagccccaggcaaagggacaactggccgggggaagtttgctcatgcattgtccttgttacggttccgaatggggactgtggtggagatctcaggatctcgcaccaagcccatcgggtatggccgggctctcgttcgggacaccgacactcgatgagccttggctgggagtagaaaatgatcgagaggagctgcagacatgtcttatcaaagaacagctgtcccaactatcacttgccggggccctggacgtgcctcatgcggagttagtacctacagagtgtcaggccgtgaccgccccggtgtcatcctgcgatttgggcggcagagacttgtgcggtggctgcactggttcctcctctgcctgttatgctctagcaaccgatctgcccggcggcctggaagctgtggaggcgcaagaagttgacgtcaattccttcagctggaatctgaaagaactgttcttcagcgaccagacagaccagacgagctcaaactgcagttgcgccacctctgagttacgcgagacaccatccagcttggctgtgggatctgatccagatgtgggcagcctgcaggagcaggggagttgtgtgctggatgatcgagaattgcttctgctaacgggcacgtgcgtggatctcggccagggtcgacgctttcgcgagtcctgcgttgggcacgacccaacagagcctctggaggtgtgcctggtgtcttcagagcactatgctgcgtccgatcgtgaatctcctggacacgttccctccactttagatgccggtcccgaagacacttgcccctccgccgaggagccaagactcaatgtgcaggtgacctccacccctgtcatagtgatgcggggcgccgccggcttacagcgcgagattcaggagggggcatacagcgggtcctgttaccatcgcgatggccttaggctgtccatccagttcgaggtgagaagggtcgaacttcagggaccaactcccttgttttgttgctggctggttaaggacctgttgcattcccagcgggattcagccgcgaggacacgtctgtttttggcatcactcccgggctccacgcattcaacggccgccgagctgacagggcctagcctcgtagaagttctgagggccagaccttggtttgaggagccccccaaggccgtggaattggagggcctcgctgcatgtgagggagagtattctcaaaaatactcaactatgagccctctgggatccggcgcgttcggatttgtctggaccgcagttgacaaagagaaaaataaagaggtagttgtgaagtttattaaaaaagaaaaagttctggaagactgttggatcgaggacccaaaactgggtaaagtgactcttgagattgctattctttcgcgcgtcgagcacgctaatatcattaaagtactggacatttttgaaaaccaaggatttttccagctggtcatggaaaagcacgggagcggacttgatttatttgcgttcatcgataggcatcccagactggacgaacctctagccagctatatatttcgccaagtgagagctggacagtcccgacttgtgagtgccgttggctatctcaggctgaaggatatcatacaccgcgacatcaaggacgaaaacatcgtcatagcagaagactttactatcaaactgatagatttcggaagcgccgcttatctggagagaggcaaattgttctataccttttgcggaactattgaatactgtgcccccgaggttctgatggggaatccctacagaggccccgaactcgaaatgtggtctctcggggtgaccctctacactctggtgtttgaggagaaccccttttgcgaactggaggaaactgtcgaggccgcaatccatcccccttacctcgtctcaaaggaactgatgtccctggtgagtggtctgctgcagcccgtacctgaaaggagaacaaccttagagaaactggtgaccgatccctgggtgacgcagcctgtaaacctggcggattacacttgggaagaggtctttcgcgtgaataagcccgaatctggcgtcctgtctgccgcatccttggagatgggaaacaggtctctttctgacgtggctcaagctcaggagctgtgcggaggaccagtgccaggagaagcacccaacggacagggctgcctgcaccccggcgacccacgactcttgactagttag

SEQ ID NO: 198729 - DNA, 3972 bp, synthetic construct
  misc_feature 1..3972: note = Description of Artificial Sequence: Synthetic coding sequence
  source 1..3972: mol_type = other DNA
atggaggacggcggcctgaccgccttcgaggaggaccagcggtgcctgagccagtccctgcccctgcctgtgagtgccgagggtcccgctgcacagactacagccgagccatcccggtcattttctagcgcacatagacatctgagccggaggaacggcctgtcaagactgtgtcagtctagaaccgcccttagcgaagaccgatggagctcttattgcctcagttcattagccgctcagaacatctgcacgtctaaactccactgccccgcagcccccgaacacacagatcctagcgaacctcggggctcagtcagttgctgttccctgctccgaggattgtcaagcgggtggtcctccccgctattgccagcccctgtttgcaatccgaacaaggcaatcttcactgtcgatgcaaagacaaccgaaatcttggtagcaaacgataaagcttgcggcttgctgggctatagttctcaggaccttattggccaaaagttaacccagttcttcctgcgatcagactcagatgtagtggaggcccttagtgaggagcatatggaggcagatgggcatgccgcggtggtgtttggaactgtcgtcgatattatctcacgtagcggcgagaagattccagtcagtgtttggatgaagaggatgcgtcaggagaggcgactgtgctgtgtggttgtgttggagcccgtcgaacgtgtctccacatgggtggcgtttcaatctgatggcacagtgaccagctgtgactctctgtttgcacacctgcatggttatgtgtctggtgaagacgttgcaggccagcatatcacagacctcatccctagtgtccaactgccaccttctgggcagcacatacccaaaaatctgaaaatacaacggagcgtcggacgggctcgagacggtaccacttttccattgtctctcaagcttaagagccagccgtccagcgaggaggctactacgggcgaggcagcccctgtgtccggatacagagcttccgtatgggtcttttgtactatatccggacttatcactctcttacccgacgggactattcacggcattaaccattcttttgctctgactttgttcggctatggtaagacggagttgctagggaagaacataaccttcctgattccggggttttattcatacatggaccttgcctacaacagcagcctccaactacctgatctagccagctgtctcgacgtagggaatgaaagcggctgtggcgagcgcaccctcgatccatggcagggccaggatcccgccgaggggggccaagaccccagaattaatgtggtactggctgggggtcacgtggttccaagagatgagatacgcaaactcatggagtcgcaggatatcttcacaggtacacagactgagctgattgctgggggacagctgctgagctgtcttagcccacagcctgcccctggtgtagacaatgtgcccgagggctctctccctgtccatggcgagcaggctctcccaaaggatcagcaaattacagccctcggacgtgaggaacccgttgccatcgagtcgcccgggcaagatctgctcggcgaatcaaggagtgagccagtggacgttaagccattcgcctcatgcgaggacagtgaggctccagtcccggcagaagacggggggtcggatgcaggcatgtgcggactgtgtcagaaggctcagttagagagaatgggcgtatccgggccatccggctccgatttgtgggccggggccgcggttgccaagcctcaagcaaaaggtcagctagccggcggctctcttttgatgcattgtccttgctacggctccgaatggggcctttggtggcgcagccaagacctagctccttcgccaagtgggatggctggactgagcttcggcacaccgaccctggacgagccctggctgggcgttgaaaatgatcgggaagagttacagacctgtctgattaaggaacaattgtctcaattgtccctggctggtgccctcgacgtccctcacgcagagctggtgccgaccgagtgtcaggctgtcacagccccagttagtagttgcgatcttgggggacgagatctgtgtggcgggtgtacaggatcatcctccgcttgctatgccctggccacagatctgcccggaggcctggaggccgtagaggctcaagaggtggacgttaactctttttcctggaatttgaaggagctctttttttcggaccagacggatcaaacttctagtaattgcagctgtgcaacctccgagctcagggagaccccctcaagcctggctgttgggagtgacccagatgtgggcagcctgcaggagcagggttcctgcgttctggacgacagggaactgttactgttgaccggcacttgtgtggatctgggccagggaagacggtttcgggagtcttgcgtgggccacgaccctacagaacccctggaggtttgcttggtctcctctgaacactatgcggcaagtgacagggagtctcccggtcatgtccccagcaccctggatgccggccctgaggacacatgtcctagcgcagaggaaccccggctcaacgtccaggtcacttccaccccagtcatcgtgatgagaggagccgcgggtttgcagagagaaattcaggaaggcgcatactccggatcatgttaccatagagatggcttgagactctccattcaattcgaggttcgacgagtggaactccaaggcccaacgccacttttctgttgctggttggtgaaggacctcctgcactctcagagggattcagcggctcgcacaaggctgtttttagccagtctgcctggctctacgcatagcacagctgccgagcttactggcccgtcactggtggaagtcttgcgggccagaccttggtttgaagaaccccccaaagcggtagaactcgaaggcctggccgcttgtgagggagagtactcacagaagtatagtacaatgtcccccctcggctcgggcgctttcggtttcgtctggacagctgtggacaaggaaaaaaacaaggaagttgtggtgaaattcatcaagaaggaaaaggtactggaagactgctggatagaagaccccaaactggggaaggtcaccctcgaaattgcaattctgtccagagtagaacatgccaacatcattaaggttttagatatctttgagaatcagggatttttccagctcgtgatggaaaagcatggatccggcctggacttgttcgctttcattgatcgccacccacgcctcgacgagccccttgcgtcttacatatttaggcagttagtgagcgccgtgggctatcttagattgaaggatatcattcaccgcgacataaaggacgagaatatagttattgcagaggactttacaataaagctcattgattttggctctgctgcgtacctggagcgggggaagcttttctacactttctgcggtacgatcgagtactgcgcaccggaggtgctgatgggaaacccttaccgaggcccagagctggagatgtggtctctgggagtcaccctgtacacactcgtttttgaggagaacccattttgtgagctggaggagactgtagaggcagccattcaccccccttatctggtgagtaaggaattgatgagcctagtatctgggttgctgcaaccagtgcccgaacggcgcaccaccctggaaaagttagtgacagatccttgggtgacacagcccgtgaaccttgcagactacacatgggaagaggtgtttcgagttaataaaccggagagcggcgtgctatcagcagccagcctggaaatgggcaatcggagtctttcagacgttgctcaggctcaggaactttgtggaggaccagttccaggagaagctcctaacggacaggggtgtctgcaccccggggatcctagactcctgaccagctag

SEQ ID NO: 198730 - DNA, 378 bp, synthetic construct
  misc_feature 1..378: note = Description of Artificial Sequence: Synthetic coding sequence
  source 1..378: mol_type = other DNA
atggaggacggcggcctgaccgccttcgaggaggaccagcggtgcctgtcccagagtctgcccctgcccgtgtccgcagagggtccggccgcccaaactacagccgagccttcccgaagcttcagctcagctcacagacacctttcgaggaggaacggtctgtctagactgtgccaaagtaggaccgctttgtctgaggatcgctggagcagctattgcctgtcatctcttgcagcccagaatatttgtacatccaagctgcattgccccgctgcgccggaacatactgacccctccgagccacggggtagcgtgtcatgttgctcacttctgcgtggactgtccagcggctggagttccccccttttacctgcatag

SEQ ID NO: 198731 - DNA, 3324 bp, synthetic construct
  misc_feature 1..3324: note = Description of Artificial Sequence: Synthetic coding sequence
  source 1..3324: mol_type = other DNA
atgaagcggatgcggcaggagcggcggctgtgctgcgtggtggtgctggagcctgtggaacgagtctctacttgggttgcattccagagtgacggaacagttacctcctgcgatagcttatttgcccacctgcacggttacgtaagtggagaggatgttgccggacagcacatcaccgatttgatcccgagcgtacagctccctccgagtggacaacacattccaaaaaatctgaagattcagcggtcagtcggtcgggctagggatggcactaccttccccctgagtctgaagctcaaatcccaaccctcttctgaagaggctactacgggcgaggctgcccctgtgtccggatatagagcatccgtctgggtgttctgcacaataagtggactgattacgctgttgcccgatggcaccatccacggcatcaaccatagtttcgcgctcaccttgttcggttatgggaagactgagctgctagggaagaatattaccttcctgataccgggattctactcatatatggacctggcctataattcaagcttgcaactacctgacctggcttcctgtctggatgtgggtaatgagagcggttgcggtgagaggaccctggacccctggcagggtcaggacccagccgagggagggcaagacccaagaatcaacgtcgtacttgctggcggccacgtggtgcccagagatgaaatcagaaagttgatggagtcacaagatattttcactggaactcagaccgagctgatcgccggaggacaacttctctcctgtctctcccctcagccagcccccggtgttgataatgtacccgaggggtcattacccgtacacggagagcaagcgcttcctaaagatcagcagatcacagcccttggtagggaggagccagtcgctatcgagtcacctggacaggatctgctaggggaatctaggagtgaacccgtggatgtgaagccctttgcttcttgcgaggattccgaggccccagtgccagcagaagatggaggctccgatgcaggcatgtgcggcctctgtcaaaaggctcagctggaaaggatgggtgtgagcggcccctcaggctccgacctgtgggccggagcagctgttgccaaaccacaggcaaaaggtcaactggccggcggctccctcctgatgcattgtccgtgttatgggtctgagtggggcctttggtggcgaagccaggaccttgcaccctcgcccagtggtatggcaggactttcttttggtactcccactctggatgaaccatggctgggcgtggaaaatgacagagaggagttgcagacttgtctcatcaaggagcaactttcacaattatctctcgctggggcgctggacgtccctcatgccgaactggtgccgaccgagtgtcaggctgtgacagcgcccgtaagttcttgcgatttaggtgggagggacttgtgcggcgggtgcacaggcagcagctcggcctgctacgcattggccacagacttgcccggggggctggaagcagtggaagctcaggaggtcgatgtgaactcttttagttggaatctcaaggagctgtttttctctgaccagacagatcagacttccagtaattgctcctgtgcaacatcggagctgcgggagacgcccagttctttggccgtgggtagcgacccagatgtgggaagccttcaggagcagggatcgtgtgtgctggatgacagagaactgctcctgcttacaggaacttgcgtggatttgggccaaggaaggagattcagagagtcctgcgtgggtcacgaccctaccgaacccttggaagtgtgtctagtgtcctctgaacattacgccgcctcggacagagaaagccccgggcacgtgccctccactctggacgccggacccgaggacacatgtccctccgcggaagagccgagacttaatgtgcaagtcacttccacaccagttattgtgatgcggggagctgcagggctgcaaagggaaattcaggagggagcatatagcggttcgtgttatcacagagacggcctcagattgagtatccagttcgaggtgaggcgggtggagttgcaaggcccaactcccctattctgctgctggcttgtgaaggacctccttcattctcagagggacagcgccgccaggacgcgcttgtttttggcttcattgccaggctctactcactctaccgccgcggaactgacaggccccagcctggtggaggttttgcgcgcccgcccttggttcgaggaaccccctaaagctgtcgagctggagggcctggccgcttgtgagggggaatactcccagaagtacagtaccatgtctcccctgggcagtggagcattcggattcgtgtggactgccgttgataaggaaaaaaacaaggaggtcgtggtaaagtttatcaaaaaggaaaaggtgcttgaagattgctggatcgaggaccctaaattgggcaaggtcacgctcgaaattgccattctctcaagagtggaacatgcaaacatcatcaaggtcctggacatttttgagaaccaggggttcttccagctggttatggagaagcatggttcaggactagacctgttcgcatttatcgatagacatccacggctcgatgaacctctagccagctacatctttcgtcagctggtgtcagcggttggttatctccgcctgaaggacataatccatcgcgacattaaagatgaaaacatcgtcattgcggaggacttcactattaaattgatagactttggatcagctgcctatctggagcggggtaagctcttttacactttctgcggaaccattgagtactgtgcccccgaagttcttatgggaaatccttacagaggaccggagctcgaaatgtggtctctgggcgtgaccctctatacattggtgttcgaggaaaaccctttttgcgagctggaagagacagtcgaggccgcgatccaccctccatatctagtctcaaaagaacttatgtccctggtgagtgggttgttacagccggtgcctgaacggaggaccaccctggaaaagttagtaaccgacccgtgggtgacccagcctgtcaaccttgcagattacacctgggaggaggtgttccgggtcaataagccagagtctggagtcctgtccgctgcttctctggagatggggaaccgctcactgagcgacgtcgcacaggcccaagaattgtgcggaggacctgtgcccggcgaggctccgaacggccagggctgcctgcatccaggagacccccggcttctcacatcttag

SEQ ID NO: 198732 - DNA, 3414 bp, synthetic construct
  misc_feature 1..3414: note = Description of Artificial Sequence: Synthetic coding sequence
  source 1..3414: mol_type = other DNA
atgggcttccccgacagcgcccgggccggccagcggagcctggtggatattatctctcgcagtggcgaaaaaatcccggtctctgtgtggatgaaacggatgcgtcaggagaggcgactttgctgtgtggtcgtgctggaaccagtcgaacgcgtcagcacctgggtggcgttccagtccgacgggactgtgaccagctgtgattcactttttgcgcacctccacggctatgtgtcaggggaggatgtggctggccagcacatcactgatctgataccatctgtacagcttccacccagcggtcagcatattccaaagaatctgaagattcaaaggtccgtaggccgcgctagggatggcaccacattccctctgtcacttaaattgaaatcccaacctagttctgaggaagccaccactggcgaggctgccccagtgagcggctaccgggctagcgtgtgggtgttctgcactataagcggtcttatcaccttgctgcctgatggaacaatccacggaataaatcattcttttgctcttacactattcggatacggcaagaccgagctccttgggaagaatatcaccttcctgataccaggcttttactcttacatggatctggcttacaatagctcgctccagcttcctgatcttgccagctgtcttgatgtggggaatgaaagcggatgcggcgaaagaacactggatccatggcaaggccaagatcctgctgaaggcggccaggatccaaggattaacgtcgtgctggctggcggacatgttgtgcctcgggacgagatccgcaaattaatggaatcacaggacatctttacggggacacaaactgaacttattgcggggggccagcttctgtcatgtcttagtccgcagccagctcctggagtggataacgttccggaaggctccctgcctgtgcatggtgaacaggcactgcccaaagaccaacagatcactgctctcggccgggaagaaccggtcgctatcgagtctcccggccaagatctgctgggagagagccgtagcgagcccgtcgacgtaaagccattcgccagctgcgaggatagcgaagcccccgtgcctgccgaggacgggggctcggatgctggtatgtgcggcctgtgtcagaaagcacagctggagcggatgggtgtgagcggaccctctggatctgacctatgggcgggcgcagcagtggctaagcctcaggcaaaaggccagctggcggggggttccctgctgatgcattgtccatgttacgggagcgaatggggtctgtggtggagatcgcaggacctcgcaccaagcccaagcggtatggcggggttgtcgttcggtaccccaacactcgatgaaccctggctaggcgttgaaaatgatagagaggagctacaaacctgtttgattaaagagcagctctcccagcttagcctggccggagctctcgatgtgccccacgccgaactcgttccgactgaatgccaggccgtgactgcacccgtttcctcgtgtgatctagggggtcgtgatctgtgcggcggttgtactggaagcagttcagcctgctatgccctggctacagatctacctggcggacttgaggctgtcgaagcccaagaagtggacgtaaattcgttcagctggaatctaaaagaactgttctttagtgaccaaacagaccaaacgtcaagtaattgctcatgcgcaacaagtgaactccgcgaaaccccgtcctcgctcgccgtggggagcgacccagatgtggggagcctccaggagcaaggttcctgcgtgctcgacgatagagaattattgctgctgacgggaacctgtgtagatttaggccaaggccgacggttcagagaatcctgtgtcggccatgaccccacagaaccacttgaggtgtgcctggtgtcttctgaacattatgccgcctcggatcgcgaatcccctgggcatgtgcctagtacactggatgccggccccgaggatacttgtccgagtgccgaggagcctcgccttaacgtgcaagtgacctccaccccagtgattgttatgagaggagctgccggcctccagcgtgagatccaagagggtgcctattccgggtcatgctaccatagggatggactgaggttgtcaatccagtttgaagtgaggagggtggagctccagggcccgacccctctgttctgctgttggctcgtaaaggatctgctccatagccagcgggattctgcagcgagaaccagactgtttctcgcttctctgccaggcagcacacattccacagctgctgagctcactggaccatccctggtagaagttcttcgagccaggccgtggtttgaagagccccctaaagccgtagagcttgagggcttagcagcatgtgagggagaatactcccaaaaatactcaactatgagccccctgggttctggcgcctttggttttgtctggaccgctgtggataaagagaaaaacaaagaggtggtggtcaagtttataaagaaggagaaagtcctggaagattgttggattgaggatcccaaactgggcaaagtcacattggagatcgctatcctgtctcgcgtggaacacgctaatatcatcaaggtgctggacatctttgaaaatcagggctttttccagctagtgatggagaaacacgggtccggactggacctgttcgcctttatagatcgccatccacggctcgatgaacccctggcatcctatatcttccgccaactggtgagtgccgtcgggtatttgcggcttaaagatattatccatcgagatattaaagatgagaatatcgtcattgctgaagatttcaccattaaactaatagacttcggatccgcagcctatctcgaaagagggaagctcttctacactttttgtggaaccatcgagtattgcgccccagaagtgctaatgggaaatccctaccgagggccagaactggaaatgtggtcgcttggcgtgacactgtatactcttgtatttgaggagaaccccttctgcgagctggaagagacggttgaagcagccatacacccgccatatctcgttagtaaggagctgatgtcactcgtgtccggactgcttcagcccgtgcccgaacgtagaaccacccttgagaaattagtcacagacccttgggtgacgcagcccgtcaacctagccgattacacttgggaagaggtctttagggtcaataaacctgagagcggcgtgctgtcagcagcctctctggagatggggaatcggtcattaagcgacgtggcccaggctcaggagctttgcggcggccctgtgcccggggaggccccaaacgggcaggggtgccttcatccaggtgacccacggctgctaacctcttag

SEQ ID NO: 198733 - DNA, 3432 bp, synthetic construct
  misc_feature 1..3432: note = Description of Artificial Sequence: Synthetic coding sequence
  source 1..3432: mol_type = other DNA
atggaggacggcggcctgaccgccttcgaggaggaccagcggtgccttagtcagagcttgcctctgcctgtgtctgccgaaggaccagctgcccagacgacggccgagccttccaggagttttagtagcgcacataggcacttgtctagaaggaacggtttatctcgactgtgtcagagccggaccgcactttctgaggaccgctggtcatcatactgcctctcctcactggctgcacagaacatttgtaccagtaagctgcattgccctgccgcccctgagcacacagatccctccgagccaaggggctctgtttcatgctgtagtctgctgcgcggcctatcctcgggatggtcttcccccctgctgcctgcaccagtgtgtaatcccaataaggccatctttacagtagacgcgaaaacgaccgagatcctcgtggcaaatgacaaggcctgcggattgcttggatactcttcccaggatctcataggtcaaaagctcactcagttcttcctgaggtcagattccgatgtagtcgaggctctgtcagaagaacatatggaagccgacggtcacgcagccgttgttttcggcacggtcgtcgacattatttcccggagtggagaaaagatacctgttagcgtatggatgaagcgtatgaggcaggagcgtcgactgtgttgtgttgtggtgctggaaccagtggagcgtgtaagcacctgggtggcctttcagtcagacggcaccgtgacctcgtgcgattccctcttcgcacatctgcatggatacgtatccggcgaggatgtcgctggacaacacatcactgaccttattccttccgttcagctgccaccgtcaggtcaacatatccctaaaaatctgaaaatccagcggtccgtcggcagggctagagatggtacaacctttccactgtctctgaaactgaaatcgcagccatcctctgaggaagcgacaacgggggaagccgcacccgtgtccggatacagggccagcgtgtgggttttctgcacaatttccggccttattaccttgttacccgacggcacgattcacgggatcaaccattcatttgccctgacccttttcggctatggcaaaactgaattattggggaagaacattacattcctcatcccagggttctatagctatatggacctcgcctacaactctagcctgcagcttccagacctggccagttgtctcgatgtaggaaatgagtctggttgtggcgagaggacactcgatccttggcaggggcaggatccagccgaaggaggacaagatccaaggatcaacgtcgttctagctggcggacatgtcgtgcccagagacgagattagaaagctgatggaatcacaggatatctttactggaacacagacagaattgattgctgggggtcagttattgagctgcttaagcccacaacctgcgcctggagtagacaatgtacctgagggtagcctgcccgtccacggagaacaagccctcccaaaagaccagcagataactgctctcggacgcgaggagccagtcgccatcgaaagcccaggacaggacttgctgggcgaatcccggtcagaacctgtggatgtgaagcccttcgcaagttgcgaagacagcgaagcacccgttcccgccgaggacggcgggtccgacgcagggatgtgcgggctctgtcagaaagcacagctagagcgaatgggggtttctgggccttccgggtcggatttatgggcaggcgccgcagtagccaaaccacaggctaaaggccagctggctggaggatctcttctgatgcactgcccttgttacggctcggaatggggactgtggtggaggtcacaggatctggcaccttcaccaagtgggatggcgggcctttccttcggtacccccaccctcgatgaaccttggttaggggttgagaatgaccgggaagaactgcaaacttgcctgataaaggagcaattgtcgcagctgtcattggccggcgcactagacgtgccccacgccgaactggtaccaaccgaatgtcaagctgtaaccgcgccagtgtctagctgcgatctgggaggccgggatctttgtggcggatgcacaggaagtagcagtgcatgttacgctctggccacagacttgcccggcggactggaggcggtggaggcccaggaagttgacgtgaattcgttctcctggaacctgaaagagctcttcttcagtgaccaaaccgatcagacatcttccaattgcagctgcgccacctccgagcttagagagactccaagctcattggccgttggatctgatcctgacgttggaagccttcaagagcagggttcatgcgttctggatgatcgggagctgttgttgctgacaggtacatgcgtcgacctcgggcagggacgtcgctttagagaatcgtgcgtggggcacgaccccaccgaacctttagaagtgtgcctcgtgagctccgagcactacgccgcgagtgacagggaatcgcccggacatgtgccttcaactctggacgctggtcccgaggatacctgtccgtccgccgaggagcccaggctgaatgttcaggtgacatctacaccagtgatcgtgatgagaggagccgcaggccttcaaagagagatacaggaaggggcgtactctggctcttgctatcatagagacggcttgaggctgtcaatacagtttgaagtccgccgcgtggagctccagggccccactcctctgttctgctgttggcttgtgaaggatcttttgcactcgcagagagactctgcggccaggactagactcttcttggcttctttacctggatcaacccactctaccgcagctgagctcacaggcccaagcctcgtagaggtgctgagggcccgaccctggtttgaagaacctccaaaggccgtcgagcttgaaggccttgccgcctgtgagggcgaatactcacaaaaatactccaccatgagccccctggggagcggagcattcggtttcgtttggaccgctgtcgataaagagaagaacaaagaagtcgtggtcaaatttatcaaaaaggaaaaggtgctggaagactgttggatagaggaccccaaactcggcaaagtcactttagaaatcgccatcctctctcgggtggagcatgctaacattattaaggtcctcgatatttttgaaaatcaaggcttctttcaactggtaatggaaaaacacggctctggcctggacttgttcgcgtttattgacaggcacccacgactcgatgagccccttgccagttacatattcagacaggtgcgcgcaggccaatctagggtcagcgtgaacgccggcctgggagcctgggtgagatggctccagaggtctgtcattcacacaagattctctctctag

SEQ ID NO: 198734 - DNA, 1314 bp, synthetic construct
  misc_feature 1..1314: note = Description of Artificial Sequence: Synthetic coding sequence
  source 1..1314: mol_type = other DNA
atggtgcagatgatgcggcagttcctgtaccgggtgctgcccgaggattcatacaaagtgaccactgggaaattacacgtgagcctcaccaggctcactgatggggaaaatgtcgtcgtctccgagtttaccagcaaagaagagctcatcgaggccctgtactgcagttgttttgtgcccgtttattgcggcctgataccgcccacttacagaggtgtgaggtatattgacggtgggttcacagggatgcaaccctgtgcgttctggacagacgccattacaatctccacttttagcggccaacaagatatctgcccccgagactgcccagcaatctttcatgacttcagaatgttcaactgtagcttccagttcagcctggagaacatagccaggatgacacatgcgcttttccctcccgatctggttatcctgcatgattattactacagggggtacgaggacgctgttctgtacctccgtagacttaacgcagtatacctgaactctagttctaagagggtgatctttcccagagtcgaagtgtattgccagattgagcttgcgctgggaaatgagtgccctgaaaggagccagcccagtcttcgggccagacaggccagcctggagggcgccacacagcctcataaggagtgggtccctaagggagatggtagagggtctcacggcccacccgtatcacagccagtgcagacactcgaatttacttgcgaatcgcccgtgagtgctccggtgtcgcccctcgaacagccgcccgcacaacctttagcttcatccacacccttaagtctgtctggaatgccccctgtgtcctttccagcagtccacaagcctcccagtagcactccagggtccagcctacccacgccaccaccgggactgtctccgctgagccctcagcagcaggttcaaccctctggatcccccgcccggagcctgcatagtcaagcccctacttccccccgcccttcgctgggcccatccaccgtcggtgctcctcagaccctcccgcggagctctctaagtgccttccccgcacaaccacctgttgaagagctgggacaggagcagcctcaggccgtagccctgctcgtgtcctccaagcccaagtcagctgtccctctggtccatgttaaggagaccgtgagcaaaccatacgtcactgagagcccagccgaggactccaactgggtgaacaaagtattcaagaagaacaaacagaaaacaagcgggacacgaaaaggtttcccccgacacagcggatccaagaagccatcctctaaagttcagtag

SEQ ID NO: 198735 - DNA, 1599 bp, synthetic construct
  misc_feature 1..1599: note = Description of Artificial Sequence: Synthetic coding sequence
  source 1..1599: mol_type = other DNA
atggaggagcaggtgttcaagggcgaccccgacaccccccacagcatctcgttctccggcagcgggtttctttcgttttaccaagccggggccgtcgacgctctgagggatttagctccaaggatgctggaaaccgctcaccgatttgctgggacatcagcaggagcagtcatagctgccttggctatatgtggtattgagatggacgaatatttgagggtgctcaacgtgggcgtggctgaagtcaagaaatcatttcttgggcctctctccccctcctgtaaaatggtgcagatgatgaggcagtttctttacagagttttgccagaggactcatacaaagtcacaactgggaagttacacgtctctttgactagactgacggacggggagaatgtcgtagtgagcgaattcactagtaaggaggagctcattgaagccttgtattgcagttgcttcgttcccgtatattgtggtctgatcccacctacttatcggggggtgcggtacattgatggcggtttcactggaatgcagccatgtgcattctggaccgacgccattacaataagcaccttttcgggccagcaggatatttgtcccagagactgccctgccatttttcacgacttcagaatgttcaattgctctttccagtttagcctggagaacattgcaagaatgacacatgccttgttccctccagacctggtgatcctacacgactactactacaggggctacgaggacgcggtgctgtacctccgcaggctgaacgctgtctacctaaattcttcatcgaaacgagtgatcttccccagggtggaagtgtactgccagatcgagctggccctcggtaacgaatgtccggagcgttcccaaccaagtctacgcgctaggcaggcaagtctagagggcgcaacccagccacataaggaatgggtccccaagggggatgggcgaggcagtcacggtccgcctgtgagccaacctgtccagaccctcgagttcacttgcgaatcacccgtgagtgcacctgtttcgcctttggagcagccccccgctcaaccactggctagcagcactccactcagtctgtccggcatgccccccgtgtccttccctgctgtccacaagccaccttccagcacgcccggcagttccctccctaccccaccccccggtttgagccctctcagcccccaacagcaggtccagcctagcggctctccggctaggtcgctgcactctcaagccccaacatcccctagaccatccctgggaccgagcaccgtgggggctcctcagacactgcctagaagctcactttccgcctttccggcgcagcctcctgtggaagagttgggacaagagcagccacaggccgtcgctcttcttgtgtcaagcaagcccaaatcagccgtgcccctggtccacgtaaaagagaccgtctcaaaaccatatgtcacggagtctccggcggaagattctaattgggtgaataaggtctttaaaaaaaacaagcagaagactagtggcacgcgtaaaggcttcccccgacattctggcagcaagaagccatcctcaaaagtgcaatag

SEQ ID NO: 198736 - DNA, 1602 bp, synthetic construct
  misc_feature 1..1602: note = Description of Artificial Sequence: Synthetic coding sequence
  source 1..1602: mol_type = other DNA
atggaggagcaggtgttcaagggcgaccccgacaccccccacagcatcagtttctctgggagcgggttcctgagtttctatcaagcaggcgctgtggatgctttaagggacttggccccccgtatgctcgagacagctcaccgattcgccggaacgagcgccggcgccgtcatcgctgctctggccatttgcgggattgaaatggatgagtacctccgggtgctgaatgtgggggtggcagaggtgaaaaagagctttctgggtcccctgtctcccagttgcaaaatggtgcagatgatgaggcagttcctctatagagttctgcctgaggacagttacaaggtgacaaccggtaaattgcatgtgagcctgacgcgcctgaccgatggcgaaaatgtggtggtgtccgagttcaccagtaaggaggagctcatagaggccgcgctttattgctcatgcttcgtgcctgtgtactgcggactaattccccccacctataggggagtccggtacatcgatgggggctttacagggatgcagccatgtgccttttggactgatgctattacaatcagcacattttccggtcaacaagacatatgcccccgcgactgcccagccatctttcatgattttcgaatgttcaactgtagcttccagtttagtctagagaatatcgcaagaatgacgcatgccctctttcctcctgatttagtgatccttcacgactattactatagaggttatgaagatgcggttctgtacctgcggcggcttaacgcggtttacttgaactccagcagcaaaagagttatttttcccagggtcgaggtgtattgccagatcgagcttgcgctgggcaacgaatgccccgaacgttcacaaccttcgcttcgagctagacaggcctccctggaaggcgccacgcagccacacaaagagtgggtacccaagggcgatggcagggggtcccacgggccccctgtcagccagcctgtgcagacattagaatttacttgtgaaagtccagtgtctgcaccagtaagccccctggaacaaccccccgcacaacctctggccagtagcacaccactgagtttgtccggaatgcctcctgtgtccttccctgctgtgcataagcccccttcctcaacgccaggttccagcttgcccactccaccacctggactgagcccgctgtccccacaacaacaagtgcagccctccggcagtccagctcgttcgctccacagtcaagcccctacatcaccccgtccgtctctgggtccttccaccgttggcgccccccaaactttgcctagatcaagcttgtccgcttttccagcacagccccctgtcgaagaactcggccaggaacagccgcaggcggtggcactcctggtcagttcaaaaccaaagagcgcagttccattggttcatgtgaaggagaccgtgtcaaaaccctatgtcactgagtcaccagctgaggacagtaattgggtcaacaaagtcttcaagaaaaacaaacaaaaaacctccggaacaagaaaaggattccccagacactccggctccaagaaaccttcctccaaagtgcaatag

SEQ ID NO: 198737 - DNA, 1341 bp, synthetic construct
  misc_feature 1..1341: note = Description of Artificial Sequence: Synthetic coding sequence
  source 1..1341: mol_type = other DNA
atggtgcagatgatgcggcagttcctgtaccgggtgctgcccgaggattcttacaaggtgactaccggaaaattgcacgtgtcattaactcgcctcaccgacggagagaacgtagtcgtctctgaatttactagtaaagaggagcttattgaggcattgtattgttcctgctttgtcccagtgtactgcggcctcatcccccccacctaccggggggtgtgggctttcctcacattacctccccagagatacatcgatgggggattcaccggtatgcaaccctgtgccttttggaccgacgccatcacaatatcaacattcagcggccaacaggacatctgcccaagagactgcccagctattttccacgactttcggatgttcaactgctcattccagttctccctagagaacatcgcccgaatgacacacgcactttttccccctgaccttgttattctccacgattattactaccgaggatatgaggacgcagtgctctacctgaggaggttaaacgcagtctaccttaactcctcaagtaagcgcgtgatctttcccagggtcgaagtctactgtcaaatcgaacttgctctaggcaacgaatgcccagagcgctcccagcccagtctcagagcccgacaggccagtttggaaggcgcaacccagcctcacaaggagtgggtgccaaagggcgacggtcggggcagtcatggacctcctgtctctcagcctgttcagaccttagagttcacctgtgagagtccagtatctgctcctgtcagcccactggagcagccgccagcccaacccctggccagtagcaccccactttctctcagcggtatgccaccggttagctttcccgctgttcacaagcctcctagttctacgcccggcagctctctgcctaccccaccaccaggactgagccctctatccccccaacagcaggtacagcctagcgggagtcctgcaagatctctgcattcccaggcccccacaagcccacgtcctagcttgggacccagtacagtgggggcaccccagaccctgcctcggtcatccctaagcgcatttccggcccaacctcccgttgaggagcttggacaggaacagccgcaggcagtggccctgctcgtttccagtaagcctaagagtgcagtgcctcttgtgcacgtcaaggagaccgtgtccaaaccatacgtcactgaaagccccgccgaggatagtaactgggtgaacaaagtgtttaaaaaaaacaaacagaagactagcggaaccaggaagggttttccgaggcatagtggtagtaagaagccctcctccaaggtacagtag

SEQ ID NO: 198738 - DNA, 1515 bp, synthetic construct
  misc_feature 1..1515: note = Description of Artificial Sequence: Synthetic coding sequence
  source 1..1515: mol_type = other DNA
atgttcccccgggagaagacctggaacatcagcttcgccggctgcgggtttctgggcgtgtattatgtcggtgtagcgagttgcctgcgtgaacacgctccatttctggtggctaacgccactcacatctacggcgcctccgccggagccctaactgccaccgctctggtgactggagtctgcctcggtgaagcaggagccaagttcattgaggtttcaaaagaggctcgcaaacggttcttgggccctctgcacccctcctttaatctcgtcaagatcatcagatctttcctcctgaaagtcctgcccgccgacagtcatgaacacgcttccgggcgactcggcatttcactgactcgggtgagcgatggcgaaaacgttatcatcagccattttaattccaaggacgaactgatccaggctaacgtgtgcagcggtttcattcccgtgtactgcggactcataccaccttccttacaaggcgtccggtatgtggatgggggaatttccgacaacctacccctgtatgagctgaaaaacactattacagtgagtcctttctccggcgagtcggatatctgcccccaggattcttcaactaacatccatgaactgagggtgacaaacacgtctatccagtttaatttgaggaatctgtacagactgtccaaggccttgttccctcccgaacctctggtgcttcgcgagatgtgcaagcaaggttaccgcgacggactccgcttcttgcagcggaacggcctgctcaaccggcccaatccgctgctggctctgccacccgctcgaccacacggcccagaggataaggaccaagccgtggagagcgcccaggctgaagattattcgcagctcccaggggaggaccacatcttagagcacctacccgctaggctgaacgaagccctccttgaggcatgcgtggagcccaccgatctgctgacaaccctgtcaaatatgctgccagttagactggccacagctatgatggtgccttacacactgccactggaaagtgctctgagctttacgataagactcctggaatggctaccggatgtgcccgaagacatacggtggatgaaagaacaaaccgggagcatttgccaatatcttgtgatgcgggccaaacggaagttaggacggcacctgccgagtaggttgcccgagcaggtggagctgagaagagtgcaatcattacctagcgtgcctctatcgtgtgcagcctacagagaagctctgcccggatggatgcgaaataacctcagcctcggagatgctttagctaagtgggaggaatgtcagcggcaactgctcctgggactcttttgcacaaacgttgctttcccccccgaggctcttcgtatgcgggcccctgccgatccagctcccgctcccgccgatcccgcatcacctcagcaccagttggccggtccagctcctttactctcaactcccgccccagaggcccggccggtcatcggcgctttgggcctttag

SEQ ID NO: 198739 - DNA, 1290 bp, synthetic construct
  misc_feature 1..1290: note = Description of Artificial Sequence: Synthetic coding sequence
  source 1..1290: mol_type = other DNA
atgggcttcctggaggaggagggccggtggaacctgagcttcagcggggctggctatcttggagcgcaccatgtgggcgctaccgagtgccttagacagcgagcgccaaggctactccagggtgcccgacgtatctatggatcctcatcaggcgccctgaatgcagtgtctatcgtctgtggaaagagcgtcgatttttgctgcagccatctgttaggaatggttggacagcttgagcggttgagcttgagcatcctacatcctgcttacgcgcccattgagcacgtcaaacagcagttacaggacgcattgccacctgacgctcacgtgttggccagccagagacttggcatttctctaacccgatggcccgatggccgcaacttcttagttaccgatttcgccacctgcgatgagctaatccaggcactcgtatgtaccctgtattttccattttattgtgggttgatcccacctgaattccggggtgaacggtacattgatggagctctgtcaaataatttaccgttcgcagactgtcccagcacgatcactgtctctccttttcacggaacagttgacatctgtccccagtctacatctcccaatctgcacgagcttaatgtgtttaatttctccttccaaatctctacggagaacttcttcctgggcctcatatgcttaatacctccatccctggaagtcgttgcggacaattgcaggcaggggtacctggatgccctgcggtttctagaacggcgcggcctcacgaaggaacccgtgctctggactctcgtcagtaaggagccccctgccccagctgacgggaactgggatgcgggctgtgaccagcgctggaaaggtggtctcagccttaactggaaagtgccccatgtgcaggtcaaagatgtgcctaactttgagcaattgagccctgaacttgaagctgccttgaagaaggcctgcacacgggatccctcccggtgggcaagattttggcattccgggccaggccaggtgctgacctacctgcttctcccttgtacactgcccttcgaatatatttattttcgctcaagacgcttagtggtgtggctgcccgacgtgcctgccgacctgtggtggatgcaggggctactacggaatatggctctggaggtgttctccaggactaaagctcagttactgggcccaatttcccccccagccacccgggtgctggagacatctcctctgcagccacagatcgctccccaccgagaggagttgggacctactcaccaggcatag

SEQ ID NO: 198740 - DNA, 1515 bp, synthetic construct
  misc_feature 1..1515: note = Description of Artificial Sequence: Synthetic coding sequence
  source 1..1515: mol_type = other DNA
atggccgcccagcggcggagcctgctgcagagcgagcagcagccctcctggactgacgatctgcccctctgccatttgtccggcgttgggtcagccagcaacagatcctatagcgcagacggaaaaggtaccgagtcgcatccacccgaagatagttggctgaagtttcgcagcgagaataattgtttcctgtacggcgtcttcaacggttacgatgggaacagggttacgaacttcgtcgcacagaggttgagcgccgagctgctgctaggacagcttaacgcagaacacgctgaggccgacgtgagacgtgttctcctccaggcattcgacgtcgtggaaagaagttttctcgagtctatcgatgacgctctggcggagaaggcatccctccagtctcagctcccggagggcgtgccccagcaccagctgccaccccagtaccagaagatacttgagcgcctgaaaacccttgagcgagaaatctcaggaggcgccatggctgtcgttgccgtactactgaataacaagttgtacgtggctaacgtcggtacgaacagagccctgctctgcaagagtacagtcgatggccttcaggtaactcagctgaacgtggatcacaccaccgagaatgaagacgaactatttcgtctgtcacaacttggcttggacgctggtaagattaaacaggttggtataatttgcgggcaagagtccacaagacggatcggtgattataaggtgaagtacggctataccgatattgatttattatctgcagccaagtccaaacccataattgctgagccagagatccatggcgcccagcccttggacggagtcaccgggttcctggtgctgatgtcggagggcctttacaaggcgctggaagctgcccatggccccggccaggctaaccaggagatagctgcaatgattgacaccgagttcgccaaacaaactagcttggacgcagttgctcaggcagtggtagacagagtcaagagaatacactctgacacattcgcaagcggtggcgagagagcacgcttctgtccaaggcatgaggacatgaccctgctcgtgaggaactttggatacccactgggggagatgtctcagccaactccctccccagctcccgctgccggaggacgggtgtatcccgtcagcgttccttattcctccgcgcaatcaaccagtaagactagcgtcaccctgagcctcgtaatgccaagccagggacagatggtgaatggggctcactcagcctctaccctggatgaagcaacacctactctcacaaaccaaagccccacactgaccctccagagcacaaacacccatacccagtcatcttcctccagcagtgatggaggacttttcagaagtcgacccgcccatagtttaccccctggggaggacggtagggtcgagccatacgttgactttgcagagttttatagactgtggagcgtggatcacggcgaacagtccgttgtcacagccccctag

SEQ ID NO: 198741 - DNA, 948 bp, synthetic construct
  misc_feature 1..948: note = Description of Artificial Sequence: Synthetic coding sequence
  source 1..948: mol_type = other DNA
atgggcttcctggaggaggagggccggtggaacctgagcttcagcggtgcagggtatttaggggcacaccacgtgggagctaccgaatgtctgaggcagagggcgccacgcctgctgcagggggcacgcaggatatatggctcaagtagcggcgctctgaacgcagtttccatcgtgtgtggaaagagcgtagattgcccctcgacaattacagttagtccttttcacgggaccgtggacatatgccctcagtccaccagccctaatctgcatgaacttaatgtcttcaatttttccttccagatctcaacggagaatttcttcctaggcttgatctgtctgataccgccctcacttgaggtcgtcgctgataactgcagacagggctaccttgacgcactcagatttctggagagacgtggtctgacaaaggaacccgttctgtggacactggtatccaaggaaccccccgcgcccgccgatggtaattgggatgccgggtgtgaccagaggtggaaagggggtctgagcctgaactggaaggttcctcacgtgcaagtgaaagacgtcccaaatttcgagcagctgtcaccggagttagaggcagccctaaaaaaagcctgcacaagggaccctagtcggtgggctcgattttggcattccggacccggccaggtcctgacttacctcttgctgccgtgcacactgccctttgagtacatctacttccgctctcgccgcctggtagtttggttgcccgacgtgcccgccgatctctggtggatgcagggcctcctccgaaacatggcactagaggtattttcaaggaccaaggcgcaattattgggcccgatttcgcctcccgccacccgcgtccttgaaacaagtcccctacaaccgcaaatagctccgcacagagaagaacttggccctacccaccaggcatag

SEQ ID NO: 198742 - DNA, 807 bp, synthetic construct
  misc_feature 1..807: note = Description of Artificial Sequence: Synthetic coding sequence
  source 1..807: mol_type = other DNA
atgggcttcctggaggaggagggccggtggaacctgagcttcagcggcgctgggtacttgggcgctcatcatgtaggggctactgagtgtctcaggcaacgagcacctcgcctcctgcagggagcccgaaggatttacggcagctctagcggagcattgaatgccgtatctatcgtgtgcgggaagtccgtcgacttctgctgttcccatctgctgggaatggtgggccagctggagagactaagcctgagcatcctgcatcctgcctatgctcccattgaacatgttaaacaacagctccaagatgccctgccccccgatgcgcatgtgctcgcctctcagcggctgggcatctccctaacacggtggcctgatggacgtaattttttggtgacagattttgccacctgtgatgaactgatccaagtggtggcagacaattgtcggcaaggttacctggatgcgctcaggtttctggagagaagaggtcttacgaaagagcctgtcctgtggacgctcgtttccaaagagcctcccgctccagctgatggaaactgggacgcaggctgcgatcagagatggaagggcgggctctccctcaattggaaagtccctcacgttcaggtcaaagatgtacctaatttcgagcagctctcacctgaacttgaggcagctctaaagaaggcatgtacaagggatccttctcgatgggcccggttctggcactccgggcctgggcaggttttaacctacctgctgctcccttgcactctgccctttgagtacatctactttcgcagccgctag

SEQ ID NO: 198743 - DNA, 948 bp, synthetic construct
  misc_feature 1..948: note = Description of Artificial Sequence: Synthetic coding sequence
  source 1..948: mol_type = other DNA
atgggcttcctggaggaggagggccggtggaacctgagcttcagcggcgcaggttatttgggagcgcatcatgttggcgcaacggaatgcctgagacaaagagccccccgcctgctgcagggcgctaggcgcatctacgggtcttcctcaggcgcactgaacgcagtgtctatcgtctgcggtaagtccgtggattgccctagtaccattacagtgtcacccttccatggaacggtggatatctgtccccagtcaacctctcccaacctccatgaactcaacgtgtttaatttcagtttccaaatcagtactgagaatttctttttgggactaatctgcttaatccccccgtccctggaggtcgttgccgataattgccgacagggctatctggacgctctgcggttcctggagaggagaggactcacgaaagaaccagttctctggacccttgtcagtaaagaaccaccagctcctgcggacgggaattgggatgccgggtgcgaccaacggtggaaggggggcctgtcacttaattggaaggtgccccacgtgcaggtgaaagatgtcccaaacttcgagcagttatcacccgagctcgaagcggcgctgaagaaggcttgtaccagagatccctcaagatgggcccgattttggcacagcggtcctggtcaagtgctcacttacctcttacttccttgcacactcccttttgagtatatatacttcaggagccgtaggctagtcgtatggctgcccgacgttcccgccgacctgtggtggatgcaaggactgcttcggaacatggccctggaggtcttctccaggacaaaagctcagttattaggccccataagtccacccgccacgcgtgtcctggagacatccccattgcaaccgcagatcgccccccacagagaggaattaggcccaactcatcaggcctag

SEQ ID NO: 198744 - DNA, 708 bp, synthetic construct
  misc_feature 1..708: note = Description of Artificial Sequence: Synthetic coding sequence
  source 1..708: mol_type = other DNA
atggaggaggagacccacaccgacgccaagatccgggccgagaacggcacaggaagtagtccacgcggaccgggatgctcactcagacacttcgcctgcgaacagaaccttttgtctcggcccgatggcagtgcttcttttctgcagggggataccagtgtactggcaggggtgtatggccccgctgaggtgaaggtcagcaaagagatctttaataaggctacacttgaagtcatactgcggcctaaaattggcctgccaggagtggctgaaaagagcagagagcgcttaattaggaatacatgcgaggccgttgtgctcggaacattgcatcccaggacaagcattactgtcgtactccaggtagtgtccgacgcaggttcactactcgcttgctgcttgaacgcagcttgtatggcattggtggacgctggggttcctatgcgcgcactgttttgcggcgtagcctgtgcactcgattcagacggcaccttggtcctcgatcccacatctaagcaggagaaggaagccagggcagtactgacttttgcactcgactcggtagaaaggaaattgctaatgtcaagcaccaaaggcctctatagcgacacagagttacagcagtgcctggccgcagcacaggccgcgtctcagcacgtattccggttctatcgggaatccctccagcgacgatactcaaaatcttag

SEQ ID NO: 198745 - DNA, 4128 bp, synthetic construct
  misc_feature 1..4128: note = Description of Artificial Sequence: Synthetic coding sequence
  source 1..4128: mol_type = other DNA
atggaggcccccctgcagaccggcatgatgggcaccagcagccacggcctagcaactaattcgtctggggccaaggtagcggagagggacggttttcaggacgtgcttgcaccgggagaggggtccgcgggcaggatctgtggcgcccagccggtgccctttgtgccgcaggtgctgggcgtgatgattggcgccggcgtggccgttgtggtgacggccgtgctgatcttacttgtggtgagaaggttgcgcgtcccaaagaccccagctcccgatggtcccaggtaccggttcagaaagagggacaaggtcctgttctatgggagaaaaatcatgagaaaggtctcccagagcacctcgtctctagtggatactagcgtctctgcaacatcccgacccaggatgcgtaaaaagctaaagatgcttaatattgcaaaaaagattttgcggattcagaaggaaacccctactttacagcggaaggagccgcctccagcagtcctggaggccgaccttacagagggagatttagcaaactcgcacctacctagtgaagtgctttacatgctgaagaacgttagggtgttaggccacttcgagaagccactcttcctggaactgtgccgccatatggttttccagagactcgggcagggagattacgtatttagacccggtcagcccgacgcctccatttatgtggtccaggacggtctgctcgagctctgtttgccagggcccgacgggaaggaatgtgtcgttaaggaagtggtaccaggcgatagtgtcaactcactgctgtctatcctagatgtgattaccggccatcagcacccacaaagaactgtgagtgcacgcgctgctcgggacagcacagttttacgcctgcccgtggaggcctttagtgccgttttcaccaaataccctgagtctttggtgcgagtggtgcaaatcattatggtcaggctacagcgggtcacatttctcgctctccacaactacctgggccttacaaatgaactgtttagccacgagattcagccactgcgtctgttcccctctccaggacttcctactaggacatctcctgtacggggctccaaaaggatggtcagcacctctgctacagacgaacctagggaaactcctggaaggccgcctgatcctacaggtgccccgctccctgggccaacgggggatccggtcaaaccaacctcacttgaaaccccttccgccccactgctcagtagatgcgtgtcaatgcccggagacataagcgggctccagggcggcccaagatctgactttgatatggcatatgagagaggtcgcatctctgtcagcctgcaggaagaggcttctgggggatcccttgctgctcccgctagaacccccacgcaggaacctagagaacagccagcaggcgcctgcgagtattcatactgtgaagatgagtcggccaccggcggctgcccgtttggcccataccaaggtagacagaccagcagcatatttgaagctgcgaagcaggaactcgccaagctaatgcggattgaggaccctagccttttgaactcacgggtccttctgcaccacgcaaaggccggtaccatcatcgccaggcagggggatcaggatgttagtttgcattttgtgctgtggggctgcctgcacgtgtaccaacggatgatcgataaggcagaagatgtgtgtctcttcgtggctcaacctggtgagttggtaggccaactagccgtcctgacgggagaacctttaatcttcaccttgcgggcgcagcgagactgtacatttttgagaataagcaaaagcgacttctatgagattatgcgcgctcagccctcagtcgttctgtctgctgctcacaccgtggcagcccggatgagtccctttgtgagacaaatggacttcgcaattgactggacagctgtcgaggcagggagggccctgtaccgacaaggtgaccgcagtgattgcacctacatagtcttgaacggccgtctacggtcagttattcagagagggtccggcaaaaaggagttagttggcgagtatggtcgcggtgatctgatcggcgtggtcgaggctctcacgcggcagcctcgagcaaccaccgtgcatgctgtgagagacacagaattggctaagctgcctgaaggtacgctcggacacattaaaagacgctacccccaggtggtgaccaggctgatacatttactgtcacagaaaatcctgggaaatctacaacaactgcagggtcctttccctgccggttccgggcttggcgttcctccccactcagagttaacaaaccctgcctcgaacctagccacagttgcaattttaccagtttgtgccgaagttccaatggtcgccttcaccctcgagctacagcacgctcttcaggccatcggacccactctcttactgaatagcgatatcatccgcgctcgactaggggctagcgcattggattcaatccaagaatttcggttgtcaggatggttggcccagcaggaggacgcgcaccgcatcgtgctttatcaaacagatgcttctctgaccccctggacagtccggtgcctcagacaggccgactgcatcctaatcgtgggcctgggggaccaggaaccaacgctagggcagctggagcagatgctggagaacacggccgtccgggctctcaagcagctcgttctcctccaccgggaggagggagcggggccaacccgcaccgttgagtggctcaatatgagaagctggtgcagtggtcacctgcacttacgatgtccacgtcgcctcttttctaggcgctcgcccgctaagctgcacgagttgtatgagaaggtgttctctcggagggcagacaggcacagcgatttctcaagactggccagggtactgaccggcaacactatcgccctggtactgggaggcggaggagctaggggctgctcacacattggcgtcctgaaggccctggaggaagccggtgttcccgtggatctggtcggaggcacttcaatcggctcctttattggagccttgtatgccgaggagagaagcgccagccgcaccaagcaacgtgcccgagagtgggccaaatctatgacatctgttctcgaacccgttctcgacctgacctacccagtcacctccatgttcaccggctccgcgttcaaccggagcattcaccgggtattccaagacaagcagattgaagacctgtggctgccgtactttaatgtgacaaccgacatcaccgccagtgccatgcgggtgcacaaagacggttccctctggcgttacgtcagggcaagcatgacactgtcgggctacctcccacccctgtgtgacccaaaggatggccaccttctgatggatggaggctacatcaataatttgccagccgacatcgctcgcagcatgggggccaagactgtgattgctatagatgtgggctcgcaggacgagacggacctgagtacgtatggcgatagcctctcaggctggtggctgctgtggaagagactgaatccgtgggccgacaaagttaaagtgccagacatggcagaaattcagtcccgactcgcgtatgtctcctgtgtgcgccagctcgaagtagtgaagtcaagctcctactgcgaatatttacggccacctatagactgctttaagacaatggattttggcaagtttgaccaaatatacgacgttggatatcaatacggcaaggccgtgttcggcggctggagtcgaggcaacgtgatagaaaaaatgttaactgataggagaagcacggacctgaacgagtcacgacgcgccgatgttcttgccttcccgagttcaggcttcacagatctggcagaaatagtgagtcgaatcgagccgcctacctcctatgtgtctgatgggtgcgccgacggagaggagtcagattgcctgactgagtacgaggaggacgccggcccagactgctcaagggacgaaggtgggtcaccagagggcgcatccccaagtaccgcgagtgaaatggaggaggagaaatctattttacggcaaaggagatgtctgcctcaggaaccgccaggttctgcaacagatgcttag

SEQ ID NO: 198746 - DNA, 3984 bp, synthetic construct
  misc_feature 1..3984: note = Description of Artificial Sequence: Synthetic coding sequence
  source 1..3984: mol_type = other DNA
atggaggcccccctgcagaccggcatggtgctgggcgtgatgatcggagccggagtcgctgtggtggttaccgctgtcctcattctgctcgttgtgaggcgcctccgcgtgccaaagacaccggcccctgatggccccagatacagattcaggaaacgtgacaaagtcttgttttatgggcggaagattatgcgaaaggtcagtcaatccactagcagtctagtggacaccagcgtgagcgccactagtcgcccaaggatgagaaagaagttgaaaatgttaaacatcgccaagaagattttgaggatccaaaaagagaccccgacgctgcagcgaaaagagcctcccccagccgtgctggaggccgacctgacagagggcgatcttgctaactcgcacctgcctagcgaggtcctgtacatgttaaaaaatgtcagggtcttggggcattttgagaagcctctgttcttggagctgtgcagacacatggtgtttcagcgtctagggcagggagactatgttttccgtccgggccaaccggatgcgtccatctacgtggttcaggatggcctcttggagttatgcttgccaggccccgacgggaaagagtgcgttgtaaaggaagtggtgccaggagactccgtgaatagcctgttgagcattctcgacgttatcaccgggcaccagcaccctcaaagaacagtctccgccagagccgctcgtgacagtactgttctgagactccctgtggaggcattttctgctgtcttcacaaaatacccagagagtttagtgagagtcgtgcagatcattatggtgaggctgcagcgtgtcacgttcctggcactgcacaactacctggggcttactaatgaactgttcagccatgaaatccagccactgcggctcttccctagtccagggctgcccaccagaaccagtcccgttcgggggtctaagaggatggtgtccacatcagcaaccgatgagccacgggaaacaccaggaagacccccagatcccacaggggctcctttgcctggcccaaccggcgatcccgtgaagccaacaagccttgagactccatctgcaccgttgttatcccgttgcgtcagcatgcccggggacatcagtggtctgcaagggggcccccgaagtgattttgacatggcttacgagcgtgggcgcatttcagtcagtctgcaggaagaggcttctggggggtcactggccgctcccgctcgaactccaactcaagagcctagagagcagcctgccggagcatgtgaatattcctactgcgaagacgaatcagcgaccggcggctgtcccttcggcccttatcagggtaggcagacctcatcaattttcgaggctgccaaacaggaactggcaaagctgatgcgcatagaggatccatctctcttgaactctagggtgttgctccaccatgcgaaggccggtacaattatcgcacggcagggtgatcaggacgtttctctgcatttcgtgctttggggttgcctgcacgtttaccagaggatgatcgataaagccgaagacgtctgccttttcgtcgcccagccaggggagctggtgggtcagctggcagtcctcacaggggagcctttaatattcaccctaagggcccagcgagactgtacgttcctgagaatcagcaagtcagatttctatgagatcatgagagcacagccttcagttgtactcagcgccgcccatacggtggccgcccggatgagcccttttgtcaggcagatggacttcgccatagactggactgccgttgaagccggacgcgctctgtatagacagggcgacagatctgattgtacatatatagtcctaaatgggaggctacggagtgtgatccaaaggggcagcggcaagaaagaattggtgggagaatatggccgcggcgatctgattggggtggttgaagcacttaccagacagccccgagcgacgaccgtgcatgcggtgcgagacacggaactcgccaaactccccgagggcacactgggtcacatcaagaggcggtaccctcaggtcgttacacgccttattcacctgctcagccaaaaaatcctcggcaacctccagcaactgcaggggcctttccctgctggcagtggcctgggcgtgccacctcacagcgaactgaccaatcctgccagcaatcttgcaaccgtcgccattctccccgtgtgcgcagaggtgcctatggtggcatttacacttgagttgcagcatgctctccaggcgatcggccccactctgcttttgaatagcgacatcatccgggccaggctcggagccagcgccctcgatagcattcaagagtttaggctcagcggatggctagcccagcaggaggacgcgcatcggatcgttctctaccagactgatgcctctttgacgccttggacggtgcggtgtctccgccaggctgactgtatactcatcgttggcctcggagaccaggagcctacactgggtcagctcgagcagatgttggaaaacaccgccgtcagagctctcaagcagcttgtcctccttcatagagaagaaggcgccggtcccactcggaccgttgagtggttgaacatgcggtcatggtgttctggacatcttcacctgaggtgtcctcgacgactgttcagccggcggagcccagcaaaacttcacgagctttacgagaaggttttttctagaagggccgaccggcattccgactttagtagacttgctagggtgctgaccggtaatacaatcgccttggtgttgggtggggggggagcacgggggtgctcacacatcggtgtactcaaggccctggaggaagccggtgtgcctgtggacctcgtaggaggcacaagcatcggcagcttcatcggcgcattgtatgcagaggagcgctcagcttccaggaccaaacagcgggcccgcgagtgggcgaagagcatgacctccgtgctcgaaccagtactagacctgacatacccagtaacctctatgtttacaggtagcgcttttaacaggtctatccacagagtctttcaggacaaacagattgaggatctgtggctcccctattttaatgttacaacggacattaccgccagtgctatgcgggtgcataaagacggttccctctggcgttacgtacgggcctccatgacgctcagcggctatctccccccactgtgcgatccaaaggacggccacctcctgatggacgggggctacatcaataatttgcccgcagatatcgcgagaagcatgggcgcaaagacagtgattgccatagacgttggctcgcaggatgagactgacctatctacctacggagattcgctcagtggttggtggctgctctggaagcgcctcaacccttgggccgataaggtcaaggtcccggatatggcggaaattcaaagcagactggcatacgtaagctgcgtgagacagctggaggtggtgaagtcctcttcatactgtgagtaccttcgccctccgattgactgcttcaagaccatggattttggaaagtttgatcagatctacgatgtgggataccagtacggaaaagccgtgtttggcgggtggtcaaggggtaatgtgatcgaaaaaatgctcaccgataggaggtcgaccgatttgaatgagtctaggcgggctgatgttcttgcctttccgagcagcggcttcactgacttagcggagatagtgtcccggatcgagcccccaaccagctacgtctcggacggctgtgccgacggcgaggagtcagattgcctgactgaatacgaagaggacgccgggccggattgctcacgcgatgaaggcgggagccccgagggggcttctccatccacagcatcagaaatggaagaagagaagagcattctgcgtcaacgacgctgtttacctcaggagccccctggctcagccaccgatgcttag

SEQ ID NO: 198747 - DNA, 1371 bp, synthetic construct
  misc_feature 1..1371: note = Description of Artificial Sequence: Synthetic coding sequence
  source 1..1371: mol_type = other DNA
atgcggaaggtgagccagagcaccagcagcctggtggacaccagcgtatccgctacctccagaccgcgaatgcgcaaaaaacttaaaatgctgaatattgctaagaagatactgcggatccaaaaggaaactccaacactgcagcggaaagaaccgcctcccgccgtgttagaggcagatctgaccgagggcgatctggcaaatagccatctgccctcagaggtgctctatatgttgaagaacgtaagggtgttgggccactttgagaagccgctgttcctggagctgtgcagacacatggtgttccagaggctgggacagggtgactacgttttcaggcctggtcaaccagatgcctctatctacgtggtgcaagatggactcctagagttgtgcctgcctggccccgacggcaaggagtgcgtggtgaaagaagtggtccctggtgacagcgtcaacagcttattaagcatactggacgtgattactggacaccagcacccgcagcgcactgtctctgccagagccgcacgcgactcaaccgtgttgcggctgcctgtcgaggctttttccgccgtttttacaaaatatccagaatctctggtcagggtcgttcaaataataatggtgaggttacagcgggtgaccttcctcgctctccataactatctcggcctaaccaacgaattattcagtcacgaaatccaaccactcagattgttcccttcccctggcctccctacccgcacaagcccggttcgcggaagcaagcgcatggtctcaacctctgcaaccgatgagccgcgagagacacccggccggccgcctgacccgaccggtgcaccccttcctgggcctaccggtgaccctgtgaagcccacctccttggagacacccagcgctcctctactgtctcggtgcgtgagtatgcccggagacatttctgggttgcaaggtggccctaggtccgacttcgatatggcctacgaacgaggccgtattagtgtgagtctgcaggaagaagcatccggcggctcactggccgcacccgcaaggacgcctacacaggagccgagggaacagccagcgggagcctgtgagtatagctattgcgaggatgaaagtgcaactggaggatgcccctttggaccgtaccagggccggcagacttcttccatcttcgaggcagctaagcaagaactagctaaattgatgcgtatcgaagaccccagcctgctgaatagcagagtgttgttgcatcacgccaaggctgggactatcatcgcgcggcaaggcgatcaagatgtgtccgggccccacactggcctcacctgtcccgagagaggatgctctgtggccctgatgacctag

SEQ ID NO: 198748 - DNA, 3903 bp, synthetic construct
  misc_feature 1..3903: note = Description of Artificial Sequence: Synthetic coding sequence
  source 1..3903: mol_type = other DNA
atggaggcccccctgcagaccggcatggtgctgggcgtgatgatcggcgctggcgtggccgtcgtggtaactgccgtactcattcttctggtggtcagaagactgcgtgtacctaaaacgcctgccccggatggcccacggtaccgcttccgcaagagggacaaggtgctgttttacggaaggaaaatcatgcgcaaggtttcccagagcacatcttctctggtggatacttctgtgtccgcaaccagtaggccaaggatgcggaaaaagctgaaaatgttaaatattgcaaaaaaaatcttaaggatccagaaggagacccctaccctgcagaggaaggaaccgcccccggcggtacttgaggctgatctcacggaaggcgatcttgccaacagtcacctgccgtccgaagtgctttacatgttgaagaacgtgagagtattaggccactttgaaaaacccctctttcttgaactttgtcggcacatggtcttccaacgactgggtcagggagattatgtgtttcgacccggacagcctgacgcaagcatatatgtcgtgcaagatggtctgcttgaactctgcttgcccggccccgacggcaaggagtgtgtcgtaaaagaagtggtgccaggggacagtgtcaacagtcttctgtccatactggacgttatcacgggccatcagcatcctcagagaaccgtgagtgctagggcagcaagggactcaacagtcttgagactgcccgtcgaagccttctctgcggttttcactaagtatcctgagagcctcgtccgagtggttcagatcataatggtccgactgcagcgtgtgactttccttgccctacataattacctgggcctgaccaacgagctgttcagccacgagatccagcctctccgcctctttccttccccaggtctccccacacgaacgtcccccgtccgggggtccaagcggatggtgtctaccagtgcgaccgatgagccccgcgaaaccccaggccggccgccggatccaaccggagctccactgccaggacccaccggagaccctgtgaaaccaacctctctggaaactccgagcgcccccttgctaagccgatgcgtctccatgcctggtgatatctcaggacttcagggagggccacgcagtgatttcgatatggcatacgaaagaggccgaatctctgtgagcctgcaggaagaggcaagcggagggagcttagccgctccagctagaacacctacacaggagccgcgcgagcagcctgccggggcatgtgagtattcatactgtgaggacgagtcagcgacgggggggtgccctttcggcccctaccagggccgccagacttctagcatatttgaagccgccaaacaagagctggccaagttgatgcggatcgaagacgtctcattgcattttgtcctttgggggtgtctgcacgtctaccagcgaatgattgacaaggctgaagatgtgtgcctgttcgtcgcgcaacctggggagttggttgggcagctggctgtcctgactggtgagcccctgatcttcactctgcgcgctcaacgcgattgcacttttctacggatttctaaatctgatttctacgagataatgagggcgcaaccctcagtggttctgtcggctgctcacaccgtcgctgcaaggatgtcccccttcgttaggcaaatggacttcgccatcgattggaccgccgtggaagcaggtagggcactgtataggcagggagacagaagtgattgcacatatattgtcctgaatggtcggctgcgatcagtcatccaacggggatctggcaagaaggagttggtgggggaatatgggcgaggcgatttgatcggagtggttgaggctctgactcgtcagcctagggcaacaaccgtccacgctgtccgggatactgagctcgcaaagctacccgaagggaccttgggccacatcaagcgcaggtatcctcaggtggtaacaagactcatacatctgctgagccagaagatcctgggtaaccttcagcagctgcaagggcccttcccaggttctggcctgggagtgcccccccattctgagctaaccaatccggcgagcaatctcgctaccgttgccatcttgccagtgtgtgcagaggtgcctatggtcgcattcacactcgagctgcaacacgcactgcaggcaataggccccacactcttgctgaacagtgacattatccgcgccaggctgggtgcctcagccctcgacagcattcaggagttcagactgtccggctggctggctcagcaggaagacgcccatcgtatcgttctgtaccagacggacgcctctctgacaccatggacagtgagatgtctgcgccaagcagattgtattcttatcgtgggacttggagatcaggagccaacactgggacagcttgaacagatgctggagaacacagctgtaagagcactgaagcagctggtgctcctacatcgggaggagggagcagggcccacaaggacagtggaatggctgaacatgaggtcttggtgcagtggccacctccacctgaggtgtcctcgtcgcttattctctcgccgcagccccgccaaactgcacgagttgtatgagaaggtatttagcagacgggcagacagacactccgatttttcccgcctggccagagtcctcactggcaatacgatcgccctggtcctgggggggggtggggcaagaggatgtagccatattggtgtgttaaaagccctagaggaggctggcgtccccgtggatttagtaggcggaaccagcattggatccttcattggagcactgtatgccgaggaacggagtgcgtcccgcactaagcaaagagctcgggagtgggcaaagagtatgaccagcgttctggaaccggtgctcgatcttacttatccagtaaccagcatgtttactggctccgccttcaaccgatctatccatcgcgtctttcaggacaaacagatcgaggacttgtggctgccatactttaacgtgactaccgatatcacagctagcgccatgagggtgcacaaggacggctctctctggagatacgtgcgagcatcaatgaccctgtcgggttatctgccccccctctgcgaccccaaagacggacaccttctgatggatggaggctatatcaataacctaccagctgatatcgcaaggtccatgggggccaagactgtgatcgccatcgatgtgggtagccaggacgagaccgacctgagtacctatggcgattctctctcaggctggtggctgctctggaagcggcttaacccctgggccgacaaggtgaaagttcccgatatggctgagatccagtctcggctcgcctacgtttcatgcgtgagacagttagaggtagtgaagtctagttcctactgcgaatatctccggccccccattgactgctttaaaaccatggacttcgggaagttcgatcagatctatgatgtgggctatcagtatggtaaagccgtgtttggtggatggtctcgcggtaacgttatcgaaaaaatgctgacggataggcggagtactgacctgaacgaatcacgacgtgccgatgtgctggcttttccgtcctctggtttcactgatcttgccgagatcgtatccagaattgagccacctacaagctatgtgagcgacggatgtgctgacggcgaggagtcagattgcttgactgaatatgaagaggacgccggaccagactgtagtcgggacgaaggaggaagcccagaaggcgcctccccaagcaccgcctccgagatggaagaggaaaaatccatactccgccagaggcgatgccttccacaggagccgccaggcagcgcaactgatgcatag

SEQ ID NO: 198749 - DNA, 3954 bp, synthetic construct
  misc_feature 1..3954: note = Description of Artificial Sequence: Synthetic coding sequence
  source 1..3954: mol_type = other DNA
atggaggaggagaaggacgacagcccccagctgaccggcatcgccgtcggagctctattagcccttgctttggtgggcgttctcattctgttcatgtttagaaggcttcggcagttcaggcaggcgcagccaacgccgcaatatcgcttcaggaaaagggataaagtaatgttctatggtagaaagatcatgcgcaaagtgactacactacctaataccctggttgaaaatacagccctgccacgccagcgcgctagaaaacgaacaaaagtgctgtctctggcgaaaaggatcctgagatttaaaaaagagtaccccgctctgcagccgaaggaaccaccaccgagcctgcttgaggctgacctcacagagttcgacgtgaaaaattctcatctgccttctgaagtgctgtacatgctcaaaaacgtccgcgtcctcggtcactttgagaagcccctgttcctagaactgtgtaagcatatagtctttgtccaactgcaagagggcgaacatgtgtttcaaccaagggagcccgaccccagcatttgcgtcgtgcaagacggccgcctggaagtctgcatccaggatactgacggaactgaagttgtggttaaagaggtactcgctggggactctgtccactccttgctgagtattttagatatcatcaccggccatgcagctccatacaagaccgtgtctgtccgagcagccataccgagcacaatactgaggctacctgccgcagcattccatggggtgttcgagaagtaccccgagacgctggttagggtcgtgcagattatcatggtgaggcttcagcgcgttacatttttggcgctacacaactacctgggtctgacaaccgagttgttcaacgctgagtcacaggctattcctctggtttcagtcgcatctgtcgccgcagggaaagccaaaaagcaggtgttctacggggaggaggagaggctgaagaagccgcccagactgcaggagtcttgtgattccgatcacggagggggacggccggctgctgctggtcccctcctaaagcggtctcatagcgtgcccgccccgtccatccgcaaacaaatcttggaggaattggaaaagccgggagctggggatcccgacccgtcggcaccacaagggggccccggtagcgcaacatccgacctgggcatggcgtgtgacagagccagggtgttccttcattcagatgaacatccaggctcaagcgtcgcttctaaatccaggaaatccgttatggtggctgaaatcccatctacagtgagtcaacatagcgaaagccacaccgacgagacactggccagcagaaaatctgatgcgatattcagggccgccaagaaggaccttctcactcttatgaagctggaggacagctctcttctcgatggccgcgtggctcttctacacgtcccggcaggcaccgtggtcagcagacagggcgaccaggatgcatcaattctgttcgtggtatccggcctcctgcacgtgtaccagcgcaaaatcggtagccaagaggatacctgtctctttctcactcgtccaggggagatggtgggccaacttgccgttctaaccggcgagcctctaatctttactgtgaaggctaatcgggactgtagttttctttcaatatctaaagcacacttctacgaaattatgcgcaaacaacccactgtggtcctgggagtagctcatactgtggtgaaaagaatgtcctcatttgtgcggcaaattgacttcgccctggattgggttgaggtggaggccggcagagcaatctaccgacagggggataaaagtgattgcacgtacatcatgctgtctggacgcctgaggtctgttattcggaaggatgatggcaaaaaacgtcttgctggtgaatatggaaggggggatttggtcggcgtcgtagagacgctgacacaccaggctagagctacaaccgttcatgccgtgcgagactccgaactggccaagctgcctgctggggcactaacatccattaagcgccgctaccctcaggtggtcacacggctaatccatctgctaggcgagaagatccttggaagcctgcagcagggacccgtgacggggcaccagctggggctgcctacagagggaagtaagtgggacttgggcaaccctgctgtgaatctcagtacagttgccgtgatgccggtgtccgaggaggtgccacttacagccttcgctctggagctggaacacgccctctctgctattgggcctacattgctccttaccagcgataacatcaaacgtaggctcggcagcgcagccctggactccgtgcatgaatacagactgagctcttggttgggccaacaggaagacacacatcgaatcgtgttgtatcaggtggacgggacactcactccttggactcagagatgcgtcagacaggctgactgtatcctgattgtggggttgggggatcaagaaccaactgtgggggaactggagcgaatgttggagtctacggcagtgcgggcacagaaacagctgatcttactccatagagaggaagggccagcaccagccagaaccgtagagtggcttaatatgcggtcctggtgttctggccacctgcacctgtgttgccccagacgtgttttctccaggcgttccctgccaaaactagtcgaaatgtacaagcacgttttccaacggccccctgacaggcattccgatttcagccgtcttgccagagttctgactggcaatgcaattgcattagtgctcggggggggcggagccaggggttgcgctcaggtgggggtcctcaaagccctcgccgagtgcgggattcccgtggatatggtggggggaacctccatcggggcctttgtaggagctctatattccgaggaacggaactactcccagatgcgcatccgtgctaagcagtgggctgaggggatgacgtctcttatgaaggctgctctggacttaacctacccaatcacctcaatgttttcgggcgccggatttaactcgagtattttttctgtatttaaggaccagcagattgaagacctttggattccatacttcgccatcaccaccgacattacggcctccgccatgcgagtccacaccgacggatcactttggtggtatgtacgtgctagcatgtctctctccggctatatgccccctttgtgcgaccccaaggatggccacttgctgatggatggaggatacatcaacaacctaccagctgacgtggcacggtccatgggagctaaggttgtgatagccatcgatgtcgggagccgggatgaaaccgatctgaccaattacggtgacgcactgtctggttggtggctgttatggaagagatggaatccgttagcgaccaaggtcaaggtattaaatatggctgagattcagactaggctggcctacgtgtgctgcgtccgccagctcgaggtcgttaaatcctcggactactgtgaatatcttcggcctcctatagatagttacagcaccttggacttcggtaagttcaatgaaatatgtgaggtcgggtaccagcacgggaggacagttttcgacatttggggccgatctggcgtccttgaaaagatgctccgggaccaacagggaccaagtaaaaaaccggcttcggccgtactgacctgcccaaatgcttcatttaccgatcttgccgagattgtgtcaagaattgagcccgctaaacccgcgatggtggatgacgaatcggactatcaaactgagtatgaagaggagctgctcgatgtgccccgagacgcatatgcggactttcagtcgacgtcggcccagcagggctccgatctggaggatgaatcatccctgcgccatcgccatccctcactcgctttccccaaactgagcgaagggagcagcgatcaggatggttag

SEQ ID NO: 198750 - DNA, 2178 bp, synthetic construct
  misc_feature 1..2178: note = Description of Artificial Sequence: Synthetic coding sequence
  source 1..2178: mol_type = other DNA
atggtgcggctgcagcgggtgaccttcctggccctgcacaactacctggggctcaccactgagctgttcaacgctgaatcacaggcgattccacttgtctcagtggccagcgtcgcggcgggcaaggccaaaaagcaggtgttttacggagaggaggaaaggctgaaaaaaccacccagactccaggagagctgtgacagcgctgatcacggggggggacggccggccgccgctggtccattgctcaaacgatctcacagcgtaccagccccgtccattcggaagcaaatcctggaggaattggagaagccaggagcaggagatccggatccctcagcaccgcaaggccatcagctaggcctcccgaccgaaggctcgaaatgggaccttggcaaccccgcagtcaacctgtccaccgtcgccgtgatgccagtttctgaggaagtacctctaactgcattcgccctcgaacttgagcatgctctctctgccatcggtccgaccctgctgctgactagtgataatattaagcggaggctcggcagcgctgcactggactcagtccatgaatataggcttagctcatggctgggacagcaggaagacacccaccgcattgtgctttatcaggtagatggcactttaaccccatggactcagcggtgcgtgaggcaggccgactgtatcctcatcgtaggtcttggagaccaggaacctacggttggcgagctcgaacgaatgttggaaagcactgcagtgcgggcccaaaagcagctgatcctgctgcaccgtgaggagggtcccgctcccgcaagaaccgttgaatggttaaacatgcgctcctggtgctctgggcatttgcacttgtgttgcccacgacgggtgttctccaggaggtcccttccaaagctggtagaaatgtacaagcacgttttccagaggccccctgaccggcactctgacttttcccgccttgcacgggtgctcactggcaatgccattgccctggtacttggcggaggaggtgcgagaggctgtgcccaggtgggagttctgaaggcattagccgaatgcggtatacccgtggatatggttggcgggacaagtataggagcgtttgtgggcgccctttactccgaggagcggaactacagtcagatgcgtattcgtgcgaagcaatgggctgaaggcatgacttctttgatgaaggccgccctggacctgacctacccaattacgagtatgttctcaggtgctggcttcaactcatctatattcagcgtgttcaaggaccagcagatcgaggatttgtggatcccttatttcgcaattaccacagacattaccgctagtgctatgcgagtgcacacggacgggtcactatggtggtacgttcgcgcaagtatgagcctctctggatacatgccgcccctgtgcgaccccaaggacggacacttactgatggatggggggtacataaataatctgcccgctgatgtggccaggagcatgggagcaaaggtagtgatagcaattgacgttggcagtcgggatgaaactgacctcaccaactatggtgacgctctgtcggggtggtggctcttgtggaaaagatggaaccccctggccacgaaggtcaaggtgcttaatatggccgagatccaaacacgcctggcctacgtgtgctgcgtccgtcaattagaggtggtgaagtcctcagactattgtgagtacttacgtccgcccatagactcctacagcaccctcgatttcggaaaattcaatgagatttgcgaggtggggtatcagcacggcagaacagtttttgacatatgggggcgcagcggggtgcttgaaaaaatgttgagagaccagcaaggaccatccaaaaagccggcctctgctgtgcttacctgtcccaatgcatctttcaccgatcttgctgagattgtttcccgcatcgagccagccaagccagctatggtcgatgacgagtctgactatcagacagaatatgaagaagaactcctcgatgtgccccgcgacgcatatgcggacttccaatcgacgtccgcccagcaagggagtgatctcgaagatgagtcaagcctgcgtcatcggcacccaagtttagcttttcctaaactgagcgaaggatccagcgatcaggatggttag

SEQ ID NO: 198751 - DNA, 1377 bp, synthetic construct
  misc_feature 1..1377: note = Description of Artificial Sequence: Synthetic coding sequence
  source 1..1377: mol_type = other DNA
atggaggaggagaaggacgacagcccccaggccgacttctgcctggggactgctctgcatagctggggcctgtggtttacggaggaaggctctccttccaccatgctaacaggcatagcggtgggggccctgctcgccttggctttagtgggtgtgctaatcctgtttatgttccggagattaaggcagttccgccaggctcaacctaccccacaatacagatttaggaagcgagataaagttatgttctacggtagaaagatcatgcggaaggtgactaccctgcccaatactctcgttgagaacaccgccctccctcgacagcgggcccgaaagcggaccaaagtgcttagcttggcaaagaggattctgcgtttcaaaaaagaataccctgctctccagccaaaagaaccaccaccgagccttctcgaagctgacctaacagagtttgacgtgaagaactcacacctccccagcgaggtgctgtacatgctgaagaacgtgcgcgtcctcggtcatttcgaaaaacctctgttcctcgagctgtgtaaacatattgtatttgtccagcttcaggagggggagcatgtgttccagccaagggagccagaccccagtatatgtgtggtgcaggacgggagactggaagtgtgcatacaggacaccgatggcaccgaggtggttgtgaaggaggtgcttgccggggactccgtccattccctgctgtccatcttggacatcataacggggcatgccgcaccatataagacagtatcagtgcgggccgccataccatcaacaatcctgaggctgcccgcagcagcgttccacggtgtgttcgagaaataccctgaaacacttgtgcgagtcgtccagattattatggtgcgacttcaaagagtgacctttttagcactacacaactaccttggattaacaacagagctgtttaacgctgaaagccaggcaatacctctcgtgagcgtcgctagcgtcgcggccgggaaggcgaaaaagcaggtgttttatggtgaggaggagagactcaagaagcctccacgcttgcaagagtcctgtgattcggatcacggagggggcagaccagcagcggctggacctttgctgaagcgttcacactctgtgcccgcccctagcatccggaagcaaatcctggaagaactagagaagcccggagccggagaccccgacccttcagcgccccaggctagagtcttgtgccttttgccacagtgtctaggcggccttccccccacagacaccagcgtctatagttctgcttccagtgattgctgtggttgttcgatgcctgtgttgtgtattatgggccacaagccccacgtgaccgtcgacacttag

SEQ ID NO: 198752 - DNA, 3765 bp, synthetic construct
  misc_feature 1..3765: note = Description of Artificial Sequence: Synthetic coding sequence
  source 1..3765: mol_type = other DNA
atggaggaggagaaggacgacagcccccagctgaccggcatcgccgtgggcgccctcctagccctcgctttagtgggagttctcattcttttcatgtttaggcggctaagacagttccgacaggcccagcccacccctcaatatcggttcagaaaacgggataaagttatgttttatggcaggaagatcatgaggaaagtcacgacacttcctaacaccctggtggagaatactgccttgccaaggcagagggcccgcaagaggacaaaagtgttaagtctcgcaaagcggattctaagattcaagaaggaatatcctgccttacagcctaaagagcctccgccctccctgctcgaagcagatctcaccgaattcgatgtaaagaatagccatctccccagcgaagtgttatatatgctcaagaatgtacgggtgctgggccacttcgagaagcctctattcctggagctgtgtaagcacatagtcttcgtccaactccaggagggggagcatgttttccagcctcgagagcccgatccaagcatttgtgtcgtgcaggacgggcggttggaggtgtgcatacaggataccgacggcacggaggtcgtcgtgaaggaggttttagcaggggacagcgtccatagcctgctcagcattctcgacataatcaccgggcatgctgctccgtataagaccgtgtctgttcgagccgcaattccatccacaatactcaggcttccagcagcggcctttcacggggtctttgagaaataccctgaaactcttgtgcgggtcgtgcagattattatggtgcgtctccaacgcgttaccttcttagcactgcacaattatctggggttgacaaccgagctctttaacgctgagtcacaagccatacctctggtatcagtcgccagtgttgcagccggcaaagccaagaagcaggtgttttacggggaagaggaacggctgaagaagcctccacggctgcaggagtcgtgcgactcagatcacggcggagggcgcccggcggcagctgggcctctgttgaagcgttcccacagcgtgccggccccctcgatacggaagcagatcctagaagagctcgagaagccaggagccggtgaccccgacccctctgcgcctcagggcggcccggggagtgccacttccgacttaggaatggcgtgcgaccgagcacgtgttttcttgcatagcgacgagcatccgggctcttccgtggccagcaagtcaaggaagtcagtcatggtggccgagatcccctctactgtttcccagcatagcgagtcccacaccgacgagacactggcatccaggaagagtgatgctatctttcgagctgcaaagaaagatctcctgaccttgatgaagctagaggacagttccttactggatggcagagtggcacttctgcacgttcccgctggtaccgtcgtctctaggcagggagatcaggatgcgagcatcctgttcgttgtaagtggactactgcatgtttatcagagaaaaatcggctcacaggaggacacctgtttattccttacacgccccggggagatggtgggtcaacttgccgtactgactggagagccattaatcttcacagtgaaggccaatagagactgtagcttcctgtctataagcaaggcacacttctacgagataatgagaaaacagccgaccgtggtactgggagtggcccacacagtggtgaagcggatgagctccttcgtaagacagatagattttgccctcgattgggtggaagttgaggccgggagagctatctaccgtcagggcgataagtccgactgtacatatatcatgctctcaggtagactccgctctgtgattcggaaggacgacggtaaaaaaagattggccggagaatatggcagaggggatctggtgggtgtcgtggagacactgacccaccaggcaagagctactaccgtgcatgccgtgcgggatagtgagcttgccaagttgccagccggagccctcacgtctattaaacgacgctatccccaagttgtgacccgcctgatccacctgttgggagagaaaatactcgggtcgctgcagcaaggccccgtgaccggacatcagctgggactcccaaccgaggggtctaagtgggatcttggcaatccagcagtgaacctttctaccgtggccgtgatgcccgttagcgaagaggtgcctctgaccgctttcgcactcgaattggagcatgccctctcagctattggccccaccctgctgctgacaagcgataatatcaagagacgccttgggtctgccgctctggactccgttcatgagtatcggttgagttcatggctgggtcagcaggaagacactcacaggatcgtgttataccaggtggatggtaccttgactccttggacccaaaggtgcgtgcggcaagccgattgcatcctgatcgtcggcctgggagatcaggaaccgactgtgggtgagttggaacgcatgctcgagagtactgcggtgagagcccagaaacagctaatcctgttacacagagaggaggggccagctccagctaggaccgtggagtggctgaacatgaggagctggtgcagcggccacctgcatttatgttgccccaggcgcgttttttcccgccggagtctgcctaagctcgtggaaatgtacaagcatgttttccagcgtccccccgataggcatagcgattttagtcgcctggctcgcgtcctaacagggaacgctatcgccctcgtcttaggcgggggcggagctcgcggatgtgcccaggttggagtattgaaggccctggccgaatgtggtattcccgtcgacatggttggcggtaccagtatcggcgccttcgtcggtgctttgtattcagaagaaagaaattatagtcagatgagaataagagccaagcagtgggccgaaggtatgacctcccttatgaaggcagccctggaccttacatacccaattacatcgatgttctccggggcaggcttcaattcaagtatttttagcgtatttaaagatcagcagatagaagatctgtggatcccgtacttcgccattaccacggatattacagcgtcggcaatgcgggtgcatactgatggttctctctggtggtatgtgcgtgcctctatgtctttgtccgggtatatgcccccgttatgtgacccaaaggatggacacctgctgatggatggaggctacataaacaacctgcccgcggacgtggcaaggagcatgggcgccaaggtggtaattgcgatcgacgtcggatccagggacgagaccgaccttacgaactatggcgacgccttaagtggctggtggctgttatggaagcggtggaaccccctagctactaaggtaaaagtgctgaatatggctgagatccagacacgtctcgcctatgtgtgttgtgtccgtcaattggaggtagttaagtcaagcgattactgtgagtatcttcggcccccaatcgactcttacagcacccttgacttcgggaaatttaatgaaatttgcgtgccggatgaaagcgactaccagaccgagtacgaggaggagctcttggacgtgccgagggacgcctacgctgacttccaaagcaccagcgctcagcaggggagcgatttggaagacgagtccagcctgcggcaccgacatccttccctcgcttttccgaaactgagcgaggggtccagcgatcaggatggatag

SEQ ID NO: 198753 - DNA, 2772 bp, synthetic construct
  misc_feature 1..2772: note = Description of Artificial Sequence: Synthetic coding sequence
  source 1..2772: mol_type = other DNA
atggcctgcgaccgggcccgggtgttcctgcacagcgacgagcaccccggtagcagcgtggcgagcaaatctcgaaaatctgtaatggtcgcagagattcctagcaccgtgagccagcatagtgagtcccacacagacgagaccctggctagccggaaatcggatgcaatcttcagggccgccaagaaagacttgctgacactgatgaagcttgaagatagcagtttgttagatggacgcgtcgcgctgctccatgtgccagcaggcacagttgtcagcagacagggggaccaggacgcctccatactgtttgtcgtgagcgggctccttcacgtttatcagcggaagattggatctcaggaagacacctgcctgtttctgaccaggcccggtgagatggtgggccaacttgctgttctgacgggcgaaccactgatcttcaccgttaaagctaaccgggattgctcctttctcagtatctcaaaagctcacttctatgaaatcatgaggaagcaaccgaccgtagtgttaggtgtggctcatactgtcgtcaagcggatgtcctcctttgtccgacagattgacttcgcgcttgattgggtggaggttgaagccgggagggctatttatcgccagggcgacaaaagcgactgtacttacattatgctcagcggaagattacggtctgtgatccgcaaggatgacgggaaaaaaagacttgcaggagagtatggcaggggcgatttggttggagtcgtcgagacccttacccaccaggcccgcgccaccactgtgcacgccgtgcgcgatagcgaactggctaaattgccagccggagcactgacctcaatcaagcggcgataccctcaagtagtgacgcgcttgattcaccttctgggggagaaaatactgggcagcctgcagcaggggccagtgacgggccatcaactcggactgccaacggaaggcagtaaatgggatctgggaaaccccgccgtcaacctttctacggtggccgtcatgccagtctctgaggaggtgccactgaccgccttcgcactggaattggagcatgccctcagtgccatcgggcctacgctgcttcttactagcgacaacattaagaggcggctgggtagcgctgctctcgacagcgtccacgagtatcgcctcagtagctggttggggcagcaggaagacacacaccggatcgtcctctaccaggtcgacggcacactgactccttggacacaaagatgtgttcgccaggcagactgtattctcattgtaggactcggcgaccaagagccaacagtgggcgagttagagcgcatgttagaatctactgccgtgagggcccagaagcagctcatcttgctacatcgggaggaggggcctgctccagcgagaaccgtcgaatggctgaacatgcgcagctggtgcagcggacatctacatctatgctgtccgaggcgtgtcttttcccgccggagcctcccaaagctcgttgaaatgtacaagcacgtttttcagcgccctccagaccggcattccgacttctccaggttggccagggtccttacggggaacgcaatcgcactcgtgctggggggagggggagcgagagggtgcgcccaggttggcgtgctgaaggccttggctgaatgcggaattccagtggatatggtggggggcactagcatcggggccttcgttggggcactatacagtgaagagagaaattattcacagatgaggatcagagcaaaacaatgggcagaaggcatgaccagcttaatgaaggcagctctggatctgacttaccctattacaagcatgttcagtggcgctggttttaactcatctatcttcagtgtcttcaaagaccagcaaatagaagatttgtggattccttatttcgctattactaccgacatcacggcttccgcgatgcgagtgcatacagatggctcactctggtggtacgtgagggcgtctatgtctctcagtggatacatgcctccactatgcgatccaaaggacgggcatctgctgatggacggagggtacattaataatctccccgctgacgtggctcgatctatgggagctaaggtggtgatagcaatcgacgttgggagtagagacgaaaccgatttaacaaactacggggacgcactgagcggttggtggctgttgtggaaaagatggaacccgcttgctactaaggtgaaagtgcttaacatggctgaaattcaaaccaggctggcttacgtttgttgcgtgaggcaactggaagtggtaaagagcagcgactactgtgaatacctcaggccacctatagatagttacagcactctggacttcggcaaatttaacgaaatatgtgaggtggggtaccagcacggtcgtacagttttcgacatctggggcaggagtggggtgctcgaaaaaatgcttcgcgatcagcagggtccctccaagaagccggcttccgctgttctgacttgtcctaacgccagcttcactgatcttgccgaaatcgtcagccggattgagcccgcaaaacccgctatggtggatgacgagagcgattaccagacagaatacgaggaggaactgctggatgtgcctcgagatgcgtacgctgactttcagtccacatccgctcagcaaggatccgacttggaggatgagagcagtctccgccacaggcaccccagtttagctttccccaagttgagcgaagggtccagtgaccaagatggatag

SEQ ID NO: 198754 - DNA, 4029 bp, synthetic construct
  misc_feature 1..4029: note = Description of Artificial Sequence: Synthetic coding sequence
  source 1..4029: mol_type = other DNA
atggaggaggagaaggacgacagcccccaggccgacttctgcctgggtaccgctctccatagttggggcctttggttcaccgaggaggggtctccctcaacgatgctgaccggtattgcagtcggggctctcctggctctggcattagtaggcgtcctcatcctttttatgttcagacgcctcaggcagtttcgtcaggctcagcctacaccccagtatcgatttagaaagcgggataaggtaatgttctatggtagaaaaattatgcgaaaggttacgaccctgcccaataccctcgtggagaataccgccctgcctcggcagcgtgccaggaaacgtacaaaggtgctgagtctggcaaagaggattttgagatttaagaaggagtaccccgccctgcaacccaaggagcctccaccctctctgctggaagccgacctgaccgagtttgacgtaaagaacagtcacctcccaagtgaggtcttatacatgcttaagaatgtaagggttctggggcacttcgagaaacccctcttcctggagctctgcaagcatattgtgtttgtgcagcttcaggaaggggagcatgttttccagccacgcgaacccgacccaagtatttgtgtggtgcaggatggccgcctggaggtttgcatccaggataccgatggcaccgaagtagtggtcaaggaggtccttgccggtgactcagtccacagcctcctttccattctcgacatcattactgggcacgctgctccctataagacagtgtccgttcgggccgctatcccatccaccatcctgcgtctccccgccgcggcgttccacggtgtgttcgagaagtacccagagacactggtgcgcgtggtccagattatcatggtgaggctgcagcgcgtgacctttctcgctctgcacaactatctgggccttaccacggaactctttaacgcagagagccaggccattccgctcgtgtcagtcgcgtctgtagctgcgggcaaagcaaagaagcaagtgttttacggcgaagaggaaaggcttaagaagccgccgaggctccaagagtcttgtgattccgaccatgggggcgggcggccagcggcggctgggccactccttaagcgtagtcacagcgttccagcaccttctatccgaaaacaaatactcgaagaactcgagaagccaggcgccggcgaccccgacccgtctgcccctcagggaggcccaggatcagccacaagtgatttaggaatggcctgtgaccgagcccgggtgttcctacattctgatgaacaccccggaagctccgttgcaagcaaaagtagaaaaagcgtgatggtggccgaaatcccgtccactgtgtcccagcactcagaatcacatactgacgaaaccctggcctcacggaagtctgacgcaatcttcagagctgccaagaaagatctgttgacattgatgaaattggaggatagtagtcttctggacggccgagtcgccctgttacatgtgcccgccgggaccgtggtcagccggcagggcgaccaggacgccagcatactcttcgttgtgtctggtctgcttcacgtgtaccaaagaaagatcggaagccaggaggacacctgcctcttcctcaccaggcctggcgaaatggtcggtcagttggctgtgctcaccggcgagcccttgattttcacagtgaaagctaacagagactgctctttcttgagcatcagcaaggcccatttttacgagattatgcggaaacagccaacggtggtgttgggggtggcccatactgtggttaaaaggatgtcctctttcgtgcggcagattgattttgctttggattgggtggaagtggaggcagggagggctatttacaggcagggggacaagtccgattgcacatatataatgctcagtgggcgcttgagatcggtgatacgaaaagacgacgggaagaaacggttggcgggcgagtacgggcgaggcgacctcgtgggtgtagtggagactctaactcaccaggctagagcgaccaccgtgcacgcagtaagggatagtgagctggcaaagctccccgccggtgctctgacgtcaattaagcggagataccctcaggtagttacaagactgatccatctgctgggcgagaaaatacttgggtccctgcaacagggcccagtcacgggccatcagttgggcctgcctaccgagggcagtaagtgggatctgggaaaccccgcagtcaacctgagtaccgtcgcggtgatgcctgtctcagaggaggtgcctctcaccgcattcgccttggagctggagcacgcactgagtgccatcggccctactctgctgctcacctctgacaatattaaacgccgactaggaagcgcagcacttgacagtgttcacgagtatcgactgagcagctggttaggtcaacaggaggacacccatcgaattgtactgtaccaggtggacggcacgctcaccccctggacacaaaggtgtgtaagacaggccgactgtatcctgatagtgggactaggggaccaagagccgaccgtaggcgaactcgagaggatgttggaatctaccgctgttcgtgctcagaaacaactgattctgctccatcgggaggagggccctgcccccgcccggactgtggaatggctgaatatgagatcttggtgttctggccacttacacctctgctgtccacgcagagtgttctcccggcgttccctgccaaaattagtggagatgtataagcatgtgttccagcgccccccggatcggcatagtgacttttccagactggctcgggtgcttacaggtaatgccattgcactcgttctgggaggtggtggagcccgagggtgtgcccaggtgggcgtcctgaaggcccttgcggagtgcggcatcccagtagacatggtgggtggaacctccattggggccttcgtgggcgcactgtacagcgaggagcgaaactactcccaaatgagaattagggcgaaacagtgggccgaagggatgacgtcgctgatgaaggctgccctcgatctgacatatcccatcacatccatgtttagtggagccgggtttaatagttccatcttttcagtatttaaggatcaacagatagaggacctctggatcccttactttgcgattaccactgacatcaccgcatctgccatgagagtgcataccgacggctcactgtggtggtatgtgcgggcatctatgagcctgtcagggtatatgcctcccttgtgtgatcccaaagatggccacctgctgatggacgggggatacattaacaacctccccgctgatgtagccaggagtatgggggccaaagttgttatagcgatagatgttggatcacgggatgaaactgacttgaccaattacggtgacgctctctctggttggtggttattgtggaagcgatggaacccgctggccaccaaggttaaagtactgaatatggcagagattcagactaggctagcgtacgtttgctgtgtaaggcagcttgaggtcgtgaagtcttctgactactgcgaatatctgagacctccaattgatagctacagcacactcgactttggcaagttcaatgaaatttgcgaagtggggtatcaacacggacgcacagtgtttgacatttggggaaggagtggcgtgctcgagaagatgctccgcgatcagcaaggtccctctaaaaagccggcctcagctgtactgacctgtcccaatgccagcttcactgacttagccgaaattgtctcccgtatcgagcctgcgaagccagcaatggtcgacgatgagagcgactaccagactgagtacgaagaggagctgctagacgtgcccagggacgcttatgccgatttccagtcaacaagcgcccagcaggggtcagacctcgaggacgaaagctctctgagacaccgtcatccttctctcgcgtttccgaaactgagcgagggctcctcggaccaagatggctag

SEQ ID NO: 198755 - DNA, 3846 bp, synthetic construct
  misc_feature 1..3846: note = Description of Artificial Sequence: Synthetic coding sequence
  source 1..3846: mol_type = other DNA
atgctgaccggcatcgccgtgggcgccctgctggccctggccctggtgggggtgcttatactgtttatgttcaggagactccgccagttcagacaggcccagccgaccccccagtaccgattccgtaagcgagataaagttatgttctatggcaggaagattatgcgcaaggtgacgaccttgccaaacacacttgttgagaacacggccttgcccagacagcgggccaggaaacggaccaaagttttgtcactggccaagcggatcctgagattcaaaaaagaatatccagcactacaacccaaagagccccccccgtccctgctggaagccgacttaaccgagtttgacgttaagaacagccacctgccatccgaagtgctgtatatgcttaagaatgtacgggtcctcggtcatttcgagaagccgctgttcttggagctgtgtaagcatatcgtctttgttcaacttcaggagggggaacacgtctttcagcccagagagccagaccctagcatctgtgttgttcaggatggccgcctggaggtgtgtatccaggacaccgacggaactgaagtggtcgtaaaagaagttctggccggagactcggttcatagtctcctcagcatccttgatattattacaggacatgccgccccgtacaagacagtgagcgtgcgggccgcaatccccagcacaatcctacgactgccagccgccgccttccatggggttttcgagaagtatccagaaacccttgtgagggtcgttcagatcatcatggtacgcctgcagcgtgttaccttcctcgctctacacaactatttgggtctgactactgagctgttcaatgccgagagtcaggcaatccccctggtgtccgtggctagcgtggcggccgggaaggctaagaagcaggtgttttacggggaggaagagcgactgaaaaaaccgccaaggctgcaggaatcttgtgattcagatcatggcggggggagacccgccgccgccggtcccctcctaaagcgttcccattctgtgcctgccccatcaatacggaaacaaattttggaggagctcgaaaagcccggcgccggagacccagacccctcggcccctcaaggaggccctggctccgccacaagcgacctaggcatggcctgcgacagggctcgagtgtttctgcatagcgatgaacatccaggcagctcagtcgcttccaagtctcgcaaatctgtcatggtcgctgaaattcccagcacagtgagccagcactctgagtctcatacagatgagaccctggcctccaggaaatccgacgccatctttcgcgctgccaagaaagaccttttaactctgatgaaactggaggatagcagtctgctggacgggagggtcgcgctccttcatgtgcccgcaggaaccgtcgtgtcacggcaaggtgaccaggacgccagtattctctttgtggtttcaggcctgctgcatgtgtatcagcggaaaatcggttcccaagaggacacttgtctgttcctaacccgccccggagaaatggtgggccaactcgccgtgctgaccggcgaaccactgatctttacagtcaaagccaaccgggattgctcctttctgagcatctccaaagcacatttttacgaaattatgcgtaagcagcctaccgtcgtgctcggtgtcgcccacacggttgttaagagaatgtctagctttgttcgacagatcgacttcgctttggactgggtggaggttgaagcaggtagggccatctacagacagggcgataagagtgactgtacttacattatgctttcaggcaggctgcgatcagtaatcagaaaggacgacgggaagaagcgtctcgccggggagtacggacgtggtgacctggtgggcgtcgtcgaaacgctcacgcaccaggctcgagccaccaccgtccacgctgttagggattccgaactggccaagcttcctgcaggagcccttacgtctatcaaaagaaggtatccccaggtcgttactagattgatccacttgttgggagaaaagattctgggctcattgcagcagggccctgtgaccggtcaccaactgggcctcccgaccgagggtagcaagtgggaccttgggaatccggccgtgaatctgagcaccgttgcagtgatgcccgtgagtgaagaggtacctttaactgctttcgctctcgagctcgagcatgccctgagtgcgatcggaccgacactgctcctgaccagcgacaacattaaacgtaggctcggctcagccgcactcgacagcgttcacgaataccgactgtcctcctggctgggacaacaggaagacacccaccgaatcgtcctgtatcaggtcgatggaactttgactccgtggacccagcgatgcgtgagacaggcagattgcatcctgattgttggactcggggatcaagaacctacggtgggggagttggaacggatgctagagtctaccgccgtacgggctcagaagcaactgattctcctgcaccgggaggaaggccccgcacccgctcggacagtcgaatggctgaacatgcgctcctggtgctctggccacctgcacctttgctgtcccaggcgcgtattcagccgacgctcactgcctaagttggtagagatgtacaagcacgtgtttcaacggcctcccgaccgccactctgacttttcacgactcgcacgtgtgttgaccggcaacgctatcgccctagtgctgggtggcgggggcgctagaggctgtgcacaggtgggtgtattgaaggccctggccgagtgtgggatccctgtcgatatggtcggaggaacctccatcggagcatttgtgggcgccttgtatagcgaggaaagaaactacagccagatgagaataagagccaaacagtgggccgagggaatgaccagtttgatgaaagctgccttggacttaacgtacccgatcacatcaatgttttcaggcgccggatttaatagttctatttttagcgtcttcaaggatcaacagatcgaagacttgtggatcccttatttcgctatcacaactgacattacagcctctgcaatgcgcgtacatactgacggcagcctgtggtggtatgtccgcgcttctatgagcctgtccggatatatgccacccttgtgtgatcccaaggacggccatttgctcatggacggaggttatatcaataatctgccagctgacgttgcacgcagcatgggtgctaaagtcgttatcgctatcgacgtcgggtcacgcgatgagaccgacctgacaaattacggcgacgcattgtcgggctggtggctactgtggaagcgttggaacccgctggccactaaggttaaggttttgaatatggcggagatacagaccaggttggcttatgtctgctgtgtgagacagctcgaagtcgtcaagagtagcgattattgcgagtatctgagaccgccaatcgattcttacagtaccctggacttcggaaaatttaacgaaatttgcgaagtgggctaccagcatgggcgcactgtttttgacatctggggccggtccggcgttctggagaagatgcttagggaccagcagggcccttccaaaaagccagctagcgccgtattaacctgtccaaacgccagtttcaccgatttggccgagattgtctcacgcatcgagccggctaagcctgctatggtggacgatgaatcagactatcaaacagagtacgaggaggaactcctcgatgtgccccgcgacgcctatgccgactttcaaagcacatctgcccagcaaggcagcgacttgtag

SEQ ID NO: 198756 - DNA, 2349 bp, synthetic construct
  misc_feature 1..2349: note = Description of Artificial Sequence: Synthetic coding sequence
  source 1..2349: mol_type = other DNA
atgagcatcaacctgaccgtggacatctacatctacctgctgagcaacgcacgcagtgtgtgtgggaaacaaaggtccaagcagctgtacttcttattcagccccaagcattactggcgcatcagccatatatcactccagcgggggttccacacaaacattatccgctgcaagtggacaaaatcagaggctcacagctgtagtaaacattgttacagcccatccaaccatggacttcacattggcattttaaagctgtccacatcagctccaaagggactaacgaaggtgaacatttgtatgagcagaattaaaagcactctgaatagcgtctccaaggctgtgtttgggaaccagaatgagatgatcagccggctggcccagtttaaaccaagtagccagatcctgcggaaagtcagcgattctggctggctgaagcaaaagaacatcaaacaggcaattaagtccttaaaaaagtattccgataagagcgctgagaaaagtccctttccagaagaaaaatcccatattatcgacaaagaggaggacataggaaaacggtccctgtttcactatactagctcaataaccaccaagttcggcgatagcttttactttttgtccaatcatatcaacagttattttaagcggaaggagaagatgagtcaacagaaagagaatgaacacttccgggataagtccgaacttgaggacaagaaagtagaagagggcaagttacggtctccggatccaggtatactcgcctataagcctggctcagagtcggtccacacagtggacaaacctacaagcccaagcgcaatccccgacgtgctgcaggtttctaccaaacagagtattgccaattttttgagtcgcccaacggaaggcgttcaggcgctcgtcgggggctatatcggtggactggttcctaagctcaaatacgatagcaaaagccaatcagaagaacaagaagaacctgcgaagactgaccaggcggtcagtaaagataggaatgctgaggaaaaaaagaggctgtccctccagcgggagaagatcatcgcccgcgtgtccatcgacaataggaccagggctttagttcaagccctcagaaggaccacagatccaaaattgtgcataactagagtcgaagagcttacttttcatttgcttgagttcccagaaggcaagggtgtagccgtgaaggagcgcattatcccttacctactgaggctcagacagatcaaagatgagactctacaggcagccgtgagggagattctggcactcattgggtatgtggatccggttaagggtcgagggatccggatcctgtcaattgatggtggaggcacgagaggcgtggtagccttgcagactctacggaagttggtggaacttacacagaagcccgtgcaccaactgttcgactacatatgcggagttagtaccggtgctatactggccttcatgctggggctatttcacatgcctctggacgagtgtgaagagctctacaggaaattaggaagcgatgtgttctcccagaatgtgattgtcggcactgtgaaaatgagctggagtcacgctttctacgattcccagacatgggagaatatcctgaaagaccggatgggcagtgcactgatgatcgaaaccgcccgcaatccaacttgcccgaaagtggcagccgtgagtacaatcgttaatagaggaataactcccaaagcattcgtatttagaaactatggccacttccccggcataaattctcactaccttggagggtgccagtataaaatgtggcaagcaatacgggcaagtagtgctgcgcctggctactttgcagagtatgcccttggaaacgacctgcatcaagacggtggcctcctgcttaacaaccccagcgccctggccatgcacgaatgtaagtgcctttggcctgatgtccccctggaatgcatcgtctccctgggaacagggcgatatgaatccgatgtgaggaatacagtaacctataccagcctgaagaccaagctttcaaatgtgattaacagtgccacagataccgaggaagtccacatcatgctggacggtctgctgccaccagacacttatttcaggttcaatcccgttatgtgtgagaatatccctttagacgagagccggaacgagaagctggaccagctacagttggaaggactgaagtacatcgagcggaacgagcagaaaatgaagaaggtagctaagatcctaagccaggaaaagactaccctccagaaaattaatgactggatcaagctgaaaacagatatgtacgagggcctgcctttcttctccaaactttag

SEQ ID NO: 198757 - DNA, 2163 bp, synthetic construct
  misc_feature 1..2163: note = Description of Artificial Sequence: Synthetic coding sequence
  source 1..2163: mol_type = other DNA
atgagcatcaacctgaccgtggacatctacatctacctgctgagcaatgcgcgaagtgtttgcgggaagcagcgcagtaagcagctttacttcttgttcagtcccaagcactactggagaattagccatatctcactgcagaggggtttccataccaacatcatcagatgcaagtggactaaaagcgaagcgcactcgtgtagcaaacattgctactccccttcaaatcatggtctgcacatagggattctcaaactgtccacatccgcccccaaggggttgacaaaagttaacatctgcatgtctcgaataaagagcacgctcaatagcgtgagtaaggctgttttcggaaatcagaacgagatgattagcaggctcgcccaatttaagccctcgagtcagatcctcagaaaagtgagcgacagtgggtggctgaaacaaaaaaacatcaagcaggccattaaatcactgaaaaagtacagcgataagtctgctgagaagtctcctttccctgaggagaagtcacacattatcgataaagaggaggatattgggaaacggtcactctttcactatacgagtagtatcaccacaaaattcggtgatagtttttattttctttccaatcacattaattcttactttaagaggaaggaaaagatgtcccaacagaaagaaaacgagcattttcgggacaaaagcgaactcgaggacaagaaggtcgaggagggcaaactgagatcgcccgatcccggcatcctggcctacaaacctggtagcgaatccgttcacactgttgacaagccaacctcaccgtcagccatccccgacgtgctgcaggtctccacaaagcagtcaattgccaatttcttatcccggcctacggagggcgtacaggccctggtcggtgggtatataggtggacttgtgcctaaattaaagtacgatagcaagtctcagtctgaggaacaggaagagcccgctaagactgaccaagccgtaagcaaagatcgcaacgccgaagaaaagaagaggctctctctccagagggagaaaatcatcgcccgcgtcagcatagataaccgcacccgggccctggtccaggccctccggcgaactactgatccaaaactctgcataacccgagtggaggagctcacttttcatttgctggaattcccagagggcaaaggagtggctgtgaaggaacggattataccctatctgctccgcctgcgccagatcaaagatgagactttgcaggctgctgtgagagaaatcctggcgttaattggctacgttgatccggtgaaaggacgaggaatacggatcttatctattgatggcggcgggactcggggtgtagtggcattacagaccttacggaagttagttgaactgacacaaaaacccgtacatcagcttttcgattacatctgcggggtgagtacaggcgcgattctggcattcatgctgggcctttttcatatgcccctggatgagtgtgaagagttgtatcgaaaactcggcagcgatgtcttctcccagaacgtgattgtgggaaccgtgaagatgtcctggtcacacgccttttacgacagccaaacctgggaaaacattcttaaggatcgcatgggcagcgctctgatgatcgagactgcaagaaaccccacatgccctaaagttcggaaagacggtggtcttctcctgaataatcccagcgccctggctatgcacgaatgcaaatgcctgtggcccgatgtgcctcttgagtgtatcgtttccttgggaacaggacgctacgaatcagacgtgcgcaacacggttacgtacaccagcttaaaaacgaaattaagcaatgtgattaactcagccaccgacaccgaggaggtccatattatgttggacgggctgttaccacccgacacttactttcggttcaatcccgtgatgtgcgaaaacattccgctcgatgagtctaggaatgagaaactggatcagctccagctagaaggcctaaagtatatagaaaggaacgagcagaaaatgaaaaaggttgccaaaattctgtcgcaagaaaaaaccacactccagaaaatcaacgactggatcaagttgaaaaccgacatgtacgagggtttacccttcttctcaaagctgtag

SEQ ID NO: 198758 - DNA, 168 bp, synthetic construct
  misc_feature 1..168: note = Description of Artificial Sequence: Synthetic coding sequence
  source 1..168: mol_type = other DNA
atgagcatcaacctgaccgtggacatctacatctacctgctgagcaacgcgcggagtgtctgtggcaagcagcgctccaagcagttgtacttcctcttctcgccaaaacactattggcgcatctctcatatctctctccaacgtggctttcatactaatatcatctag

SEQ ID NO: 198759 - DNA, 2349 bp, synthetic construct
  misc_feature 1..2349: note = Description of Artificial Sequence: Synthetic coding sequence
  source 1..2349: mol_type = other DNA
atgagcatcaacctgaccgtggacatctacatctacctgctgagcaatgcacgaagcgtgtgtgggaagcaacgcagtaagcagctgtatttcctattctcaccgaagcactactggagaatcagccatatttcattgcagcgcgggtttcacactaatatcatcaggtgcaagtggacaaagtccgaagcacactcgtgctcaaaacattgttattctccgagtaatcatggtctccatattgggatcctcaaactgtccacatcggccccaaaaggcctaaccaaagtgaacatctgtatgtcccggatcaaatcaactctcaactccgtcagcaaggcagtgttcggcaaccagaatgaaatgatatcaagacttgcacagttcaaaccctccagtcagatcctgaggaaggtttccgacagcggctggttaaaacagaaaaatattaagcaggccatcaagagcttgaagaaatatagtgataaatccgcggagaaaagcccgttccctgaagagaagtcccacatcatcgacaaggaggaggatattggtaagcgatcactgtttcattataccagttcaattaccaccaaattcggcgacagtttttactttttgagcaatcatatcaattcatattttaagcgcaaggaaaagatgagccagcagaaggaaaacgaacacttcagggataaatctgaactcgaagataagaaagtggaggaaggaaagctgagatcaccagaccctggcatcctggcttataagccagggtctgagtctgtccatactgtcgacaagcccacatccccctccgcgatacccgacgttctccaggtttcaacaaagcagtcaatcgcaaacttcttgtcgagaccaacggagggcgttcaggccctggtaggcggttatattggtggcctggtgcctaaactgaaatacgatagcaaaagccagagcgaggaacaggaggagccagccaaaacagaccaagctgtaagtaaagaccgcaacgcagaagaaaaaaagcggctcagcttgcaaagagagaaaatcatcgcgagggtgagcatcgacaaccgtacccgcgccctggtccaggccctgaggaggactacagaccctaaattatgtatcacaagggttgaggagctgacattccatctgttggaattcccagaaggaaagggcgtggcagtgaaggagagaattatcccttaccttcttcgattgcggcagatcaaggatgaaaccctccaggctgcagtgcgggagatcctggccctcattggctacgtcgacccagtgaagggccgcgggataagaatcctttccatagacggcggcggcactagaggagtcgtagctctgcaaaccctgcgcaaacttgtggaactgacccagaagcccgtccaccaactgttcgactacatctgtggggtgagcactggcgcaattcttgccttcatgctgggcctgtttcacatgccgttagacgagtgcgaggagctctaccgcaaacttgggagtgatgtgttctcacaaaacgttatcgtaggaaccgtgaaaatgtcgtggagccacgccttttacgactcacagacatgggaaaacattttgaaggatcggatgggatcggctctcatgatcgagaccgcccgcaatcccacctgcccaaaggtggccgctgtttcaaccatagtgaacagaggaatcaccccaaaggcattcgttttccgtaattatggccactttccaggtattaactctcattacctggggggctgccagtacaaaatgtggcaggcaatcagagccagtagtgctgcaccaggttactttgccgagtacgcactggggaatgacctgcaccaggacggcgggctgcttctcaacaatccaagcgcactagcgatgcacgaatgtaagtgcctgtggccggacgtgcccctggaatgcatcgtgagtctcgggacagggcgctatgagtcagatgtgcgaaacacagtgacctatacgtcattgaagaccaagctgagtaacgtgattaactccgcaaccgacactgaggaggtacacatcatgctggacggcctgctgccccctgatacttattttcgattcaatcccgttatgtgtgagaacatccccctcgacgaatctagaaatgagaagctggatcagctgcagctcgaaggactgaagtatattgagagaaacgaacaaaagatgaaaaaagtggcaaagatccttagccaagaaaagacaacattacagaagatcaatgactggatcaagctgaagacagatatgtacgaaggactgccctttttttccaagctctag

SEQ ID NO: 198760 - DNA, 582 bp, synthetic construct
  misc_feature 1..582: note = Description of Artificial Sequence: Synthetic coding sequence
  source 1..582: mol_type = other DNA
atgagcatcaacctgaccgtggacatctacatctacctgctgagcaatgctaggagcgtttgcggcaaacagcgcagtaaacaattatactttcttttttccccgaagcattactggcgcatttcacacatctccttacagcggggattccatactaacattatccgctgcaagtggacaaaatccgaagcacatagctgctccaagcattgctacagtccgagtaaccacggccttcacatcggcattctgaagttgagcactagcgctcccaaaggactcactaaggtcaatatatgtatgagtagaatcaaaagcaccttgaatagcgtgtcaaaagccgtattcggaaaccaaaacgagatgatcagtaggctggcgcagtttaaaccctcctctcaaattctgcgaaaggtatctgacagtggatggctcaagcagaagaacataaagcaagcaatcaagtctctgaaaaagtattccgacaagtccgccgagaaaagccccttcccggaagaaaagtcccacattatcgacaaagaggaggatatcggtaaacgcagtctttttcattatacctag

SEQ ID NO: 198761 - DNA, 2349 bp, synthetic construct
  misc_feature 1..2349: note = Description of Artificial Sequence: Synthetic coding sequence
  source 1..2349: mol_type = other DNA
atgagcatcaacctgaccgtggacatctacatctacctgctgagcaatgctcgtagcgtatgtggcaaacagcggtctaaacaactctactttctgttcagcccaaagcactactggcggatatctcatatatcgctacagcgaggcttccacaccaatattattcggtgtaagtggactaaatctgaggcccacagctgctccaagcactgttattccccctctaaccatggcttgcacatcggaatccttaaactgagcacctccgcaccaaagggcctcacaaaggtaaatatctgcatgtcgcgcataaagtctacactgaattcagtgtccaaggccgtattcggcaaccagaacgaaatgatttctcgactcgcccagtttaagccctctagccagattcttaggaaggttagtgattccggatggttgaagcaaaagaacatcaaacaggcaattaagtccctaaagaaatattctgacaaatccgcggagaagtcccccttccccgaggagaagtcgcacatcatcgacaaagaggaagatatcggaaagcgctctctctttcactacacctccagtatcacaactaagttcggggactccttctatttcctgagtaaccatatcaattcctatttcaagcggaaagaaaaaatgtcccagcaaaaggagaatgagcattttcgcgataagagcgaactggaagacaagaaggtggaggagggaaagctccgcagcccggaccccggtattttagcctataagccgggttccgaatctgttcacaccgtggataagcctaccagcccttcagcgatccctgatgtgctgcaagttagcactaagcagagtatcgcaaacttcttaagccgccctacagaaggggtacaggccctggttggaggttacataggagggctcgttccaaagttaaagtacgattcaaagtcacagagtgaagagcaggaagagccggccaaaaccgaccaggccgtgagcaaggaccgcaacgctgaagagaagaagaggctttccctccagcgggagaagattatagcgagggtgagtatagataaccgcacacgtgccttagtccaagccctgcggcgtacaactgacccgaagctctgcatcactagagtcgaggaactgacttttcatctcttggaatttcctgagggcaaaggagttgctgtaaaggagcgtatcataccctatctgttgaggctgaggcaaatcaaggatgagaccctccaggctgcagtccgagagatactcgctctgatcggatacgtcgaccccgtgaaaggacgtgggatcagaatactgagtatagacggtggcggtacgaggggcgtggttgctctccagactttacggaagttggtagaactgacacaaaaacccgtccaccagttgtttgattacatatgcggtgtctcaacaggggcaattctggcatttatgctgggactgttccacatgcccctggacgagtgtgaagagctttacagaaagctgggaagcgatgtattttcacaaaatgtgattgtgggcacggtgaagatgtcctggagccacgctttttatgacagccagacatgggagaacatcctgaaagataggatggggtcagctctgatgatcgagactgcacgaaaccctacctgtcctaaggtggcagccgtcagcaccatcgttaaccgggggataacacccaaagcattcgtgtttcgaaattatggacattttccaggaatcaactcgcactatctgggcggatgccagtataagatgtggcaagccattagagccagtagtgccgctcctggttatttcgccgaatatgccctggggaatgatctgcaccaggatggtggcttacttctcaacaacccgagcgctctggcgatgcatgaatgtaagtgcttgtggcccgatgtgcctctggaatgtatagtgagcttgggaactggacggtacgagtctgacgtcaggaatacggtgacatacacgagcctaaagaccaagctctcaaacgtgatcaacagcgctacagataccgaagaggttcacatcatgctggatggccttctgccccctgacacatattttaggttcaacccagtgatgtgtgaaaatattcccctagacgagtcccggaatgagaaattggatcagctccagctcgagggacttaaatacatcgaacggaatgaacaaaagatgaaaaaagtggcaaaaatcttgtcccaggagaagaccacacttcagaagattaatgactggattaaactcaagactgacatgtatgaggggctgcctttctttagcaagttgtag

SEQ ID NO: 198762 - DNA, 2154 bp, synthetic construct
  misc_feature 1..2154: note = Description of Artificial Sequence: Synthetic coding sequence
  source 1..2154: mol_type = other DNA
atgagcatcaacctgaccgtggacatctacatctacctgctgagcaacgccaggagcgtgtgtgggaagcagcggtcgaaacagctgtactttctgttttccccgaaacactactggcggatctcccatatctctctgcagcgcggatttcacacaaacattattcggtgtaaatggacgaaaagcgaggcccactcttgttcgaagcattgctattctcctagcaatcatggccttcacatcggcattctgaagctttcaaccagcgccccaaaaggcctgacaaaggtgaacatttgcatgtctaggattaaatctaccctgaacagcgtgtctaaggcggttttcgggaaccagaacgagatgatatcacgcttggcccagttcaaaccgtcaagccaaatcctgcgtaaggtcagtgacagcggctggctgaaacaaaaaaacataaagcaagctataaaaagtctcaagaaatacagcgacaagtccgccgagaagagtccgttccccgaggaaaaatcacatatcattgataaggaagaagatatcggaaagcgcagtttgtttcattacacctctagtatcaccactaagtttggggatagtttttatttcctgagcaaccatatcaactcctatttcaaacgcaaagagaagatgagtcagcagaaggagaatgagcacttccgggacaaatctgagctcgaggacaaaaaggtggaagaaggaaaactgcgatctcctgaccctgggattctggcctacaaaccgggcagtgagtccgtgcacacagtggataagcctaccagcccttctgccatcccggatgtgctgcaagttagtaccaaacaatcgattgcgaacttcctctcgaggcccaccgagggggtacaagctctggttggcggctatatcggaggcctggttcctaagttaaagtacgactccaagtcccagtccgaagagcaggaagagcctgcaaaaaccgaccaagccgtatctaaagataggaacgccgaagagaaaaagcggctgtctctgcagagggagaagattattgcccgagtctccatcgacaaccggaccagagcgcttgtgcaagctttgcgaagaacaacagacccgaagctgtgtatcacacgcgtggaagagctgaccttccacctacttgagttccccgagggaaagggagtggcagtgaaggagagaattataccttacttgctgaggttgagacagatcaaagatgagacactccaggcagcggtcagagagatcctcgccttaattgggtacgtggatcctgtcaaaggcaggggcatacgaatactcagcattgacggcggcggaacaaggggggtggtggcccttcagacgctcaggaagctggtggagcttacccagaagcccgtgcaccaactgtttgattatatttgtggcgttagtacgggggccatcctggcttttatgctggggctgtttcacatgcctctggatgagtgtgaagaactgtatagaaagctggggtcagatgtgttctcccagaacgtcattgtggggacagtgaaaatgtcatggagccatgcattttacgacagccagacttgggaaaatatcctgaaagatagaatgggcagtgcactcatgattgaaaccgcgaggaaccctacctgtcctaaggatgggggcttgttgctgaacaatccgtccgcccttgccatgcatgagtgcaagtgtctttggccagatgttccactggaatgtattgtgagcctgggaactggcagatatgagtccgatgttcgtaatacggtaacctatacaagtctgaaaacaaagctgtcaaacgtaattaattctgcgactgacacggaagaagttcacataatgctggacggcctgctgccccccgacacatattttcggtttaatcctgtgatgtgcgagaacattcccctcgacgaatccaggaacgaaaagctggaccaacttcagcttgagggtctgaagtatatcgagagaaatgagcaaaagatgaaaaaagtcgcaaaaattctttcccaggaaaaaacgaccctgcagaagatcaacgactggattaagctaaagaccgatatgtatgaagggttaccgtttttcagtaaattatag

SEQ ID NO: 198763 - DNA, 2049 bp, synthetic construct
  misc_feature 1..2049: note = Description of Artificial Sequence: Synthetic coding sequence
  source 1..2049: mol_type = other DNA
atgagccggatcaagagcaccctgaacagcgtgagcaaggccgtgtttggcaaccagaatgaaatgataagtcggctcgcccagttcaagccttcttcccagatcctgaggaaagtatccgacagtggttggctgaaacagaaaaatatcaagcaggccatcaagtctctcaagaaatatagcgataaatccgcagagaaatcaccgttcccggaggagaagtcacatataatcgacaaggaagaggacattgggaagagaagcctgtttcactacacctcttctataactaccaaatttggcgattctttttatttcctctcaaaccacattaactcttacttcaagcgcaaggaaaagatgagtcagcagaaagaaaatgagcacttcagagacaaaagcgagttggaagataagaaagtggaagaggggaagctcaggtctcctgaccctggaattctagcttacaagcctggtagtgaaagcgtgcacactgtggacaagcccacatcaccatctgcaattccggatgtgcttcaagtgagtactaagcagagcatagccaatttcctcagtagaccaactgaaggtgttcaagctctagtcggaggctatattggtggtctcgtccccaagctcaaatatgattctaaatcacaatctgaggaacaggaagagccggcaaaaacagaccaagccgtaagtaaggaccgcaacgccgaggaaaagaagcggctcagtttgcagcgggaaaagatcatagcacgggtgtcaattgacaaccgcacccgagctctcgtccaggccctcagaagaactaccgatccaaagctgtgcatcacaagagtcgaagagctcaccttccaccttctggaattccctgaaggcaaaggggtggctgttaaggaacgcattataccgtatcttctgcgtctgcgacagattaaagatgagacactccaggcggcagtgcgagaaatcctggccttgatcggttacgtcgatcctgtgaagggtagagggatcagaattctgtccattgacggcgggggtactagaggggtggtagccttgcagacgctcagaaaactcgtggagctaactcagaagcctgtccatcagttgttcgattatatctgtggggtctctacaggagcgatcctggctttcatgctgggtctctttcatatgccccttgatgaatgcgaagaactgtatcgcaaactgggaagtgacgtgttctctcagaacgtcatcgttggaacagtgaaaatgagctggtcccacgctttctacgactcacagacttgggagaatattctgaaagaccgtatgggctctgctctcatgatagagactgctcgcaatccaacctgccctaaagtggctgcggtaagcacaatcgtaaacagaggaattacccccaaagcctttgtgtttagaaattacggacactttcctggaataaacagccactatctgggaggctgccagtacaagatgtggcaggctatcagagcaagctccgctgccccaggctacttcgcagaatatgcactgggcaacgacttgcaccaagatggcggcctcctgctgaacaatccatccgcgctcgccatgcacgagtgcaagtgtctttggccagatgtgcccctcgagtgcatcgtatctctcggtacgggtcgatatgaatctgacgtccgtaacactgttacatatacctcgctgaagacaaagctgtctaatgtgattaactcagcaaccgacactgaagaagtccacattatgttagacggtctgttaccccccgacacctattttaggttcaatcccgtgatgtgcgagaacatccctttagatgaatcccggaatgagaaactggaccagctgcagctagaaggcttaaaatatatcgagcggaacgaacagaaaatgaagaaggtggccaagatattatcacaggaaaagactacactgcagaaaattaatgattggatcaaactgaaaacagatatgtacgaagggctgcctttctttagcaaattgtag

SEQ ID NO: 198764 - DNA, 3612 bp, synthetic construct
  misc_feature 1..3612: note = Description of Artificial Sequence: Synthetic coding sequence
  source 1..3612: mol_type = other DNA
atgacccggagcccccccctgcgggagctgccccccagctacacccctccggccagaaccgctgctcctcagatcctggctgggtccttaaaggcaccattatggcttagggcatactttcaggggctgctgttcagtttggggtgtggcattcagcgtcattgtggtaaggttctatttttgggcctgctggcatttggggccctcgcattgggcctgcgcatggcgatcatagaaaccaatttggaacagctgtgggtcgaggtcgggagtagagtctcacaggaactgcattatactaaggagaagctgggggaggaggcggcctacacgtctcagatgctgatccagaccgctcggcaggagggcgaaaacatcttgacccctgaagccttaggtctgcacctgcaggctgctctcacggctagcaaggtgcaggtgtcgctctacgggaagtcttgggatctgaataagatctgttataagtccggcgtcccactcattgagaatggcatgattgagaggatgattgaaaaactgttcccatgcgtcatcctgaccccgcttgactgtttctgggaaggagcaaagctgcagggagggagcgcctacttgcccggtaggccggacatccagtggacgaacctggaccctgagcagctcctggaggaattggggccctttgcatccttggagggcttccgagaactcttagataaagctcaggttggccaggcatatgtgggaagaccatgtttgcacccagatgatctccattgccccccgtccgctccgaaccatcactccagacaggcccccaacgtcgcccacgagctgagtggcggctgccacgggttcagtcacaagttcatgcattggcaggaggagttgctgttgggcggtatggctcgggatccacagggtgagttacttcgggccgaagccctacagtcaaccttcttgctgatgtccccgcgccaactgtacgaacatttccggggggattaccagacccatgacattggctggagtgaggagcaagcctccacagtcctgcaggcttggcagcggcggtttgttcaacttgctcaagaggcgctccctgagaatgccagccagcaaatccatgcttttagttcaactactctagacgacattttgcacgcattctccgaggtgtctgcggcaagagtagtcggcgggtacctgctgatgctcgcatacgcctgcgtcactatgctcagatgggactgtgctcagagtcagggctctgtgggcctggcaggtgtactgctcgtagctctcgcagtggcctcgggtctaggcttgtgcgccctcttggggatcactttcaacgcggcaaccacccaggtcctaccctttttggccttgggtatcggtgtggatgacgtttttctattagcgcatgcctttacagaggcactacccggcacccctcttcaggagagaatgggcgaatgtctccaacggacaggtacatctgttgtgctcactagcataaacaatatggcagcctttttgatggctgctctggtccccatacctgctctgcgcgcgttttcactgcaggctgccatagtagtggggtgtacatttgttgctgtcatgcttgtattcccagccatcttgtccctggacctgcggcgccggcactgtcagcgcctggatgtgctgtgctgcttctctagtccctgcagcgctcaggtgatccagatcctgccacaagaactgggcgacggaactgtgcccgtggggattgcccatttgaccgcgacagtgcaggccttcacacattgcgaagcttcatctcagcacgtggtcaccatacttccaccgcaagctcatctagtaccacccccgagcgatcctctggggagtgagctcttctcgcccgggggctcaacccgcgatctgctgggacaggaggaagaaactcgccaaaaggccgcatgcaagtccttaccttgtgcaagatggaatttagcgcattttgcacgctaccagtttgcccccttgctgttacagtcccacgccaaggccattgtgctggtacttttcggcgctctgctgggattgagcttgtatggcgccaccctggtccaagacggactggcccttacagacgtagttcccagggggacgaaagaacacgcgtttctcagcgcccagctgagatattttagtctgtatgaggtggcattggtcacgcagggcggcttcgactatgcccactcccagcgtgcattatttgacctacaccagagatttagttcactgaaagccgtcctcccgccaccagccacacaggcccccaggacatggctgcattactatcgcaactggctgcagggtattcaggctgcgtttgaccaggactgggctagcgggaggatcacccgacactcttacagaaatggttctgaggacggcgcgcttgcctataagctgctgatccagactggggatgctcaggagccactcgattttagtcagcttacaactaggaagttggtcgatcgggaagggcttattccgccagagctcttctatatggggctgactgtctgggtgtcctccgatcccctcggactggccgcctctcaagcgaacttttaccccccccctccggagtggctgcatgataaatacgatactacaggggagaacctccggataccaccagcacagccactcgagttcgctcagttccctttccttctgcgagggctacaaaagaccgcagacttcgtggaggccattgagggcgcgagggccgcatgtgctgaagccgggcaggccggcgtgcacgcttacccctcaggttcgccgtttctgttctgggaacagtacctcgggctgagacgatgcttcctgctggccgtctgcatccttctcgtatgtactttcctcgtgtgtgccctgctcctgctcaatccttggaccgccgggttgattgtgctcgtattggccatgatgaccgtggaactttttggtattatgggctttttgggtattaagctctcggctatcccggtggtgatcctagtcgcttctgttgggattggtgtggagttcaccgtgcacgtggcacttgggttcctcactacgcagggcagccggaacttgcgagccgctcacgctcttgaacacacatttgcgccagtcaccgacggggccatctctacccttctgggcttactgatgctcgctggcagccactttgattttatcgttcgttactttttcgctgctctgacagttttgactctcttgggacttctgcacggcctggtcctgctacccgtcctgttgtctatccttggaccccctcctgaggtgattcagatgtacaaggagagcccggaaatcttgtctcccccggcccctcagggcggtggccttagatggggcgcgtccagtagcctgccccaatccttcgccagagtgacaacgagcatgacagtggctatccatccgcccccactacccggtgcgtacatccatccagccccagacgagccaccctggagtcccgctgccacttctagcggcaacctctcctcaaggggtcccgggcctgctacagggtag

SEQ ID NO: 198765 - DNA, 267 bp, synthetic construct
  misc_feature 1..267: note = Description of Artificial Sequence: Synthetic coding sequence
  source 1..267: mol_type = other DNA
tgattcgacttcatcgtgcggtacttcttcgccgccctgaccgtgctaactctcctgggattgttgcacgggctcgtgctgttacccgtgctgctgtcaattttgggacctccccctgaagttatccagatgtacaaggaatccccagagattttgtcccctcctgcacctcagggcggtggactgcgcgttggttcactgcaggtaaacatcagctactggaaggagctcctctggtgccaggacctgcgtcctgaagaaatctag

SEQ ID NO: 198766 - DNA, 3441 bp, synthetic construct
  misc_feature 1..3441: note = Description of Artificial Sequence: Synthetic coding sequence
  source 1..3441: mol_type = other DNA
atgacccggagcccccccctgcgggagctgccccccagctacaccccgccagccagaacagccgcaccacaaattctggcagggtcgctgaaagcacctttgtggttgcgggcctattttcagggcttgctgttctccttaggatgcggtattcagcggcattgcggcaaggtcctgtttctgggtcttctggcattcggtgccctggcactcggactgcgcatggcaatcatagagactaacttagagcagctgtgggtcgaggtcgggagtcgtgtgtctcaggaattgcactacaccaaagaaaagctgggcgaagaggccgcttatacatctcagatgttaatccagaccgcgcgccaggaaggtgagaatattttgacaccagaggctctcgggctacacctccaggcagccctcacagcttccaaggtccaggtcagcctctacggtaagtcgtgggatctaaacaaaatctgctataagagcggggtgcctctaattgagaatggaatgatcgaaaggatgattgagaagctgtttccatgcgttatactcacaccattggattgcttctgggagggcgcaaaattacaggggggcagcgcctatctccccggacgtccagacatccagtggaccaacttagatccagaacagctattagaggaactcggtccttttgcctccttagaaggttttcgcgaactccttgataaggctcaggtgggacaagcctacgtaggtagaccctgtttgcatcccgatgacttacactgtcctccatctgcgccaaatcaccacagccgccaggctccgaatgtggcgcacgaactttcaggcggttgccatggtttctctcacaagttcatgcattggcaggaggagctgctcctcggagggatggccagggatcctcagggagagctgctaagagctgaggcacttcaaagcactttcttgttaatgagcccgcggcaactttacgaacacttccgcggagattaccaaacccacgacattggctggtccgaagaacaggccagcacagtgctccaggcctggcaacgcaggttcgtccagcttgcccaggaggctctgcccgagaacgcatctcagcaaatccacgctttcagcagcaccaccttagacgatatcttgcatgccttctccgaagtgtccgctgctcgagttgtcggaggatacctacttatgctcgcttatgcatgcgtcacgatgcttcgctgggactgtgcccagtcacagggatcggtggggctggccggggtacttctggttgcactggccgtggcatcgggcctcggcctgtgcgccctgctcggcataacctttaacgctgcaaccacacaggtactgcccttcctggcccttgggattggggtagacgatgtttttctgctggcacacgccttcacagaggcactcccgggtactcccctccaagagcgcatgggcgaatgtttacaaaggaccggtaccagcgtggtgctgacctcaatcaataacatggcggctttcctgatggcagcgctggttccaattccggcactgcgggccttttcactccaggccgctattgtggtaggctgtaccttcgtcgctgtgatgctggtcttccctgcaatactgtcgctcgatctcaggcgccggcactgtcaaagactggatgtgctgtgttgcttttcatcaccttgcagcgcccaggtgattcagattctaccacaggaattgggggacgggacagtgccagtcggcattgcacatctgacggctacagtccaggcattcacacattgcgaggcgtcgagccagcacgtggtcaccatactccctccccaagcgcatctggtgccccctccaagcgatccactaggctctgagctcttctctccgggggggtctactcgggatctgctcggccaggaggaagagacacgtcagaaagccgcttgtaagtctctgccgtgcgccaggtggaatctggctcattttgctcggtaccagtttgcacccctgcttctacaatctcacgccaaggccattgttttagtcctcttcggtgcactactgggtctgtctctgtatggggcaactctggttcaggatgggcttgcactcacggacgtggtgcccaggggtactaaagaacacgccttcctgtctgcccagctccgatatttttccctctatgaggtggccttagtcacccaaggaggattcgactatgcccacagccagcgggccctatttgacctgcaccagcgcttttctagtctcaaggccgttcttccaccacctgccacccaggccccgaggacttggctgcactattatcggaattggttgcaaggaattcaagccgcttttgaccaggactgggcaagcggccgtatcaccagacactcgtaccgcaatggctcagaagatggggccctggcctataagctcctcattcagacgggcgatgcacaggaaccacttgacttctcacagttgaccacccgcaaattagtcgaccgggaaggcctgattcccccagaactgttctatatggggcttaccgtttgggtcagcagcgatcctctgggcctcgccgcgagtcaggcaaacttttatccaccaccacctgagtggctgcatgataaatacgataccactggagaaaacttacggattcctccggcccagccattggagtttgcacagttcccatttctccttcgaggactgcagaagaccgccgattttgttgaggctatagaaggcgctagagccgcatgtgctgaggcaggccaggccggagtccacgcttatcctagcgggtctccattcctgttctgggaacagtatctgggattgagaagatgctttctgttagctgtctgcatcctgcttgtctgtacttttctcgtctgcgcactgctgctgctgaatccttggacggctggcctcatagtgctcgtgctggccatgatgaccgtggaactctttggtataatgggatttctgggcatcaagctctcagcgataccagtcgtgatactcgtggcttccgtcggcattggtgtagaatttacagtccatgtggcgctgggcttcctgaccacacagggaagccgaaacctgagagccgctcacgcactcgaacacacatttgcacctgtcacagatggtgctatctccaccctcttagggttgctaatgttagctggaagccacttcgattttatcgtgagatatttcttcgccgccctgaccgtgctcacactgctggggctactgcacgggctggtgctcttgcctgtgttgctcagcattttgggacctcctcccgaggtgattcaaatgtacaaggagagcccggagatcctctccccgcccgccccccaggggggaggactgaggcctgaggagatctag

SEQ ID NO: 198767 - DNA, 2667 bp, synthetic construct
  misc_feature 1..2667: note = Description of Artificial Sequence: Synthetic coding sequence
  source 1..2667: mol_type = other DNA
atgctgcggcaggtgctgcaccggggcctgcggacctgcttcagcagactgggtcacttcatcgcaagtcacccggttttctttgccagtgccccggttttgattagcatcctgctgggtgcttctttcagtcgctaccaggttgaggaatccgttgaacacctattggcaccacagcatagcctggccaagattgagagaaacctagtgaactctctattcccggtaaaccgtagtaaacatcgtctttacagcgatctgcagactcccggccggtacggacgcgtcatcgtgacctctttccagaaggcgaatatgctggatcagcatcatacagacctgatccttaaactgcatgcagcggtgaccaagatacaggtgccccggccaggcttcaattacacttttgcccatatctgcattctgaataatgacaaaacctgcatcgtggacgacatcgtgcacgttttggaggagttgaagaacgcccgggcgacaaatcgcaccaatttcgccatcacttaccctattacacatttaaaggatggacgagctgtctacaatgggcatcagctaggtggagtaacagtgcacagtaaggatagggtgaagagtgcggaggccatacagttaacttactacctgcagagtattaatagccttaacgacatggtggctgaacggtgggagtcctctttctgtgataccgtgcgattatttcaaaaatcgaactccaaagttaaaatgtatccctatacctcttcctcattgcgtgaggactttcagaagacctccagagtatcagagcgctatttggtgactagcttaattctggtagtcacaatggctattctttgttgctctatgcaggattgcgtgcggtcaaaaccctggctcggtcttctgggcctggtgactataagtctggctacccttactgccgctggcatcatcaatctgaccgggggtaagtataattctacgttccttggagtcccttttgttatgttaggacatggactgtatggcaccttcgagatgttgagctcgtggcggaaaacaagggaggaccaacatgtgaaggagcgcacggctgccgtctacgccgactccatgctcagttttagcctgaccactgcaatgtatctcgtcacttttgggattggcgcgagcccttttactaacattgaagccgctaggatcttttgctgcaactcttgcatcgcgatcttctttaattatttatacgtgctcagtttttatgggagctccctggtctttaccggctatatcgagaataattaccaacactcaatattttgtagaaaggtccccaagccggaagccttacaagagaaaccagcatggtatcggtttcttcttactgctcgtttctcagaagatacagcagagggggaagaagcaaatacgtatgaaagccacctgctcgtctgcttcttgaaaagatattactgtgactggatcactaatacatacgtgaagccattcgttgtcctgttctacctgatttacatttcttttgctctaatgggctaccttcaggtttccgagggaagcgatctgagcaatattgttgccacagcgacacagacaatcgagtatacaactgcccagcagaaatactttagtaattactctccagtgatcggattctacatttatgagagcattgagtattggaatacatccgttcaggaggacgtgttggagtacaccaaaggctttgtgcggataagttggttcgagagttacttaaattacctgcggaaactaaatgtttcaactggcttgcctaagaagaatttcaccgacatgctccggaattccttcttgaaagccccacagttcagccacttccaggaagatatcattttctccaaaaagtataacgatgaggttgatgtggttgccagccgtatgtttctcgtggcaaagacaatggagaccaatcgcgaggaactctacgatctgcttgagacactgaggcgtctgtccgtgacttcgaaggtgaagtttatcgtgtttaacccaagcttcgtgtatatggaccgctatgccagctcactgggagcccctctgcacaactcctgtattagtgccttatttttgttattcttcagtgcttttttagtggccgattccctcattaatgtatggatcacactgacagtggtgagcgttgagtttggggtaatcgggtttatgaccctgtggaaggttgaactggattgcatcagcgtgctctgtttaatctacggtattaactatacaatcgataactgcgctccaatgctctctacatttgttcttgggaaagactttacacgtactaagtgggtgaagaacgcattagaggtgcatggagtcgccattcttcagtcatatctctgttatatcgtagggcttatcccactggcagctgtgccctcaaatcttacgtgcacactgtttcgatgtctgtttctcatagctttcgtgacgttttttcactgcttcgccatcctgcccgtcattttaacgtttctccccccaagcaagaaaaaacggaaagagaagaagaaccctgagaatagagaagagatagaatgtgtggaaatggtagacatcgatagtactagagttgttgaccagatcacaactgtttag

SEQ ID NO: 198768 - DNA, 4179 bp, synthetic construct
  misc_feature 1..4179: note = Description of Artificial Sequence: Synthetic coding sequence
  source 1..4179: mol_type = other DNA
atggacaccgaggacgaccccctgctgcaggacgtgtggctggaggaagagcaggaggaggaggaggcaaccggcgaaactttcctgggggcccagaaacccggcccacagcccggagcaggagggcaatgttgttggcgccactggcctctggccagccggccgccggcctctgggttctggagcaccctgggttgggctttcaccaacccctgctgcgctgggctcgtgctgtttctcgggtgttccatacccatggctttatctgccttcatgttcctgtattacccccccttggatatcgatatcagctacaatgccttcgagattcggaaccatgaagcatcccagcggtttgatgcccttacattggctctgaagtcccagttcggcagttgggggagaaacagaagggacctagccgactttacatccgaaacgctgcagcgtcttatctccgagcaacttcagcagctgcatttgggtaacaggtctcgccaagcatcccgagcccccagggttattcccgccgcctctctcgggggccccggcccttaccgtgacacgagcgcagcgcagaagcctacagcgaaccggtcgggaagactgagaagggaaaccccaccgttagaagaccttgctgccaaccagtcagaagatccacgaaatcagcgactctctaagaacggtagatatcagccttcgatccccccacacgcggccgtcgcggcaaatcagtctagagctcgccgaggggcgtctaggtgggactacagccgagcttatgttagcgctaacacccagacacatgctcactggcggatcgaactgatttttcttgcccgcggcgatgcggaacgtaacatcttcacttccgagcgattggtaacaatccatgaaattgagcgaaaaatcatggaccaccctggtttcagggaattctgctggaaaccacacgaagtcttaaaagacctgcccctcggctcctactcttattgcagccctcccagcagtctgatgacttacttctttcccaccgaacgagggggcaagatctattatgacggcatggggcaggatttggcggacatcagaggctctcttgagctggcaatgacccacccggaattctactggtatgtggacgagggactatccgctgataacctgaaatcaagccttcttcgctctgaaatcctttttggtgcccccctaccgaactactacagcgtagacgacaggtgggaggaacagagagcaaaattccagtccttcgtcgtgacgtatgtggccatgcttgccaagcagtccacatctaaagtccaggtgctgtacggcggtacggacttgtttgactatgaagtccggagaacctttaataatgatatgctcttagctttcatcagtagctcctgcatcgccgcgctagtatacatccttacatcatgtagcgtatttctgtcattctttggtattgcctctatcggcctgtcttgcctagtggccctgttcctgtaccacgtggtctttgggattcaatacctgggcatccttaatggcgttgctgcctttgtgattgtaggaataggcgtcgacgacgtgttcgtgttcattaatacttaccggcaggccacccacctggaggaccctcagctgaggatgattcatactgtgcagaccgccgggaaggcgaccttcttcacatccttgactaccgcagccgcctatgccgccaatgtgttctcacagatccccgctgtccatgactttggcctttttatgtccttgattgtatcttgttgttggttagcagtgctggtgacgatgcccgctgccctgggactgtggtctctttaccttgcacccctagagtcatcttgccagacgagttgtcaccagaattgttcacggaaaacgtcattacatttccccggagacgtgttcgcggctcctgagcaggtgggcggctcccctgctcagggaccaattccgtacctcgatgatgacataccactgctcgaagtagaagaggaaccagtttccttagaactaggtgatgtgtccctggtgtccgtgagtccagagggacttcagcctgcgagtaacactggcagtcgagggcacttgatcgtccagctgcaggagctgctgcaccattgggttctgtggagcgccgtgaaatctcgctgggttattgtgggccttttcgtctctatcctcattttatctctcgtattcgcttcccgactaaggccagcaagccgcgctccacttctgttcaggcccgatacgaacattcaggtcttgctggacctgaagtataacctgagcgctgaagggataagttgtattacctgtagcgggctatttcaggaaaagccacacagcttgcaaaacaacattaggacatctctggaaaagaagcgaagaggctctggtgtgccctgggcttccagacctgaagccaccctgcaagattttccaggcaccgtctatattagcaaagtgaaatcacagggacatcctgctgtatatcggctgtctctgaatgcttctctgccagccccatggcaggcagtttcccctggcgacggagaggttccgtcttttcaggtgtatcgagcgcccttcggcaattttacaaaaaaactgactgcgtgtatgagtaccgttggactgttgcaggcagcgagtccctccagaaagtggatgctcactaccctggcttgcgacgctaagagaggttggaagtttgattttagcttctatgttgccacgaaagaacaacagcacactagaaagctttatttcgcgcagtcccacaagcctccctttcatggccgggtgtgcatggctccgcccggatgtttattaagctcctctcccgacgggcctacaaagggatttttctttgtgccatccgagaaagtcccaaaggccaggctctccgccacatttgggttcaatccttgtgtgaacacgggctgtggcaaacctgcggtcagacctctggtggataccggggcaatggtgtttgttgtttttggcatcattggcgtcaatcgaaccaggcaggtcgataatcacgtgatcggggaccccggctccgtcgtttacgattccagctttgatctttttaaagagatcggtcatctatgtcacctatgtaaagccattgccgcaaattctgagttagtcaaacctggaggcgcacagtgtctgccctctgggtatagtatttcgtcttttctgcaaatgctgcaccccgagtgcaaggagcttccggaaccaaacttgctgcctgggcagctatctcacggggccgttggagttcgcgaaggacgggtccagtggatcagtatggccttcgagtcaactacctacaaggggaagtcgtcctttcaaacatattctgattatctgcggtgggagtccttcctgcagcagcagctgcaggcccttcctgaaggcagtgtgttaaggcgggggttccagacctgcgagcactggaagcagatcttcatggagattgttggagtccaatccgccctatgcggtctggtgctatctctgctgatatgcgtcgccgctgtcgccgtgtttacgacccacattcttctacttctgcccgttcttctttcaatcttgggtattgtatgcctcgtggtgacaattatgtactggtctggctgggagatgggggcagtcgaggcaatcagcctttcaatcctggttggtagcagtgtggactactgcgtgcatctcgtcgaggggtacctcctcgcaggcgaaaatctaccgccacaccaagccgaagacgcccgtacgcagcggcagtggaggactctggaggccgttaggcatgtgggggtggcgattgtcagcagcgcgctcaccaccgttattgcgaccgtacccctgtttttctgcatcatcgctcctttcgccaaatttggcaagatcgtggccctcaatacaggggtatccatcctgtatacgctcaccgtgtccacggccctgctgggtattatggccccaagctcgtttacgcgaaccagaacctcgtttctgaaagctctcggggctgtactgctggcgggcgctcttggcctgggcgcttgcttagtactgctgcagtcagggtacaaaatccctctacctgcaggggcatccctgtag

SEQ ID NO: 198769 - DNA, 4179 bp, synthetic construct
  misc_feature 1..4179: note = Description of Artificial Sequence: Synthetic coding sequence
  source 1..4179: mol_type = other DNA
atggacaccgaggacgaccccctgctgcaggacgtgtggctggaggaggaacaagaggaggaggaggccaccggggagaccttcctcggcgcacagaagcccggaccacagcctggtgcaggcggtcagtgctgttggcggcactggcccctggcgagccgaccccctgcctctggtttttggagcacgctggggtgggcattcaccaacccctgctgcgccggcctggtcttattcttaggttgctcgattccgatggccctgagtgcgtttatgtttctctactatcccccactcgatatcgatatatcctacaacgcttttgaaatcagaaaccacgaagccagccagagatttgatgcactcaccctggctctgaagtcccaatttggttcctggggacgcaaccgcagggacttagccgatttcactagcgagaccctgcagaggctaatttcggagcagttacagcaacttcacctgggtaaccgttcacgtcaggcctccagggcccccagggttattcccgccgcctccttgggcggccccggcccctatcgggacacctctgccgcccagaagccaactgcaaatcgctcagggaggcttaggagggagactcctccactggaggacttagccgctaatcagagcgaagaccctaggaaccaacggctgagcaaaaacggccggtaccagccctcaatcccaccccacgctgccgtggccgccaaccagagccgcgcaaggcggggtgcttcccgctgggattacagcagagcttacgtgagtgcaaacacccagacccatgcccattggaggattgagctgatattccttgcaaggggagatgccgaacgcaatatcttcacatctgagagactggtgacaatccacgagattgagagaaagatcatggatcatcctggattccgagaattctgctggaaacctcacgaggtgctgaaagatctacccctaggatcttattcctattgttctccaccatcaagtctgatgacttacttcttcccgacggaaaggggcggcaagatatattatgacgggatgggccaggatcttgcagacattcgcgggtctcttgagttggcaatgacccaccctgagttttactggtatgttgacgaaggactgtccgcggacaacctgaagagctccctgctgcggtccgagattcttttcggcgctccgctgcccaactactacagcgtcgatgatcggtgggaagagcaaagagcaaagttccagtccttcgttgtgacatacgttgccatgctcgctaagcagagcacctcgaaggttcaagttctgtatggaggaacggatttgttcgattatgaggtccggaggacgttcaataatgatatgctgctagccttcatcagcagctcttgcatcgcggcgctggtgtacatattgacgtcttgtagcgtctttctgtctttctttggaatcgccagcattgggctaagttgcttagtcgcattattcttgtaccatgtggtgtttggaatccagtacctggggattctcaacggtgtggccgcctttgttatcgtgggaattggggtcgacgatgtgttcgtgtttatcaatacatataggcaggccacccatctggaagacccccagctgaggatgatccacacagtccagaccgccggtaaggcaactttttttacgagtcttacaactgcggccgcctatgccgccaacgtttttagccagatccccgcggtacatgattttggcttgttcatgtccctgattgtcagttgctgttggctcgcagtgttggtaaccatgcctgctgcattggggctgtggtccttatacctggcccctttggaaagcagctgccagactagctgccatcagaactgttcaagaaaaacttcattacacttccccggggacgtgtttgccgctccagagcaagttgggggaagccctgcccagggccccatcccctatcttgacgatgatatacccttactggaagtcgaagaggaaccagtgtctctcgaactcggggatgtttccctggtgtctgtgtctcccgaagggctccagccagcaagcaataccggctcacgagggcatctcatagttcaactacaggaactgcttcatcactgggttctgtggtctgctgttaagagccggtgggtaattgtaggactcttcgtgagtatcctaatcctttcgttggtctttgctagccggttgcgaccagcctcccgagcgccattgctgtttcgcccagacaccaatattcaggtcctccttgacttaaaatacaatctgagcgccgaaggaatcagctgcataacttgttcagggctcttccaggagaagcctcactccctccagaataatatccgaacatcactggagaaaaagcgcaggggatcgggtgttccatgggcgagtagaccagaggctaccctgcaggactttccaggaactgtgtacatctcaaaagtgaagtcacaggggcatcctgcagtgtatcgactttctctgaacgccagcctgccagccccttggcaggccgtatcgcctggagatggcgaagttccctcctttcaggtctaccgcgccccttttgggaactttacgaaaaaactgactgcctgcatgtcaacagtgggccttctgcaggcggcttcccccagcagaaaatggatgctcacaactctcgcttgtgacgccaagcggggctggaaattcgatttctctttttacgtggctacaaaggaacagcaacatacccggaagctgtacttcgctcaaagccataaaccaccatttcacgggcgggtctgcatggcaccccctggttgtcttctgagctcatctccagatggccctactaagggatttttttttgtgccgagcgaaaaggtgccgaaggctcgtctgagtgccaccttcggctttaacccctgtgtgaacacaggttgtgggaaaccagcagtgcgaccgctggttgacaccggcgccatggtgttcgtggtttttggtatcataggcgtgaaccgaacccggcaggtcgataatcacgtgataggagatcctggcagcgtggtttacgatagcagctttgacctctttaaagaaatcggccatctttgccacctctgtaaagcgattgccgcaaattcagagctggtcaagcccgggggggctcagtgcctcccaagtgggtacagtatctctagtttcttgcagatgctccaccctgagtgcaaggaactgccagaacccaatctcctgcccggacaactatcccatggcgctgtgggcgtgagggagggccgggtgcagtggatctcaatggcgtttgagagcacaacctacaagggtaagagttcgtttcaaacttattccgattatctccggtgggaaagttttctacaacaacagctgcaggctttgccggaggggagtgtactgaggcgcggcttccagacctgcgagcactggaagcagatcttcatggagatcgccggcgtgcagagtgccttgtgcggcctggttctgagtctcctgatctgtgtcgccgcagtggccgttttcaccactcacattttgctgctgcttcccgtactcttgtcgatcttagggattgtgtgtcttgtggtaacgataatgtactggtcggggtgggagatgggagctgttgaggcaatcagcttgtcaatcctggttgggtcatctgttgattattgtgtccacctggtcgaagggtacctgctggctggagagaacctgcctccacatcaggcggaggacgccaggacacagaggcagtggagaaccctagaggccgtcaggcatgttggtgtagccatcgtctcatcagcactaaccactgtgatcgcaaccgtcccgctgttcttctgcattatagcccctttcgcgaagttcggcaagattgtggcgctcaatacaggcgtgagcatcttatacaccctgaccgtgagcaccgccctcctagggattatggctccgagcagctttacgcgaacgagaacttcttttcttaaagccttgggggctgtacttctcgctggtgcactaggtctcggcgcctgcctggttctgctgcagagtggctataagatacctttacctgcgggcgccagcttgtag

SEQ ID NO: 198770 - DNA, 2304 bp, synthetic construct
  misc_feature 1..2304: note = Description of Artificial Sequence: Synthetic coding sequence
  source 1..2304: mol_type = other DNA
atgccctgggtggagcccaagccccggcccggccccgagcagaagcctaagctgaccaaacccgatagcgccaccggccctcagtggtaccaggagagccaggagagtgagtccgagggaaaacagcccccccccggccccctggcacctccaaagagccctgaaccatccgggcctctggcgagtgagcaagatgccccacttcccgagggtgatgacgctcccccgcgtccttctatgctcgatgacgcccctcgtctccccctcgaattagacgatgctcccctccctgaggaggagacccccgagcccacagccatttgccgacatagacaccgctgtcatacagactgcttggaaggccttctgagcagaaccttccagtggctgggatggcaagttggtgcacatccgtggatctttttgctcgcccccctgatgctgacggcggccctaggcacaggattcctttatttgccgaaagacgaggaggaagacctggaggaacactatactcctgtgggaagtcctgctaaggcagaaaggaggttcgtgcaggggcacttcaccaccaacgactcgtaccgcttctccgcatcccggagatcgacagaggccaattttgtgtctctcctcgtggtgtcgtacagcgactcattactggaccccgcgacctttgcggaagtatctaaactggacggagccgttcaagatttgcgcgtggcacgagagaagggcagccaaatccagtatcagcaggtatgcgctagatacagagcgctatgcgtcccacccaatcctattctgtacgcctggcaggtcaataagaccctcaatctctcctccatcagcttcccagcatataaccacggtcgccatcccctctacctgacaggcttctttggaggctatattcttggtggttctctcggaatgggacagcttctgctgcgggctaaggcaatgcggctcttgtattatttaaaaactgaggatcctgaatatgacgtccagtccaagcagtggctcacacatctgctggaccagtttacgaatatcaagaatatcctcgcccttaagaaaattgaagtcgttcatttcacatccttaagtcgtcagttagaattcgaggcaactagcgtgacggtgatccctgtgtttcacctggcctacatactgattattctgtttgctgtgaccagctgctttaggtttgattgtatccgcaacaagatgtgcgtggcagcattcggggttatctcagccttccttgctgtggtgtcaggctttgggctgctactgcatataggagtgccattcgtgataatcgtggctaatagtccattcctgattctcggcgtcggcgtggatgatatgtttattatgatatccgcgtggcacaagacaaatttggctgacgacatccgagagcgtatgtccaacgtgtatagtaaggccgctgttagtatcactatcaccactattaccaacattttggcattgtataccggtatcatgtcctccttcagatctgtacagtgcttttgcatatacacagggatgacactgcttttctgttacttttacaatatcacctgtttcggcgccttcatggctctggatggtaaacgagaagtggtttgcttgtgctggctcaagaaagcggatcctaaatggccttcttttaaaaagttttgctgttttccattcggtagtgtgcctgatgagcacgggaccgacatccacccaattagtctcttttttagggactattttggccctttcttgactcgctccgagtcaaaatattttgtggtgtttatttacgtgctttacattatttcttccatttatggctgcttccatgttcaggaaggacttgacctgagaaacctcgcgtctgacgatagctatatcaccccctacttcaacgtcgaagagaattattttagtgactatggccctcgagtgatggtcatcgttacaaagaaagtggattactgggataaagatgtccgccagaagctggaaaactgtactaagatttttgagaagaatgtttacgtagataaaaacctgacagaattttggctggacgcatacgtacagtacttgaagggtaactctcaagatcctaatgagaagaacacttttatgaacaatatccctgacttcttatccaactttccaaactttcagcacgatataaacattagcagctccaacgaaataataagctctagaggatttatccaaacaactgacgtgagttccagtgctaagaagaaaatcttactattttag

SEQ ID NO: 198771 - DNA, 978 bp, synthetic construct
  misc_feature 1..978: note = Description of Artificial Sequence: Synthetic coding sequence
  source 1..978: mol_type = other DNA
atgaccgagcggcggcgggacgagctgagcgaggagatcaacaacctgagagaaaaagtgatgaagcagtcggaggaaaataacaatctgcagagccaggtgcagaagcttacagaagaaaatacaactcttcgagaacaggtggagcccacaccagaggacgaggatgatgatatcgagctccgcggcgcagccgccgcggccgctccgcccccacctattgaggaagagtgccccgaggacctcccagagaagttcgacggtaatcctgacatgttagctccattcatggcccagtgtcagatctttatggagaagagcactagagatttcagcgtggacagggtcagggtctgtttcgtcactagcatgatgacaggtcgcgccgctcgatgggcctccgcaaagttagagagatcgcactatctcatgcacaactacccagcatttatgatggagatgaaacacgtcttcgaagacccccagcgccgggaggtggccaaacggaagatccgtcgccttcgccagggcatggggtctgtgattgactatagcaatgcttttcagatgattgcgcaggatctggactggaacgagccggccttaattgatcagtatcacgaaggactaagcgaccatattcaggaagagctttcacacctggaggtggctaagagccttagcgccctgatcggtcaatgcatccacatcgaacggaggctagctcgggctgctgccgcccgtaaacctaggtccccacctagggccctggtattgccccatattgcatctcatcaccaagtggaccccacagagccagtgggcggcgcgcggatgcggttaactcaggaagagaaggagcgtcgccgaaagcttaatctgtgtctgtactgtggaactggtgggcattacgctgataactgccccgccaaagcatccaagtctagtccagccgggaattcccctgcccccctgtag

SEQ ID NO: 198772 - DNA, 978 bp, synthetic construct
  misc_feature 1..978: note = Description of Artificial Sequence: Synthetic coding sequence
  source 1..978: mol_type = other DNA
atgaccgagcggcggcgggacgagctgagcgaggagatcaacaacctgcgagaaaaagtgatgaagcagtctgaggagaacaataatttgcagagccaggtgcaaaaactgactgaggagaacacaactctgcgtgagcaagtggaaccgactcccgaggacgaggacgacgatatcgaactgcgtggggccgccgccgcggcggcacctcccccaccaattgaggaggaatgcccggaagatcttcctgagaagtttgacgggaatcccgatatgctggctccttttatggcacagtgtcagatattcatggaaaaatccacacgcgacttttccgtggaccgcgtgcgggtgtgtttcgttacatcgatgatgacagggcgcgctgcccggtgggcttccgctaaactggagaggtcccactacctgatgcacaattatcctgctttcatgatggagatgaaacacgtcttcgaagatccgcagagacgcgaagtcgccaaacgcaagatccgtagattaaggcaggggatggggagtgtcattgactactccaacgccttccagatgatcgcacaggacctggactggaatgagcctgccctcatcgaccagtaccatgaaggactctctgatcacattcaagaggagcttagccacctggaggttgcaaaaagtctctctgccctgatcgggcaatgcattcatatcgaacgccgccttgcccgcgctgccgccgcaagaaagccccggagcccgcctagggcgctggtactgccccacattgcctctcaccatcaggtcgatcccaccgagcccgtggggggagcacgaatgagactgacacaggaggaaaaggaaaggaggcgaaagctgaatctgtgcctgtactgtggaaccggcggacactacgcggacaattgcccagctaaagcctctaagtcatcccccgccggcaattccccggctccgttatag

SEQ ID NO: 198773 - DNA, 1311 bp, synthetic construct
  misc_feature 1..1311: note = Description of Artificial Sequence: Synthetic coding sequence
  source 1..1311: mol_type = other DNA
atgatggccacccagaccctgagcatcgacagctaccaggacggccaacagatgcaggtggtgaccgaactgaaaacagagcaggaccccaattgcagcgagcccgacgcggaaggcgttagccctcctcctgtggaatcacagacgcccatggacgtggacaaacaggccatctacaggcaccctctatttcccctgctggccctgctcttcgaaaagtgcgagcaatctacacaagggtccgagggtaccacctccgcttctttcgatgtagacatagaaaacttcgtgcgcaaacaggagaaagagggaaagcccttcttctgtgaggatcccgagacagacaacctgatggtgaaggcaatacaggtcctccgcatccacttactagagctggaaaaagttaacgagttgtgcaaagacttctgttctcgatacatcgcatgccttaaaacgaaaatgaattcggaaacactattgagcggcgaacctgggtccccttactcccccgtacagtctcaacaaatccagtcggctattacgggaacgatatctccacagggaattgtggttcccgcaagcgcactgcagcagggcaacgtggccatggccacggtcgcaggcggaaccgtgtatcaacccgtcaccgttgtcaccccacagggtcaagtggttactcagacactgtcaccaggcaccatcagaatccaaaacagccagctccaactgcaacttaaccaggatctgtccatactccaccaggatgacggcagcagcaagaacaagaggggcgtgctgcccaagcatgcaactaacgtaatgcggagctggctcttccagcacatcggtcatccttatcctaccgaggacgaaaagaagcagatcgcagcacagaccaatttaaccctgttgcaagtgaacaactggtttatcaatgcccgacgacgaatccttcagccaatgctcgattcctcatgctccgagacacccaaaacaaaaaagaagaccgctcagaaccgacccgtccagcgcttctggcccgactcaatcgcaagcggggtggcacagccacctccaagcgaacttactatgtcggaaggagcagtcgtgacaatcactacaccggtgaatatgaatgtagactccctgcagagcctcagtagcgacggcgcaaccctggcagtccagcaggtgatgatggccggacagagtgaggatgaaagcgtggattcgaccgaggaagatgcaggggcccttgcacccgctcacatctcaggactggttctggagaattctgatagcctccaatag

SEQ ID NO: 198774 - DNA, 960 bp, synthetic construct
  misc_feature 1..960: note = Description of Artificial Sequence: Synthetic coding sequence
  source 1..960: mol_type = other DNA
atggtgaaggccatccaggtgctgcggatccacctgctggagctggaaaaggtgaatgaactctgcaaagatttttgtagcagatatatcgcttgcctcaaaactaagatgaattctgaaaccctgctctcaggggagccaggcagcccctactcgccagtccagagccagcagatacagagcgcaatcacggggacaatttctccccagggcatcgtggtcccagctagcgcactgcagcagggaaatgtagcaatggctactgtggcaggggggacagtgtaccagcctgtaactgtagtcactccgcaggggcaggtggtgacgcagaccttgtcccctgggactattagaatacagaatagtcaacttcagctacagttgaaccaggacctgtcaatcctgcaccaagatgacggctcttcaaaaaacaagcgaggcgttcttccaaaacacgccaccaacgtgatgagatcatggctgtttcaacatatcggacacccctatccaacggaagacgagaagaaacagatagcagcccagacgaaccttacactgctccaagtgaacaattggtttataaacgcccgacgacgcattctccagcctatgcttgacagcagctgctcagaaacacctaagaccaaaaaaaaaacagctcagaatagacccgttcagcgattctggccagacagtatcgcctcaggggttgcacagcctccaccttccgagcttacgatgtccgagggtgccgtggtcaccattacaacaccggtgaacatgaatgtggattctctgcaaagcctcagctcggacggagccaccctggcggttcagcaggtgatgatggccggacagtctgaggacgagtccgtggactctaccgaagaggacgccggcgcacttgctcccgcccatatctctggcttggtgctcgagaacagtgattcccttcagtag

SEQ ID NO: 198775 - DNA, 1260 bp, synthetic construct
  misc_feature 1..1260: note = Description of Artificial Sequence: Synthetic coding sequence
  source 1..1260: mol_type = other DNA
atgatggccacccagaccctgagcatcgacagctaccaggacggccagcagatgcaggtcgtcacagagcttaaaaccgagcaagatccaaattgcagcgaaccagatgccgaaggagtgtcaccccccccagtcgaaagccagacccctatggacgtggataagcaggcgatctatcggcatcctctgttccctctgcttgccctgttatttgagaaatgtgagcagtctacccaagggagcgaaggaaccacttcggcctcattcgatgtcgacatcgaaaacttcgtgcggaagcaggagaaggaaggcaagccatttttttgtgaagatcctgaaactgataatctcatggtcaaggcaatccaggtgctacgcatccatctgcttgagctggaaaaagtgaatgaactgtgtaaggacttttgctcccgatatatcgcttgcctgaagacaaagatgaactcagaaacactattgagcggggagccaggcagtccgtattcccccgtgcagtcacagcagattcagtccgctattactggaaccatttccccacagggcatcgtggttcctgctagtgctctgcagcagggaaatgttgccatggctactgtcgccgggggcactgtgtaccaaccagtgaccgtcgtgaccccgcagggccaagtcgtgacacaaacactctctcctggaaccatccgaatccagaactcgcagctccagcttcagctcaatcaggacttgagtatactgcaccaggacgatggatctagcaagaacaagaggggagtgctgcccaagcacgccaccaatgtcatgcggtcttggctcttccagcacattggtcacccctatcctaccgaggacgaaaagaagcagattgccgcccaaaccaatctcacactactacaggtaaacaattggttcatcaatgccaggaggagaatccttcaaccgatgctagacagcagttgctccgaaacacccaagactaagaaaaagactgcacagaacaggcctgtacagcggttttggcccgactccatagccagtggggtcgctcaacctcccccatccgagctaacaatgtccgagggcactgggggacgcccaagaccagacatggtggatcacggcgttggcatcatgaacaaacgtcccggttccggtctgttagcaccacctcggccagctgagaatgacatcctgaaaccgcctctccggtcttccttcgtgaattgtttgctgatattctag

SEQ ID NO: 198776 - DNA, 1419 bp, synthetic construct
  misc_feature 1..1419: note = Description of Artificial Sequence: Synthetic coding sequence
  source 1..1419: mol_type = other DNA
atgatgcagcacgccagccccgcccccgccctgaccatgatggccacccagaatgttccccctccgccttatcaagactctccacaaatgacggcaacagctcaaccgccttcaaaggctcaggcagtgcatatttcagccccatcggccgcggcaagtaccccggtgcctagtgcaccaatcgacccccaggcgcaactcgaggctgacaagagggctgtgtacagacacccactgttcccgcttttgactctactcttcgagaagtgtgagcaggctacgcaaggtagcgagtgcatcacgtcggcatcattcgacgtggacatcgaaaatttcgtacatcagcaggagcaggagcacaaacctttcttttccgatgacccggagctcgataatctgatggtaaaggctatacaagttttgcgcattcacctgctggaacttgagaaggtgaatgaactgtgcaaggatttttgcaataggtatatcacctgtctgaagacgaagatgcattccgataacttactgagaaatgacttgggtggtccctactctcccaatcagccatcaatcaatctgcatagtcaggatctcctgcagaactcccccaactctatgagcggcgtcagcaataaccctcagggtatcgttgtacccgccagcgcacttcagcaaggaaatattgctatgactacagtaaattctcaggtggtcagcggcggcgccctgtatcagcctgtgacgatggtcacaagtcaggggcaggtcgtgactcaggccataccacagggtgccatccagattcagaacactcaggtaaacctggacctgacttctctgctggacaacgaagataagaagagcaagaataaaagaggggtgctgcctaagcatgcaacgaatattatgcggagttggctttttcagcacttaatgcatccttaccctaccgaagatgagaagcgacaaatcgccgctcagactaacctgacactgctgcaggtcaacaattggtttattaacgctcgaaggcggatcctccagcctatgctcgatgccagtaatcccgacccagcaccgaaagccaagaaaattaagtctcagcatagaccaacacaacgcttttggcccaacagcatcgccgctggtgtgctacaacagcagggcggcgcaccgggcaccaacccagatgggagcatcaacctggataatttgcagagcctttccagtgatagcgccacaatggccatgcagcaggccatgatggcggcccacgacgattccctagacgggactgaagaggaagatgaagacgaaatggaggaggaagaggaagaagagttggaggaggaggtagatgaactgcaaaccaccaacgtttcagatctggggttagagcatagcgatagcttagaatag

SEQ ID NO: 198777 - DNA, 120 bp, synthetic construct
  misc_feature 1..120: note = Description of Artificial Sequence: Synthetic coding sequence
  source 1..120: mol_type = other DNA
atgatgcagcacgccagccccgcccccgccctgaccatgatggccacacagaatgtgccaccacctccttatcaggactctccccagatgaccgctaccgcacagccaccctctaagtag

SEQ ID NO: 198778 - DNA, 1332 bp, synthetic construct
  misc_feature 1..1332: note = Description of Artificial Sequence: Synthetic coding sequence
  source 1..1332: mol_type = other DNA
atgaccgccaccgcccagccccccagcaaggcccaggccgtgcacatctctgcccctagtgccgccgcatctacacccgtgccctcggcccctatcgatccacaggcccagttggaagctgacaaacgggctgtgtaccggcatcccctgttcccgttactgaccctgctgttcgaaaagtgcgagcaggcaactcagggttctgaatgtatcacttcagcatccttcgacgtcgatatcgagaatttcgtgcatcagcaggagcaggaacataagccctttttctccgacgatccggagttggataatttgatggtgaaggctatccaggttctgcgaatccatttgctggagctggaaaaagtaaatgagctctgtaaggatttctgcaatcgatacataacgtgtctcaagaccaagatgcacagcgataatctgctccgcaatgacctgggaggaccctacagtcccaaccagccatctatcaatctgcactctcaggatctgctccagaactccccaaattctatgtctggcgtcagcaacaatccccagggaattgtagttcccgccagcgccctgcagcaaggtaacatagccatgaccacggtgaactcacaggtggtctctggtggcgccctctaccagccggtcaccatggttacctctcaggggcaggtggtgacacaggcaattccacagggcgctatccagatccaaaacacccaggtgaacctggatttgacctccctgctggacaatgaggataagaagtcgaagaacaaaaggggagtgctgcccaagcacgccaccaatatcatgcgatcttggctattccagcacctgatgcatccataccctacagaggacgagaagcggcagatagccgcccagacaaacctgactctcttgcaggttaataattggttcatcaacgctcgccggagaatcttacagcctatgctcgatgcctcaaatcccgatccagcccctaaggctaaaaagatcaaaagccaacaccgcccgacgcaaagattctggcccaacagtattgctgctggagtcctacagcagcagggcggggcaccaggaaccaaccctgatggtagcattaatctagataacctgcaaagcctctctagtgattccgcaacaatggccatgcaacaagccatgatggccgcccatgacgactcattggacggcacagaggaagaggatgaggatgagatggaggaggaggaggaagaagaactggaggaagaagtagatgaacttcagaccacaaatgtgtctgatctcgggttggaacactccgactctctcgagtag

SEQ ID NO: 198779 - DNA, 1332 bp, synthetic construct
  misc_feature 1..1332: note = Description of Artificial Sequence: Synthetic coding sequence
  source 1..1332: mol_type = other DNA
atgaccgccaccgcccagccccccagcaaggcccaggccgtgcacatatctgcccctagcgctgccgcgtcaacccctgtacccagcgccccaattgatcctcaggcccagctggaggcggacaagcgggcagtgtatcgtcatcccctgtttcccctactgactcttctctttgaaaaatgcgagcaggctacacaaggttctgagtgtattacctccgcatcatttgatgtggacatagagaattttgtacaccagcaggaacaagagcacaaacccttctttagcgatgaccctgaactggacaacctgatggtgaaagccatccaagtgctccgcattcatctacttgagttggaaaaggtgaatgaattgtgtaaagacttttgtaatcgatacatcacttgcctgaagactaagatgcattctgacaacttgttgcgcaacgacttagggggcccatactcacctaatcagccgtccataaaccttcattcacaggatctgctgcaaaactcacccaatagcatgtccggggtctcgaataatccgcaggggattgtggtgcctgccagcgctctgcagcaggggaacattgcaatgaccactgtaaacagtcaagtcgtatcgggaggagccctgtaccagcctgtaaccatggtgacgagccaggggcaggtcgttacccaggctataccgcagggagcgattcagatccagaacacccaagtcaatctggaccttacaagtctcctggacaacgaggacaaaaaaagcaagaataaacggggagtgctgccgaagcatgccacgaacatcatgcggtcatggctgtttcagcacctaatgcatccctatcccacagaagacgaaaaacggcaaattgctgctcagactaatctgaccctcctccaagtcaacaactggtttattaacgcacggaggcggattctgcagcccatgttagacgcgtctaaccccgacccggcgcccaaggctaagaaaattaagtcccaacaccggcccacccagagattctggcccaattcaatcgctgccggtgtgctgcagcagcagggaggagcgcccggcaccaatcccgacggctcaattaacctcgataatctccagagcctgtccagtgattcagctaccatggctatgcaacaggccatgatggctgcgcatgacgattccctggatggaacagaagaggaggacgaagacgaaatggaagaagaagaggaggaagagctcgaagaggaggtggacgagttacagaccacaaacgtgagtgacctaggtttagagcattctgatagcctggaatag

SEQ ID NO: 198780 - DNA, 123 bp, synthetic construct
  misc_feature 1..123: note = Description of Artificial Sequence: Synthetic coding sequence
  source 1..123: mol_type = other DNA
atgatgcagcacgccagccccgcccccgccctgaccatgatggccacacagaacgtgcctccgccgccctatcaggatagtcctcagatgacggccaccgctcagccgccttccaaggcctag

SEQ ID NO: 198781 - DNA, 921 bp, synthetic construct
  misc_feature 1..921: note = Description of Artificial Sequence: Synthetic coding sequence
  source 1..921: mol_type = other DNA
atgatggccacccagaacgtgcccccccccccctaccaggacagcccccagatgaccgccaccgcccagccgccctcaaaggcacaagccgtccacatctcagctccctcagcagctgcatccactcccgtcccatcagcccctattgaccctcaggcccagctcgaagctgataaacgtgctgtctacagacaccctttgtttcctctcctgactctgctgtttgagaagtgcgagcaggcgacccagggcagtgagtgcattactagtgcctcgttcgacgtggatattgaaaattttgtgcaccagcaggagcaggagcacaagccctttttttcagacgatccagagctggacaacctaatggtgaaagccatacaagtcttgcgaattcatctgctcgaactcgaaaaagtgaacgaactgtgtaaagatttttgcaataggtacatcacatgcctaaagactaaaatgcatagcgataacttattgagaaacgacctaggcgggccctatagtcccaaccagccttctatcaatctgcattcacaagacctgcttcagaacagtccaaattcgatgtcaggggttagtaacaacccgcagggaattgtagtgcctgcttcagccctgcagcaaggcaacatagctatgacgaccgtcaacagtcaagtcgtatctgggggcgcactttaccagcccgttactatggtgacatcccaaggccaggtggtgacacaggcaataccacaaggcgccattcaaattcagaatacacaggtgaacctggatctgacctccctgctcgacaatgaggataagaaatctaagaacaaacgcggcgtcctaccaaagcatgcaacaaacattatgcgctcctggctgtttcagcaccacgcccccctgccacatggcggctag

SEQ ID NO: 198782 - DNA, 1227 bp, synthetic construct
  misc_feature 1..1227: note = Description of Artificial Sequence: Synthetic coding sequence
  source 1..1227: mol_type = other DNA
atgagccggccccaccccacccggaccgcccaccggcaccccctgtttccactcctcacactgttgttcgagaagtgtgagcaggccacacagggatccgaatgtataacctcggcgagctttgatgtggacattgaaaattttgtccatcagcaggagcaggagcataaacctttcttctcagacgatccagagctggataacctcatggttaaggcaattcaggtgttgcgaattcacctgttagagttggaaaaggttaacgagctgtgtaaggatttttgtaatcgctacattacctgtcttaaaaccaagatgcattcggacaaccttcttaggaatgaccttgggggcccatatagtccaaatcagcccagcatcaatctacatagccaggaccttctgcagaattcacctaatagtatgtcgggcgtctctaataaccctcaagggatagtcgtccctgcttcagcactgcagcagggaaacatagcaatgacgacagttaattcccaggtggtctcaggaggcgccttgtatcagcccgtgaccatggtgacctcacagggacaagtggtaacccaggcaatccctcagggcgcgattcagattcaaaatacccaggtaaacctagacctgacatccctactcgacaacgaagacaagaagagcaagaacaaacggggggtacttcctaaacatgcaacgaatattatgagatcctggttattccagcacttgatgcatccttaccccacagaagatgagaaacgacagattgctgctcagaccaatctcaccctgttgcaagtcaacaactggtttatcaatgcgaggaggagaatactgcagcccatgctggacgcttcgaatccagaccctgccccaaaagccaagaagattaagtcacagcataggcctacccagcggttctggccaaatagcatcgctgccggcgtacttcagcaacagggcggcgctccaggaactaacccagacgggagcatcaatctggacaacctgcaatctctatccagcgactccgccaccatggcaatgcaacaggctatgatggccgctcacgacgactctctggatggcacggaggaggaagatgaagacgagatggaggaagaggaggaagaggaactggaagaggaagtggatgagctgcagaccacaaacgtttcagacctcggtcttgaacacagcgattctttggaatag

SEQ ID NO: 198783 - DNA, 297 bp, synthetic construct
  misc_feature 1..297: note = Description of Artificial Sequence: Synthetic coding sequence
  source 1..297: mol_type = other DNA
atgatgcagcacgccagccccgcccccgccctgaccatgatggccacccagaatgtgcctccgccaccctatcaggactcaccacagatgaccgccaccgctcagcccccttctaaggcacaggcagtccatatttccgcgccaagcgcggcggccagcacgccagtcccctccgcaccaatagatcctcaggcgcagctcgaagccgataaaagggccgtgtacaggcaccctctgttcccactgctgacacttctgttcgagaagtgcgaacaggccacccaggggtcagagtag

SEQ ID NO: 198784 - DNA, 234 bp, synthetic construct
  misc_feature 1..234: note = Description of Artificial Sequence: Synthetic coding sequence
  source 1..234: mol_type = other DNA
atgatgcagcacgccagccccgcccccgccctgaccatgatggccacgcagaatgtcccaccaccgccctatcaggattcacctcagatgactgctactgctcagccccccagtaaagcccaggccgtgcatataagtgctccatctgcagccgcttccacccctgttccctctgctccgatcgatccccaggcccagctggaagcagataagcgggccgtctatagatggtag

SEQ ID NO: 198785 - DNA, 990 bp, synthetic construct
  misc_feature 1..990: note = Description of Artificial Sequence: Synthetic coding sequence
  source 1..990: mol_type = other DNA
atgacccgggacttcaagcccggcgacctgatcttcgccaagatgaagggctaccctcattggcccgcacgggtagatgaggtgccggacggcgccgtgaaaccgccaaccaacaagttgccgatttttttctttgggacacatgaaaccgcattcttggggccaaaagatatattcccttactcagaaaacaaagaaaaatatggcaagccgaataagaggaagggctttaacgaaggcttatgggaaatagacaacaatcccaaggtgaaattctctagccagcaagcagcgactaagcaatccaatgcaagcagtgatgtcgaggttgaggagaaggaaacttctgtgagtaaggaagacaccgaccacgaggaaaaggcctctaatgaggacgtgactaaagctgtggacatcactacaccaaaggctgccagaaggggcaggaaacgaaaggcagagaaacaggtcgagaccgaagaggccggggtcgtgactactgccactgccagtgtcaatctgaaggtctctcccaaacgagggcgtcccgccgctacagaagtaaagattcccaagccccgaggtcgccccaagatggtgaaacaaccctgcccgtcagaatccgacattatcaccgaagaggacaaatccaagaagaaaggccaggaggaaaagcagcccaagaagcagccaaaaaaagacgaggagggccaaaaagaagaagacaagccaagaaaagaaccagacaagaaagagggaaagaaggaggttgagagcaaacggaaaaacctcgctaagaccggggtgactagcaccagtgactccgaggaggaaggcgacgatcaagaaggggagaagaagcgaaaaggaggaaggaactttcaaaccgcacatcgacgcaatatgctgaagggccagcacgaaaaggaagccgcggacagaaaaagaaaacaggaggaacaaatggagactgaacactttgcactttag

SEQ ID NO: 198786 - DNA, 1002 bp, synthetic construct
  misc_feature 1..1002: note = Description of Artificial Sequence: Synthetic coding sequence
  source 1..1002: mol_type = other DNA
atgacccgggacttcaagcccggcgacctgatcttcgccaagatgaaaggctatccccattggcctgctcgggtggacgaggtgccggacggggccgttaagccccctaccaataagttgcctattttctttttcggtactcatgaaacagccttcctggggcccaaagatatcttcccgtacagcgagaataaagaaaagtacggaaaaccaaataagcgcaaaggattcaatgaaggcctgtgggagattgataacaaccctaaggtcaaattttcaagccagcaggccgccaccaagcagtctaatgcatccagtgatgtggaggtcgaagagaaagagacttccgtctccaaagaagacaccgatcacgaggaaaaggccagcaacgaggatgtgaccaaggccgtggacattacgaccccaaaagcagccagacgagggagaaagagaaaggccgagaagcaggtggagacagaggaggctggcgtcgtgaccacggccacggccagcgtaaacctgaaagtgtccccaaaacgcggccggccagcagcaactgaggtgaaaattcctaagcctcggggacgacctaaaatggtcaaacagccttgccccagcgaatccgacatcatcaccgaggaggacaagtccaagaaaaaaggacaggaagagaagcagcctaagaaacagccgaaaaaggacgaggagggccagaaggaagaagacaagccgagaaaggagccggacaagaaagaaggcaagaaggaagtggaatcgaagaggaagaacttagccaaaactggagtgacatcaacatccgacagcgaggaggagggagatgaccaggagggtgaaaagaagcggaagggcggccgaaactttcagaccgcccatagacgcaatatgctgaaagggcagcacgaaaaggaggcagcggaccgtaaacgcaaacaggaggaacagatggagactgagcaccaaaccacatgcaatctgcagtag

SEQ ID NO: 198787 - DNA, 1593 bp, synthetic construct
  misc_feature 1..1593: note = Description of Artificial Sequence: Synthetic coding sequence
  source 1..1593: mol_type = other DNA
atgacccgggacttcaagcccggcgacctgatcttcgccaagatgaaggggtaccctcactggccggcaagggtggacgaagtgccggacggggcagtcaaaccccctaccaataagctccccattttttttttcggcacccatgagaccgcttttctgggtccaaaggacatcttcccttattctgagaataaggagaaatacggcaagccaaacaaacgtaaagggttcaatgaagggctttgggaaatagataataacccaaaggtgaagttctcgtctcaacaagccgcaacaaagcaatcgaacgcgtcttccgatgttgaggtcgaggagaaggagaccagcgtatcaaaggaagacaccgatcacgaggagaaagcatctaatgaagacgttacaaaagcggtggacatcacaactccaaaggctgcccggaggggccggaagcggaaggctgagaagcaggtggagaccgaggaggccggcgtcgttaccaccgcaactgcctccgtcaatctgaaggtgtcacctaaacgcggaagaccagctgctaccgaagtcaagatccccaaacctagaggccgtccgaagatggtgaaacagccgtgcccaagcgagtcagatataattactgaggaggacaaaagcaaaaaaaagggacaggaggaaaaacagccaaagaagcaaccgaagaaggacgaggagggccagaaggaggaggacaaacctaggaaggagcccgataagaaggaggggaaaaaggaagtggaatccaagcggaagaacctcgccaagaccggggtgacgagtacctccgacagtgaagaagagggggacgaccaggagggcgaaaagaagcgtaagggtgggaggaactttcagaccgcacacaggcgtaatatgctcaaaggacaacacgaaaaggaggctgcggaccggaaacggaaacaggaggagcagatggaaaccgagcaacagaacaaagatgagggcaagaaacccgaggtcaaaaaagtagaaaaaaagagggagacgtctatggattccaggcttcagcgcatccacgctgaaatcaagaattcactgaaaatcgacaatctggacgtgaaccgatgtatcgaagcgcttgatgagctagctagcttgcaggtaaccatgcagcaggcccagaagcatacggagatgatcactacactcaaaaaaattcgcaggtttaaggtttcccaagtgattatggagaagtctacaatgttatacaataaatttaagaacatgtttctggttggagaaggcgattctgtgatcactcaagttctgaataaatctctcgcagagcagcggcagcacgaggaagctaacaaaacaaaggatcaaggcaaaaaaggaccaaacaaaaaactggaaaaagaacagactggatcaaagacactcaacgggggatccgacgcccaggacggcaatcaacctcagcacaatggcgagtctaatgaagactctaaagataaccacgaagcatctacaaagaagaaacccagctcggaagaaagggaaaccgaaatctctctaaaggacagcactctggacaactag

SEQ ID NO: 198788 - DNA, 1593 bp, synthetic construct
  misc_feature 1..1593: note = Description of Artificial Sequence: Synthetic coding sequence
  source 1..1593: mol_type = other DNA
atgacccgggacttcaagcccggcgacctgatcttcgccaagatgaaaggatacccacactggcccgcccgcgtggacgaagtgcctgatggcgcggtaaagcctcctactaataagcttccaatcttttttttcggaactcacgaaactgcttttctggggccgaaagacattttcccttattctgagaacaaagaaaagtatggcaagcccaataaacggaaaggcttcaatgaaggcctgtgggagatcgacaataaccctaaggtcaaatttagttcccagcaggctgccaccaaacaatctaacgcgtcctccgacgtggaggttgaagaaaaggaaacgagtgtgtctaaagaggacacagaccacgaagaaaaggcaagtaatgaagatgtaacaaaagctgttgatatcacaacacctaaagccgcacggcggggacgtaaacgcaaagccgagaagcaggtggagactgaggaagcaggcgttgtcaccaccgccaccgcctctgtaaacctcaaagtgagccccaagaggggtcgccctgcagccacagaggttaaaattcccaagccacgtggtcggcctaaaatggtgaaacaaccgtgcccaagtgaaagcgatattatcaccgaagaagacaagagcaaaaagaaaggacaggaggaaaagcagcctaaaaaacagcctaagaaggacgaggagggacagaaggaagaggacaaaccaagaaaagagccagataagaaggaaggtaaaaaggaagtcgaatccaaaagaaaaaacctcgctaaaaccggagtaacttctacctctgactccgaagaagagggggacgatcaagagggagagaagaagcgcaagggcggtaggaacttccagaccgcccacagaagaaacatgctcaagggtcagcacgaaaaagaggctgccgaccgaaagcgtaagcaggaggaacagatggaaacagagcaacagaacaaagatgaaggcaagaagcccgaggtgaagaaggtggaaaaaaagcgggagacatctatggacagccggttgcagagaatccatgcagaaatcaaaaattctctaaagatcgataatttagacgttaacaggtgtatcgaagccctagatgagttagcgtccttgcaggtcactatgcagcaggcccaaaagcatacggaaatgatcaccaccctgaagaagattcgtcggttcaaggtgagccaggtgatcatggaaaaatcaaccatgctctataataagttcaaaaacatgtttctcgttggcgaaggggattccgtgattacacaggttttgaataagtctcttgcagagcagcgtcagcatgaagaagccaacaagacaaaggaccaagggaaaaaaggccctaataagaagctcgagaaggaacagacagggtcaaagaccctcaatggcggatccgacgcccaagacggcaatcaaccacagcacaatggggagtccaatgaagacagcaaagataaccacgaggcgtccacgaagaagaaaccctcctcagaggagagagaaactgagatctccctgaaggattcaactctcgacaactag

SEQ ID NO: 198789 - DNA, 1002 bp, synthetic construct
  misc_feature 1..1002: note = Description of Artificial Sequence: Synthetic coding sequence
  source 1..1002: mol_type = other DNA
atgacccgggacttcaagcccggcgacctgatcttcgccaagatgaaaggctaccctcactggccagcgagagtcgacgaggtgcctgatggagccgtaaaaccaccaacaaacaagctccccatctttttttttggcacacacgagacagccttcctggggcccaaagatatctttccgtatagcgagaataaggaaaagtatgggaaaccaaacaaaaggaaaggatttaacgaaggtctctgggagattgacaataacccaaaggtcaagtttagcagccagcaagcagccaccaaacagagcaacgcttcaagcgacgttgaggttgaagagaaggaaacttcagtttccaaagaggatacagaccatgaagaaaaggctagcaatgaagacgtcaccaaggccgtggatatcaccactcccaaagccgccaggaggggccgaaaaaggaaagccgagaagcaggttgagactgaagaggccggagtggtcaccaccgcgaccgcgtcggttaacctcaaagtgtcaccaaaaaggggaagacctgccgccactgaggtcaaaatccctaaaccccgaggtaggcccaagatggtgaagcagccatgccccagtgaatctgacattatcaccgaggaggacaaatcgaagaaaaaaggacaggaagagaagcagccaaaaaagcagccaaaaaaagatgaagaggggcaaaaagaggaggacaagccaagaaaggagcccgataaaaaagaggggaaaaaggaagtcgagtccaaacgtaaaaatctcgccaaaacaggggtgacttctactagcgacagtgaggaagaaggggatgaccaggaaggtgagaagaagagaaaaggtgggcggaacttccagactgcccaccgccggaacatgcttaaggggcaacatgaaaaagaggccgccgaccggaagagaaagcaggaggagcagatggagactgaacaccagacaacatgcaacctacagtag

SEQ ID NO: 198790 - DNA, 1362 bp, synthetic construct
  misc_feature 1..1362: note = Description of Artificial Sequence: Synthetic coding sequence
  source 1..1362: mol_type = other DNA
atggcccacatcaccatcaaccagtacctgcagcaggtgtacgaggctattgacagtcgggacggagcctcctgcgccgagctagtgtcatttaaacatccccacgttgctaatccgagactccagatggcgagtcctgaggaaaagtgccagcaggtactggagcccccctacgacgagatgttcgcagctcaccttagatgtacttatgctgtcgggaatcacgactttatcgaggcatacaagtgccagaccgtcatcgtacagtatcccttgtcctttatggcggccgtcccacatcggactcatgctgtcgactacctgggtttggagacccgcaagcactgggcctcatgttccttcttgcagctcgagagaaacgactctgtcctcgagcagaaactggtgtctgctctgtctctgggaacctctttccttcgggctttccaggcgcataaggaggaaaactgggctttacctgtcatgtacgccgttgccttggatttgagggtgttcgccaataacgccgaccaacagctggtcaagaaggggaagagcaaagttggagatatgcttgagaaggccgccgagttgctaatgtcttgcttcagagtgtgcgcttctgacacaagggccggtattgaagattccaaaaagtgggggatgctttttctggtgaaccagttgtttaaaatttactttaagattaacaagctgcatctgtgcaaacccctcatcagggcaattgatagctctaacctgaaggacgattattccacggcgcagcgagtaacatataaatactacgtgggacggaaagccatgtttgattctgattttaaacaagcagaagagtacctcagctttgcatttgagcactgccaccgtagctcgcaaaaaaataagcggatgatcttaatctatctcttgcctgtgaagatgcttctcggccacatgcccacagtcgagctgctgaaaaagtaccatctcatgcagttcgcggaagtgactcgtgccgtgtctgagggaaacctgctgttgctccatgaggctctcgccaagcacgaagccttcttcatcaggtgcggcatattcctgattctggaaaagctgaagattatcacatatcgaaacctttttaagaaggtatacctgctgctgaaaacacaccaattgtcccttgacgcttttctcgtggctttgaaatttatgcaggtagaagatgtagatatcgacgaggtccagtgtattcttgcaaatctgatatatatggggcacgtcaagggttatatttcacaccagcaccagaagctggtagtctcaaaacagaatccatttccgccattgtcgaccgtgtgctag

SEQ ID NO: 198791 - DNA, 1200 bp, synthetic construct
  misc_feature 1..1200: note = Description of Artificial Sequence: Synthetic coding sequence
  source 1..1200: mol_type = other DNA
atgcggctgaccgacgtggtgcagcagctggtgtacgaggccatcgatagccgcgatggcgcatcttgtgcagagctggtgtctttcaaacaccctcatgtggcaaacccgaggttacaaatggcttctcccgaagagaagtgccagcaggtcctggagcctccatacgatgagatgttcgcagcccacctgcgttgtacttacgcagtgggcaaccacgattttattgaggcctacaagtgtcagactgtcatcgtgcaatataccagtttcttgagggcattccaggcacacaaagaggagaattgggcgctgccggtgatgtatgccgtcgcactcgacctcagagtgtttgcaaacaatgcagatcagcagttagtgaagaaaggcaaaagtaaagtaggggacatgctggaaaaagctgccgagttacttatgtcttgtttcagagtgtgcgcaagcgacacccgtgctggtatcgaagactccaagaagtgggggatgctgttcctggtcaaccagctcttcaagatttactttaagattaataaacttcatctctgtaagcccttgattcgagctatcgattcatcaaacctgaaagatgactatagcaccgcccagagggtcacttataaatattacgtgggcaggaaagccatgtttgacagtgattttaagcaggccgaggagtatcttagcttcgcatttgagcattgtcaccggtcctcacaaaagaataagcgtatgatactaatttacttgctgcctgtgaagatgctactgggccatatgcccacggtggaattactgaagaagtatcatttgatgcagtttgcagaagttacccgcgctgtctctgaaggaaacctactcctactgcacgaagcactggctaaacatgaggccttctttattagatgtggcatttttcttattctggagaagctgaagattattacctacagaaatttgttcaaaaaagtttacctgctgctgaaaacacaccaactaagcctggacgcctttcttgttgcacttaagttcatgcaggtagaggacgtggacatcgacgaagttcaatgcattcttgccaacctcatttatatgggccatgtcaagggatacatctctcatcaacatcagaaactcgtggtgtctaagcagaacccctttcctcccctctccacggtgtgttag

SEQ ID NO: 198792 - DNA, 1200 bp, synthetic construct
  misc_feature 1..1200: note = Description of Artificial Sequence: Synthetic coding sequence
  source 1..1200: mol_type = other DNA
atggcccacatcaccatcaaccagtacctgcagcaggtgtacgaggccattgattcaagggatggcgcgtcttgcgctgagctcgtatcattcaagcatccacatgtcgccaacccccgcctgcagatggcaagtcccgaggagaagtgtcaacaggtgcttgaaccgccatacgatgaaatgttcgctgctcacctgcggtgtacatatgccgtaggtaaccacgactttattgaggcatataagtgtcagaccgtgatcgtacaatcctttctgcgtgcttttcaggctcacaaggaggaaaactgggcgctaccagtgatgtatgccgtggcactagacttaagagtgttcgctaacaatgccgatcagcagctggtcaagaaaggaaaaagtaaggtaggtgatatgctggagaaggccgcagagctgctgatgtcctgcttcagggtgtgcgcctccgacacccgagccgggatcgaagacagtaagaaatggggcatgttgttcttggtcaaccagctctttaaaatctattttaagattaataagctacacctttgtaagcccctcattagggccatagatagttcgaacttgaaggatgattacagcaccgctcagcgggtaacctacaaatattacgtgggtagaaaggctatgtttgacagtgacttcaaacaagcagaagaatatctttccttcgcttttgagcattgtcacaggtcatcacagaaaaacaaaaggatgatactcatctatctgctgccggttaagatgctcctgggccacatgcctacagtggaactgctaaaaaaatatcacctcatgcaattcgccgaagttactcgtgctgtgtctgagggaaatctattgttgctgcacgaagcactcgccaagcacgaggcattcttcattcgatgtggtattttcctgatactggagaaactcaagattatcacgtatcgcaatctgtttaaaaaggtttacctgcttctgaaaacacaccagttatcactggatgcattcctggttgctctgaagttcatgcaggtcgaagatgtagatatagacgaagtgcaatgtatcctcgccaatctgatttacatgggtcacgtgaaggggtacatctcccatcagcatcagaagctggtagtatctaagcaaaacccatttcctcccctgtcaactgtctgctag

SEQ ID NO: 198793 - DNA, 1131 bp, synthetic construct
  misc_feature 1..1131: note = Description of Artificial Sequence: Synthetic coding sequence
  source 1..1131: mol_type = other DNA
atggcccacatcaccatcaaccagtacctgcagcaggtgtacgaggctattgactcccgggatggtgcttcctgcgccgaactcgtttccttcaagcacccccacgtggcaaaccctagactacagatggcgtctccggaagaaaagtgccagcaggtcctcgaacctccctacgacgaaatgtttgccgcccacttacgttgcacctacgctgtcgggaaccacgacttcattgaggcttacaagtgccagactgtgattgtgcagtaccctctgtccttcatggcggcagtagccgatcagcagctggttaagaagggaaaaagcaaggtgggagatatgctagagaaagctgcagagctgctgatgtcctgttttagagtctgtgcctccgatacacgtgcaggaatagaagatagcaagaaatggggcatgctctttctagtcaatcagctgttcaagatttattttaagattaacaagctccacctgtgcaagcctctgatccgagcgattgatagttcaaatctcaaggatgattactccaccgcccagcgagtgacctataagtactacgtagggagaaaggcgatgttcgacagcgattttaagcaggcagaggagtacttgtcttttgcatttgagcattgtcaccgatccagtcaaaagaataaaaggatgattcttatttacttgttaccagtgaagatgctattaggccacatgccaaccgtcgagctccttaagaagtatcatctcatgcagtttgctgaagtgactcgcgctgtgagcgagggcaaccttctgctgttgcacgaggcgcttgccaaacatgaggccttttttatccgctgcggcatttttttgatcctggagaagctcaaaattatcacttacagaaaccttttcaaaaaggtctacctgctgctgaaaacccatcagctaagtttggatgccttcttagtggccttgaagtttatgcaggtggaggatgtggacatcgacgaagtgcagtgcattttggccaatctaatatatatggggcacgtgaagggctatatcagtcaccagcatcagaagttggtagttagcaagcagaacccatttccccctctgagtaccgtatgctag

SEQ ID NO: 198794 - DNA, 1200 bp, synthetic construct
  misc_feature 1..1200: note = Description of Artificial Sequence: Synthetic coding sequence
  source 1..1200: mol_type = other DNA
atggcccacatcaccatcaaccagtacctgcagcaggtgtacgaggccatcgattcacgcgatggagcaagttgtgccgagctggtctctttcaaacatcctcatgttgccaaccctcgactgcaaatggcctcacctgaggagaaatgtcaacaagttttagagccaccctacgatgagatgttcgcagcgcacctacggtgcacgtatgccgtggggaatcatgattttatagaggcttacaaatgccagactgtgatcgttcagtcttttctccgagcctttcaggcccataaggaggaaaattgggccttgccggtgatgtacgctgtggcgcttgatttacgcgtctttgccaacaatgccgaccagcaactggtcaagaagggcaaatctaaggtgggagacatgctggagaaagcagcggagcttctgatgagctgcttccgtgtctgtgcaagcgatacgagggctgggatcgaggactccaaaaagtggggcatgctattcctggtgaaccagttgttcaagatatatttcaaaataaacaagctgcatctctgtaaacctttgattcgagccatcgacagttccaaccttaaggatgactactcaactgcgcaacgagttacctataaatattacgtaggtcgaaaggctatgtttgatagcgacttcaagcaagcggaagagtacctatcattcgcctttgagcactgtcaccgcagctctcagaaaaataaacggatgatcctcatctacctgctccccgttaagatgctcctgggacacatgcctaccgtagaactcctaaaaaaatatcacctgatgcagtttgccgaagtgaccagagctgtgtcggagggaaacttattgctcctacatgaagcgctggcaaagcacgaagctttcttcataaggtgtggaatttttctcatcctcgagaagcttaagattattacataccgtaacttattcaagaaagtctatctactgcttaagactcaccaattgagtctcgacgcctttctagtcgccctgaaatttatgcaggttgaagacgtggacatcgacgaagtgcagtgcattttggccaacctcatctatatgggccacgtgaagggttatattagtcaccagcatcagaagctcgtggtgagcaaacagaaccctttcccccctttatccaccgtgtgctag

SEQ ID NO: 198795 - DNA, 1200 bp, synthetic construct
  misc_feature 1..1200: note = Description of Artificial Sequence: Synthetic coding sequence
  source 1..1200: mol_type = other DNA
atggcccacatcaccatcaaccagtacctgcagcaggtgtacgaggccatcgattcccgggacggggccagctgtgccgaactcgtgtctttcaagcacccccacgtggcgaacccgaggctccagatggcgagtcctgaggagaaatgtcagcaggtccttgagcccccctacgacgagatgttcgccgcccatctgcggtgtacctacgctgtcggaaatcacgattttatcgaagcgtataaatgccagaccgtgatcgtgcagtccttcttaagggccttccaggctcataaagaggagaattgggcccttcctgtgatgtatgccgtggcactggatctgcgagtcttcgcaaacaatgccgatcaacagttagttaagaaaggcaaatcaaaagttggcgacatgttggagaaggcagcagagctgcttatgtcttgcttcagagtatgcgcgtccgatacaagagccgggattgaggactcaaagaagtggggcatgttgtttctcgttaatcagctgtttaagatctattttaagatcaacaagttacacctgtgcaaaccgttgattcgggcgatcgactcgtcaaacctcaaggatgactatagcacagctcagagggttacatacaagtattacgttggtagaaaggcgatgttcgatagtgattttaagcaggccgaagagtatttgtccttcgcttttgagcactgtcaccggagttctcagaaaaataagcgtatgatattaatctacctgctcccagtgaaaatgcttctggggcacatgcccaccgtcgagcttttgaaaaaataccacctgatgcagttcgctgaagttactagggctgtatctgaggggaatctgctcctgctgcacgaagcccttgctaaacacgaggccttcttcatcagatgtggcatctttttaatattggaaaaactcaagattatcacgtataggaatctcttcaagaaggtatatctcctgctaaagacccaccagctgtccttggatgcctttcttgttgccctcaaatttatgcaggtggaggatgtcgacatcgacgaggtgcaatgtatactcgccaatctgatttatatgggacacgtaaaagggtatatatctcaccagcaccaaaaattggtggtgtccaaacagaatccatttccacctctgtctactgtctgttag

SEQ ID NO: 198796 - DNA, 1194 bp, synthetic construct
  misc_feature 1..1194: note = Description of Artificial Sequence: Synthetic coding sequence
  source 1..1194: mol_type = other DNA
atgcggctgaccgacgtggtgcagcagctggtgtacgaggccatcgattcacgcgatggtgcatcttgcgccgagttagttagctttaaacatcctcatgtggctaaccctcgtctccagatggccagtccggaggagaagtgccagcaggtcctcgaacctccttatgacgagatgttcgcggcccatctccgctgcacctatgcagtgggtaaccatgacttcattgaggcgtataagtgccagacggtcattgtgcaaagtttcctgagagccttccaggcccacaaagaggagaattgggctcttcctgtgatgtacgctgtcgcactcgacctaagagtgtttgccaacaacgccgatcagcagctcgtgaaaaaaggcaaatctaaggtcggggatatgttggaaaaggccgccgagcttttgatgagctgttttagagtttgtgcaagcgatacccgggccggcatcgaggatagcaagaagtgggggatgctttttctggtaaaccaactgtttaagatatattttaagattaacaagttacacttatgcaaacccctcattagggccatcgatagctccaatttgaaagacgattattccacggctcagagagttacttacaagtactatgtaggacggaaagcgatgttcgattccgactttaagcaagcggaagaatatctatcatttgccttcgaacattgtcaccgctcatcacagaaaaataagcgtatgatcctgatttatctgctacctgtgaagatgttactgggccacatgccgaccgtggagctgctcaagaaataccacctgatgcagttcgctgaggtgacgcgcgctgtttcagagggcaatttactgctgcttcacgaggcactagctaaacacgaggctttttttataaggtgtggcatttttcttatattggaaaaactgaaaattataacctataggaacctgtttaagaaagtctatttactgcttaagacacatcaactttcgctggacgcttttctggtggccctgaagtttatgcaggtagaagatgtcgacatcgacgaagtgcagtgtatactagccaatctgatctatatgggccacgtgaaagggtatataagtcatcaacatcagaagctggttgttagcaaacagaacccctttcctccactttccactgtgtgctag

SEQ ID NO: 198797 - DNA, 546 bp, synthetic construct
  misc_feature 1..546: note = Description of Artificial Sequence: Synthetic coding sequence
  source 1..546: mol_type = other DNA
atgcccaagggcggccggaagggcggccacaagggccgggcccggcagtacacgtcaccggaggagattgatgctcagttacaagccgaaaaacagaaggcacgagaagaagaggagcagaaagaaggtggcgatggcgcagccggagatcccaagaaagaaaagaaatctcttgactcggacgagtccgaggacgaggaagacgattatcagcaaaagagaaagggtgtggaggggttgattgacattgagaacccaaaccgcgtggcccagactaccaagaaagtgacacagctggacctggacgggccgaaggaattgtctagaagagagcgcgaggaaatcgagaaacagaaagccaaagaaagatatatgaaaatgcacctcgccggaaagacagaacaggccaaggcggacctggctcggcttgctatcatccgaaagcaacgagaggaggctgcaagaaaaaaggaggaggagaggaaggccaaggacgacgcgactctgtccggcaaacgtatgcaatccttgtcactcaacaagtag

SEQ ID NO: 198798 - DNA, 1026 bp, synthetic construct
  misc_feature 1..1026: note = Description of Artificial Sequence: Synthetic coding sequence
  source 1..1026: mol_type = other DNA
atggtgagcagccagcccaagtacgacctgatccgggaggtgggcaggggaagttacggagtcgtgtacgaggccgtcatccggaaaacatctgctcgggttgcggtgaaaaaaatccgctgccacgccccggaaaatgtggagctagcgctgcgagagttctgggctctttcttccattaaaagtcagcatccaaatgtgatccacctcgaggagtgtattctgcagaaggatggaatggttcagaagatgtcccatggctctaactcctctctttacctccagttagtggaaacaagtctcaagggggaaatcgccttcgatcctcggtctgcttactacctctggtttgtgatggatttctgtgacgggggagatatgaatgagtacctccttagcagaaagccgaaccggaagactaatacttcctttatgttgcagctgtcttcagctttagcttttctgcataagaaccaaattattcaccgcgacctcaagcccgacaatatactaatctctcagactcgactggatacaagcgacctggagccaaccctcaaggtagccgactttggattgagtaaggtttgctccgcttcgggccagaacccagaggagccagtctctgtgaacaaatgctttttatccactgcttgcggaacagacttctacatggcccccgaagtgtgggaagggcactataccgctaaggccgacatcttcgccctaggaattatcatctgggcaatgttagaacggatcacctttattgataccgaaaccaaaaaagagctgttgggctcatacgtcaagcaaggtaccgaaatcgtgccagtcggtgaagcgctgttggaaaaccccaagatggaacttctcatccccgttaagaagaaatccatgaacggaaggatgaaacagttaataaaggaaatgctcgccgccaatccgcaggatcggccggatgcttttgagctggaactgaggcttgtgcagatcgccttcaaggacagctcatgggagacttag

SEQ ID NO: 198799 - DNA, 1026 bp, synthetic construct
  misc_feature 1..1026: note = Description of Artificial Sequence: Synthetic coding sequence
  source 1..1026: mol_type = other DNA
atggtgagcagccagcccaagtacgacctgatccgggaggtgggcagaggcagttacggtgtagtgtacgaggctgtaatacggaaaacctctgccagagttgcagtcaagaagatcaggtgccacgcccctgaaaacgtggaactggccctgcgggagttctgggccttgtcttccatcaagtcccagcacccaaatgttatccacctggaggagtgcattctacaaaaagacggtatggttcagaaaatgagccatggctcaaattcttcattgtatctccagctcgtcgaaaccagccttaagggagagattgcctttgatcccagatctgcctattatttgtggttcgtgatggatttctgcgacggaggcgatatgaacgagtacctgttgtcaaggaagccaaatcggaagacaaacacttcctttatgctgcagctgagcagcgccctggctttcctccacaagaatcagattattcacagagacttgaagcccgacaacatcctgatttctcagactagattagatacaagtgacctggagcctacgcttaaggtggccgatttcggtctatccaaagtgtgctcagcaagtggtcaaaatcctgaggagccagtttctgtcaacaaatgtttcttgtcaactgcctgtggcacagacttctacatggctccagaggtgtgggaggggcactatacagccaaggccgatatttttgctctagggatcataatctgggccatgctcgagagaatcacgtttattgacacggagaccaagaaggagcttctggggagctacgtgaagcaggggacagagatagttcctgtgggagaggcactgctagagaaccctaaaatggaattgttgattcccgtgaaaaagaaaagtatgaatggacgcatgaaacagcttattaaggaaatgctggcggccaacccgcaggacaggccagacgcattcgagctggagcttaggctggttcagattgctttcaaggatagttcctgggagacttag

SEQ ID NO: 198800 - DNA, 576 bp, synthetic construct
  misc_feature 1..576: note = Description of Artificial Sequence: Synthetic coding sequence
  source 1..576: mol_type = other DNA
atggtgagcagccagcccaagtacgacctgatccgggaggtgggcagaggatcctatggcgtggtctatgaagctgtgattcgaaaaacatcagcccgcgtggcagtcaagaagatcagatgccatgcacctgaaaacgtggagctagcgttacgcgaattttgggccctatctagtatcaaaagccagcatcctaacgtaattcacttggaagaatgcatcctccagaaggatgggatggtgcaaaaaatgtcccatgggtccaactcctcactatacctgcagctggtcgaaacgagtctcaaaggagaaattgctttcgatccccgatcagcttactacctttggttcgttatggacttttgtgacggcggtgatatgaatgaatacctactgagtcggaaacccaatcgcaaaaccaatacttctttcatgctgcagctgagttcagccctcgcatttttgcataagaatcagatcattcacagagatctgaagccagataacattctcatcagtcagacgagactcgatacatccgacttggaaccaaccttgaaagtcgccgatttctag

SEQ ID NO: 198801 - DNA, 4014 bp, synthetic construct
  misc_feature 1..4014: note = Description of Artificial Sequence: Synthetic coding sequence
  source 1..4014: mol_type = other DNA
atggacttcaccgcccagcccaagcccgccaccgccctgtgcggcgtagtgtcagccgacggaaagatcgcctacccgccaggggtcaaagagatcaccgacaagatcacaaccgacgaaatgattaagagactgaagatggtggtgaaaacctttatggacatggaccaggattccgaggacgaaaagcagcagtatctaccactcgcgttgcacctggcctccgaattctttctacggaaccctaacaaagatgtgcgattgttagtggcgtgttgcttggctgacatattcaggatttatgctcccgaggctccatatacctctcacgataaactgaaggatattttcctctttatcacccgacaactgaagggcctggaggacacgaaatcacctcagttcaatcgttatttctatctgctggagaatctggcctgggtcaagagttataacatttgttttgaactggaggattgtaatgaaatcttcatccaactctttagaactctcttttcggtcatcaataatagccataacaagaaggtccagatgcacatgctggaccttatgtccagtattattatggagggcgacggcgtgactcaggagctccttgatagcatcctgattaacctcatccctgctcataagaatctcaacaagcagagctttgatttagctaaggttctcctaaagaggacagtccagacaatagaggcgtgtatcgctaactttttcaatcaggtgctagtgcttggcaggtcatcagtgtctgatctttcagagcatgtctttgatctgattcaagaactgtttgccattgatccccatctgcttctttctgtgatgccccagctggagttcaagctcaagtctaatgacggagaagagcggttggccgtagtgcgccttttggccaagcttttcggcagcaaggactcggaccttgctacacagaacagacccctctggcagtgttttctaggccggtttaatgatatacacgtacctgtcaggctcgaatcggtcaagttcgccagccattgtctaatgaatcacccggacctcgcgaaggacttaactgagtaccttaaggttagaagtcatgatcctgaggaggctatcaggcatgatgtgatcgtgactataatcacggcagcgaagcgcgatctcgctttagtcaacgatcaactgttagggttcgtgagggaacggactctggacaagcgctggcgcgtacgcaaggaggcgatgatggggctcgctcagctgtacaagaagtactgtttacacggcgaagctggcaaggaggccgccgaaaaggtgtcttggattaaggataagctactgcatatttattaccaaaacagtatagatgacaagctgctggtggagaaaatttttgcccagtatctcgtaccccacaacctggagacggaagaaagaatgaaatgtctgtattacttatacgcatcattggatccgaatgctgtgaaagctctgaacgaaatgtggaagtgccagaatatgctaagatcacacgtacgagagttgttagatttgcataagcagcccacgtcagaagctaactgtagcgcaatgttcgggaaactgatgactatcgcaaagaatctccccgatcccggaaaagcccaggactttgtgaaaaaatttaatcaagtgctgggagacgacgagaaactgcgtagtcagctggaactgctgatctctcctacttgcagttgcaagcaggcagacatttgtgtgagagaaattgccaggaaactggctaatcctaagcaacctacgaacccttttttagagatggttaaattcctcctggagcggattgcccctgtgcatatagatagtgaggcaatatcggccctggtgaaattaatgaataagtccatagaggggaccgctgatgatgaggaggagggagtgagccccgataccgccattaggtctggcctggagctgttgaaagtgttgagcttcacacacccaacaagctttcattcagctgagacttacgaaagtctgctgcagtgcctcagaatggaggacgacaaggtggccgaggccgctatacagatcttccggaatactggccacaagatcgaaacagatctgccacagatacgctcaacactgattcctatcctccaccagaaggcaaagagaggcacaccacaccaagccaaacaggccgtgcactgcatccacgccatctttaccaataaggaggtccagctggcacagattttcgagcctctctccaggagcttgaatgcagatgtcccagagcaactcattacccccctggtgagtctcggacatatctccatgctggcccccgaccagttcgcatctccgatgaagtccgtggtggcaaatttcattgtgaaagaccttctgatgaacgaccgaagcactggtgaaaagaacggcaaactatggtcccctgacgaagaggtgagccctgaagtcctcgccaaggtacaggctattaaactgctagtacggtggcttctgggaatgaaaaataaccagtcaaagtccgctaactcgactttgagacttctatccgcgatgcttgtttctgagggcgatttgaccgaacaaaagcggataagcaagagcgacatgtctcgtctacgcctggccgccggatccgcaatcatgaagctagctcaggagccttgttatcacgagataatcacgcccgagcagtttcagctctgcgcactggtgattaatgacgagtgctaccaggttcgacaaatctttgctcagaagctacacaaggctctcgttaaactcctacttccacttgagtatatggcgatttttgcgctgtgtgccaaggaccccgtaaaggaacgacgggcacacgccagacaatgtttgctgaagaatatttctatacgcagagaatacattaagcagaaccccatggcaacagagaagctcttgtccctgctccccgagtacgttgtgccttacatgatccatttgctggcacacgacccagattttactcggagccaggatgtggaccagctgcgtgacatcaaagagtgtctctggtttatgctggaggtactgatgacaaaaaatgagaataactcccatgctttcatgaaaaaaatggcagagaatatcaagctgacccgagatgcccagtcccccgacgagagcaagacaaacgagaagctgtacaccgtttgtgacgtggccctctgtgttattaattccaaatccgcgctgtgcaatgcagactccccaaaggaccccgtacttccaatgaagttctttacccaacctgaaaaggacttttgcaatgacaaatcctacatatcagaggagacgagggttctgttactgactggtaaacccaaaccggcgggcgttctgggcgcagtaaataagcccctgtccgctacagggagaaagccttatgtccgaagtacaggtaccgagactggatcaaatatcaatgttaacagcgaactaaacccttctactgggaaccggtctcgggagcagtcaagtgaagccgcagaaaccggagttagcgaaaacgaggaaaatccagtgcggatcatctccgtcacacccgtgaagaatatcgatccagtgaagaacaaggagatcaactcagaccaggccacccaggggaatattagcagcgatcgtggaaagaaacgaactgtgacagccgccggtgccgagaacatccagcaaaagaccgatgaaaaagtggatgaaagtggtccgcccgctcccagtaaacctcggagggggaggcggcccaaaagtgagagtcagggaaacgccaccaagaatgatgatctcaacaaacccatcaacaaggggcggaagagggctgccgtaggtcaagaatcccctgggggcctcgaggcggggaatgccaaagcacctaaactacaggacctcgctaagaaggccgctcctgctgagcgccagattgacctacagcgatag

SEQ ID NO: 198802 - DNA, 1803 bp, synthetic construct
  misc_feature 1..1803: note = Description of Artificial Sequence: Synthetic coding sequence
  source 1..1803: mol_type = other DNA
atggacttcaccgcccagcccaagcccgccaccgccctgtgcggcgtggtgagcgccgatggcaagatagcctatcctccaggcgtgaaagagattacggataaaattaccacggatgagatgattaagaggttaaaaatggttgtgaagacctttatggatatggatcaggatagcgaggatgaaaaacagcagtatctccctttggcccttcacctggcttctgaattttttctgcgaaacccgaacaaagatgtgcgactcctagtggcctgttgcctggccgatatcttccgtatatacgctcctgaggcaccatacacgtcccatgacaaactcaaggacatcttcctcttcattacacgccagctgaaaggcttggaggacaccaaaagtccacaatttaaccgttacttctatctgctggagaaccttgcctgggtgaaatcgtacaatatttgttttgaactagaggattgtaacgaaatttttatccaactgttcagaactctttttagtgtcataaacaactctcacaacaagaaagtgcagatgcatatgctggatcttatgtcaagcatcatcatggagggcgatggtgtgacccaggagctcttagactccatcctgatcaaccttattcctgcccacaagaacctgaacaaacagagctttgatttagccaaagtgctccttaaaagaactgtgcagaccattgaggcctgtatcgctaactttttcaatcaggtcttggtcctgggcaggagctccgtaagcgacctttcagaacacgtgttcgatctgatccaggaactcttcgccatcgacccccacctcctgctgagtgtcatgccccaactcgagttcaaactgaaatccaatgatggcgaggaaagactcgctgttgtacgtttattggccaagttatttggcagcaaggacagcgacctggcaactcagaatcgccccctctggcagtgttttttggggcgattcaatgatatacacgtccccgtcagattagagtctgtgaagtttgcaagccactgcttgatgaatcaccctgatctggctaaggacctgaccgaatacctcaaggtccgcagtcacgatcccgaagaggctataagacacgacgtaattgtaactataataaccgcggcaaagcgcgatctcgccctggtgaacgaccagttactgggatttgtcagagagcgcactttggacaaaagatggagggtccgcaaggaagccatgatgggtcttgcacagttatataagaagtactgtctgcacggagaggcgggaaaagaggccgccgagaaggtctcctggatcaaggacaagttgttgcatatctactatcagaatagcattgacgacaagctgttggttgagaagattttcgctcagtatcttgtcccccacaacctcgagacagaggaaaggatgaagtgtctgtactacctgtacgcgtctctggatcctaacgccgtgaaggccctaaacgagatgtggaaatgtcaaaacatgctcaggtcgcacgtccgcgagctactcgacctgcacaagcagccaaccagcgaggctaactgctctgccatgtttgggaagttgatgactatcgccaagaacctgccggacccaggcaaagcacaggacttcgtgaagaagttcaaccaggtgctgggagatgacgaaaaattgcgcagtcagctggaactcctaatatcgccaacttgtagttgtaagcaggctgacatctgtgtcgttagcaaaagctacttcacattgtttctttag

SEQ ID NO: 198803 - DNA, 990 bp, synthetic construct
  misc_feature 1..990: note = Description of Artificial Sequence: Synthetic coding sequence
  source 1..990: mol_type = other DNA
atgaccacccagcagatcgacctgcagggccccggcccctggggcttccgcctagtgggtggcaaggactttgaacaacctctcgcgatttcaagagttacccccggctcaaaagcagctctcgctaacctgtgtataggggacgtcatcacggccatcgacggcgaaaatacatcaaacatgacgcacctggaggcccagaaccggattaaggggtgtaccgataacctgacattaacagttgcccggtctgagcataaggtctggagcccacttgttactgaggaagggaaaaggcacccttacaaaatgaatctcgcctccgagccccaggaagtgctgcatattggttcggcccacaatcgcagtgcgatgcccttcacagcctctccggcaagttccaccaccgccagggtgattacaaaccaatacaacaatccagctggcttgtactcttctgagaatatttctaactttaataatgccttggagagtaagacggcagcttctggcgtcgaagcaaactcgaggccactggaccatgctcaacccccatcctcccttgtgatcgacaaggagtcagaagtgtataaaatgctgcaagagaagcaagaactcaatgagcccccaaaacagtcaacttcctttctggttctgcaagaaatcctggagtctgaagaaaagggcgatcccaataagccaagcgggttccgctctgtgaaagcccctgttactaaggtggctgctagcatcggtaatgcccaaaaactgcctatgtgtgacaagtgtgggacgggaatcgtaggtgtttttgtcaagctcagggaccgacaccgccatcctgaatgttacgtgtgcactgattgcgggaccaacttgaaacagaaggggcatttttttgtggaagatcaaatctactgtgaaaagcacgcccgagaacgcgtgacccctccggaggggtacgaagtggttactgtcttcccaaagtag

SEQ ID NO: 198804 - DNA, 1101 bp, synthetic construct
  misc_feature 1..1101: note = Description of Artificial Sequence: Synthetic coding sequence
  source 1..1101: mol_type = other DNA
atggccctgaccgtggacgtggccggccccgccccctggggcttccggataacaggcggccgggattttcataccccaatcatggtgaccaaagtggcagaacgaggcaaagccaaggacgctgatttgagaccaggagacatcatcgtagcaatcaacggagaaagcgcagaagggatgctgcacgctgaggcacagagcaagatccggcagtcacccagcccacttcgactgcaattggaccggagtcaggccacctccccaggacagaccaatggggacagcagcctggaggtgcttgccacccgcttccagggatccgtcaggacctacactgagtcgcaatcaagcctgagaagcagttactcctcacctacatcgctctctcctcgcgccggctctcctttttcccccccacccagtagcagctccctcaccggagaggcagcgatttcaagaagcttccagtccctagcatgtagtcccggtctgcctgctgccgaccggctgagctactccggccggccgggaagcaggcaagctggcctggggcgcgccggcgactccgccgtgcttgttctgcctccatcccccggaccacgcagcagccggccttctatggattctgaaggagggtctctgctgctcgacgaggatagcgaggtattcaagatgctgcaggaaaatcgcgagggcagggctgcaccccggcagagcagttctttccgcctgctgcaagaggccctggaagctgaagagagaggggggaccccagcttttcttccttcatcgctgtccccgcagagctcactcccagcctcccgggcactggccactcctccaaagctgcacacctgtgaaaaatgttctacctctatagccaatcaggcagtgcgaatccaggaaggtagatacaggcatcccgggtgctacacatgtgcagattgcgggctgaatcttaagatgagaggccacttttgggaagatgcatgcgctatggagggcatgcgcctcagccttgaggctctggagggcatggtggagggcgcgaaacgtagagataggagaaaaacaagacggccaatccagccttcatggtag

SEQ ID NO: 198805 - DNA, 1809 bp, synthetic construct
  misc_feature 1..1809: note = Description of Artificial Sequence: Synthetic coding sequence
  source 1..1809: mol_type = other DNA
atgcggggcggccgggcccggcccgcctgggagagcttcatgggcctgccacctaggagtagcgccaagtggggggctgggcaatcactggacaggctctgctgtgccccgggctcaagaggtttggctggcgcaccaggacgcatgcgtgcccctccagctggaaggtctcagccagctgggggacccggagattcacttccccacccacctgggggcctgggcccgggaggctccgcgtgggctcggcgagccgaggccgcagcttctagggctcgaggcggtggccgtggcgggcccggtatcacttgggccgaggctggtcctggcgccccagggggattgtctcctgagagtggtcgcaggcagagagagcgctggaggctccctgccttcccgccttcaagggcatgggctccctctcgtacaggtgagaggcagcccggggagcgcgcgcacctcagactgtccgcccggccggcactgcctggagccggactgctatcagccccattgagtgcaaggaaccccggattggttagagggccagcaccctggagcctcgcaagtgccggagcgccgccccgcgcagccctgagtcctgccggggccctgctacttcagcctcccgcgcggagagtcttatgcccaagatcagagggcgggagtcgaactgggcgggccgggccgagcggctgggcgccacctcgcggtgccaggagcgcggagtctactgacaggctcaaaggcatggccttaacagtcgatgtggctggacccgctccatggggctttaggattactggcggacgtgacttccacacccctattatggtgaccaaagtggccgagagaggtaaagccaaggatgcagatttgcgacctggggatatcattgttgccattaatggggaatccgcagaggggatgctccatgccgaggcccagagcaagatacgacaatctcccagcccattaagactacagcttgaccggagccaggccactagcccaggccagactaacggagattcctctttggaggtgctggccacccggtttcaaggaagcgttcggacttacacggagagccagtcatccctgcggtcctcatacagctcacctacgtctctgtcccccagggctggcagccctttctcacctcctccttcatcttcaagtctgacgggcgaagcagccattagccgaagttttcagtcgctagcttgttcaccagggctgcccgcagcggataggttgagttatagtgggcggccaggtagccgccaggctggcttgggaagagccggggactctgcagttcttgtcctccccccatctccaggcccacgaagcagcaggcccagtatggacagcgaagggggatctttactgctcgacgaagactccgaggtctttaaaatgttgcaggaaaaccgagaaggcagggctgccccccggcagagttccagctttcggttattacaggaggctctggaggcggaggaacggggaggaacccccgcatttctcccaagcagtctgtcaccacagtcctctcttccagcgtctcgtgcgttagctacccctcccaaactgcacacgtgtgagaaatgttctacctctatcgcaaaccaggccgttcggattcaagagggcaggtataggcacccggggtgctatacttgcgccgattgcgggttgaacctcaagatgcgggggcatttctgggtcggggacgagctctactgtgagaagcacgcccgacagcgatattcagcccccgcgactttgtccagcagggcatag

SEQ ID NO: 198806 - DNA, 837 bp, synthetic construct
  misc_feature 1..837: note = Description of Artificial Sequence: Synthetic coding sequence
  source 1..837: mol_type = other DNA
atggccctgaccgtggacgtggccggccccgccccctggggcttccggatcacagggggcagagatttccacacgccaataatggtgacaaaagtggctgagcgggggaaagcgaaggacgcagaccttagacccggcgatatcatcgtagctatcaatggagagtccgccgagggcatgctgcatgccgaagcacagagtaaaattagacaaagtccgtcccctttacgactccagctggatcgctctcaggctacttccccaggacagacaaatggtgattccagtctggaggtgctggctaccaggttccagggtagtgtgcggacttataccgagtcccagtccagcctcagatcttcttacagctctcctacttcgctgagtccaagggctgggtcaccattttctccaccaccaagcagtagcagcctgaccggcgaggcagcaatcagcagatctttccagtcactcgcctgtagccccggattacctgctgccgatagactgtcatacagcggaaggcctgggagcagacaggcaggactgggacgggctggcgacagtgctgtgttggtgctgcctccaagtcctggacctagatcttcacggccgagcatggacagcgagggagggtcactgctgctggacgaggactccgaagttttcaaaatgttacaagagaatagagagggtagggcggctccccggcaatctagttctttccgcttgctgcaggaagccttagaggccgaagaaagagggaccaggttgtgtgccagccgcagagccggtactgctactccagctgctacaccagtgcccaccgtgggttag

SEQ ID NO: 198807 - DNA, 675 bp, synthetic construct
  misc_feature 1..675: note = Description of Artificial Sequence: Synthetic coding sequence
  source 1..675: mol_type = other DNA
atggccctgaccgtggacgtggccggccccgccccctggggcttcaggatcactgggggccgtgatttccacacaccaatcatggttacaaaggtcgctgagaggggcaaagccaaagatgcggatctgaggccaggggatataatcgtcgccattaatggagagtctgctgaaggcatgttacatgctgaagctcagagtaaaattagacagtcccccagtccgctcaggctgcagctcgatcgaagccaggccacaagccccgggcagacaaatggcgactcctctctcgaagtgctcgctactcgttttcaaggatcagtgaggacctatacagagtctcagtcatccctgcgatcatcatactcttcccccacaagcctgtccccaagagccggatccccgtttagcccaccaccaagcagctcttcgcttacaggcgaggctgcaatatcgcggagtcgacctagaccacgctggagattaggcggcgccggagccgctgcctttcccgggccctcctttttgcaggcccagcacggtttaggtcgcgggaaaccccccccaggacgcggccttggtagcctgcaggacgctgctgggaagagccgggggaccggtggacctccaacggtccagctgctgtccgctcttgctgggtctcccggtggttag

SEQ ID NO: 198808 - DNA, 1059 bp, synthetic construct
  misc_feature 1..1059: note = Description of Artificial Sequence: Synthetic coding sequence
  source 1..1059: mol_type = other DNA
atggccctgaccgtggacgtggccggccccgccccctggggcttccgaatcacaggcgggcgagacttccatactccaataatggtgacgaaggtagccgaaaggggcaaggctaaggacgcagaccttcggcctggtgacatcatcgtagccattaatggggagtcagcagaaggaatgctgcacgccgaggctcagtctaagatcagacagtctccgagccctctgcgcctacagctggacagatcccaggccaccagtcccgggcagaccaacggtgactcttcccttgaggtactcgcaactcgcttccaggggagcgttagaacatacaccgagagccagtcaagtctgcggtcatcatattccagccccacttctctgagtcccagggctggctcaccattcagcccacccccttcttcgagctcactgaccggggaggctgcgattagcagatctttccaaagcttagcgtgtagcccagggctgcctgcggcagatagactaagctacagcggtcggcctggaagtagacaggccggcctggggcgggcaggcgactccgccgtgttagttcttcccccctcaccggggccgcgatctagtagaccctccatggactccgaaggggggtcacttttgttggacgaagattccgaggtgttcaagatgctacaggaaaaccgcgagggccgagccgcgccaaggcagtcttcttcattcaggctcctacaagaggcgctcgaggccgaagagaggggcggtaccccagcctttctgccctccagcctaagccctcagtctagcctgcccgcctccagagctctggcgacacctccaaagctgcacacctgcgagaagtgctctaccagtattgccaaccaagccgtgagaatccaggaagggaggtaccgccatcccgggtgctatacttgcgcggactgcggtttaaacctcaagatgcgggggcatttttgggtaggcgatgagctgtactgcgagaaacacgcaagacagaggtactctgctcctgcaaccctgtcttcacgtgcttag

SEQ ID NO: 198809 - DNA, 1059 bp, synthetic construct
  misc_feature 1..1059: note = Description of Artificial Sequence: Synthetic coding sequence
  source 1..1059: mol_type = other DNA
atggccctgaccgtggacgtggccggccccgccccctggggcttccgcattacagggggaagagatttccacacgcccattatggtgactaaggttgccgagcggggtaaagctaaggatgctgatcttcgccccggagacatcatcgtggctataaatggcgagagcgccgaagggatgttgcatgcggaagcgcagagtaaaatacggcagtcacctagtcccctgcgactccagcttgatcgcagtcaggcaacttccccaggtcagacaaatggtgattcaagcttggaggtgcttgccacccgcttccagggatctgtgaggacatacactgaaagccagtcgagtctccgctcgagctatagctctcctacatccttaagccctagggccggtagccctttttcccctcctcctagttccagctcgctcacaggcgaggcagctatttcccgatctttccagtccctggcgtgcagcccaggcctgcctgccgcggacagactgtcctactcaggacggcctggctcccgacaggcgggcctgggcagagcaggagatagcgcagtgctggttctgccaccctcccctggtcctagaagcagtagaccctctatggatagcgaaggcgggtcccttctacttgacgaggactccgaagtgtttaaaatgttgcaagaaaacagagaaggccgcgccgccccgcgacagtctagtagcttccgcctgctgcaggaagccctggaggctgaggagcgaggcggcacgccagcgtttctccctagctccctgtctccgcagagctctctccctgcctcccgcgcccttgcgacccctccaaagcttcatacatgtgagaaatgtagtacctctattgcgaatcaggcagtccgtattcaggaggggagatatcggcatcctgggtgttacacgtgcgccgactgcggtctcaatctgaagatgcgcgggcacttctgggtaggggacgagctctactgtgagaaacacgcccggcagaggtattctgcacctgctaccctctctagccgagcttag

SEQ ID NO: 198810 - DNA, 837 bp, synthetic construct
  misc_feature 1..837: note = Description of Artificial Sequence: Synthetic coding sequence
  source 1..837: mol_type = other DNA
atggccctgaccgtggacgtggccggccccgccccctggggcttccgaatcaccggtggtcgggattttcacacgccaatcatggtgacaaaagtggctgaacggggcaaggccaaagatgccgatctgaggccgggcgatatcattgtcgcaatcaatggtgagtcagctgagggtatgctccatgccgaagctcaaagtaaaattcgacaaagcccctcacctttacggctccagttggataggtctcaggctacctctccagggcaaaccaatggggactcatctctagaggtgctagccacacgtttccaaggatcagtacggacatacactgaaagtcaaagtagcctgcgaagttcctactcgagccccacatccctgtctcctagggccggatctccattctccccccctccctccagctcttcgctgacaggtgaggctgccatctcccggagctttcagtctctggcatgctcccccgggctacctgcagctgacagactctcttactcgggccggcctggaagccgccaggctggattggggagagccggagatagtgcagtgctggtgctgccccccagccctggtcccaggagctcaagaccgagcatggacagtgaaggtggctcactgctcctagacgaggactccgaagtttttaaaatgctgcaggaaaaccgggaaggcagagccgcccccaggcaatcctccagcttcaggcttctgcaggaagcgttggaagcagaggagcgcggtacccgactgtgtgccagcagacgcgccggtacagcaacacccgctgcgactccagtccctaccgtggggtag

SEQ ID NO: 198811 - DNA, 1059 bp, synthetic construct
  misc_feature 1..1059: note = Description of Artificial Sequence: Synthetic coding sequence
  source 1..1059: mol_type = other DNA
atggccctgaccgtggacgtggccggccccgccccctggggcttcaggataactggtggacgggacttccatacccccattatggtcactaaagtcgctgaacggggaaaagctaaggatgccgatttgcgtcccggagatattatcgtggcaataaatggagagtctgcggaaggtatgctgcacgccgaggcccagtccaagatccgacaatcgcctagtcctctgcgcctgcaattggaccggtcccaggcaacatcgccaggacaaacaaacggcgacagcagcctggaagtgttggcgactcgttttcagggcagcgtcaggacttatacagagagccagtccagtctgcgttcctcgtacagctctcctaccagtctgagccctcgcgcgggatccccctttagcccaccacctagttcctcgagcctgaccggggaggctgctatctcgcgctctttccagtcactggcatgcagccctggactgcctgcggcagacaggctgagctactctgggcgccctggctcaagacaggctgggctaggtcgtgccggggactcagctgtattggtgctcccgccttccccggggcccagaagctcccgcccgtccatggattccgaaggtggaagcctcctactcgacgaagacagtgaagtgttcaaaatgctgcaagaaaaccgggagggtcgtgcagctcctcgccagagctcatcattcagacttttgcaggaggcccttgaggccgaagaaagggggggaacacccgcctttctgcccagttcactctcgccccaaagttccctccctgcttcaagggcgctggcaacaccacccaaactgcacacctgtgaaaaatgcagcacatccatcgctaaccaggcggtgcgcatacaggaaggacgctaccgtcatcccggatgttatacttgcgcagattgcggtctaaatctcaaaatgagaggccacttctgggtcggcgacgaactctactgtgagaaacacgccagacagcgctacagcgcgcccgccactctgagtagccgtgcctag

SEQ ID NO: 198812 - DNA, 1560 bp, synthetic construct
  misc_feature 1..1560: note = Description of Artificial Sequence: Synthetic coding sequence
  source 1..1560: mol_type = other DNA
atgaccagcaccttcaacccccgggagtgcaagctgagcaagcaggagggccagaactatggctttttcctccgcatcgagaaggacactgaggggcatcttgtaagggttgtagaaaagtgtagtcccgccgagaaggcaggtctgcaagatggagacagggttctaaggatcaacggagtgtttgtagacaaggaagaacacatgcaagttgtggacttggtgcgtaagtctggaaattcggtaacccttttagttttagacggggactcgtacgaaaaagcagttaagacccgggtagacttgaaagaactcggccaatcacaaaaggaacaggggctgtcagacaacatcctctctcccgtgatgaacggaggggtgcagacttggactcagccccggctgtgctacctggtgaaggagggtggtagttatggcttcagtctcaagaccgtacagggtaaaaaaggtgtttacatgaccgacatcaccccacagggagtggcaatgcgagccggggttctcgcagatgaccacctcattgaagttaacggagaaaacgtggaggacgctagtcatgaggaggtggtggaaaaggtcaagaaatcaggaagccgagtgatgtttctgcttgtggacaaggaaacagataagcggcatgtcgaacagaagattcaattcaagcgagagacagctagcttaaagcttctgccacatcagccgagaattgtggaaatgaagaagggaagtaatggttatggcttttacttaagagctggctccgagcagaagggccagatcatcaaagacatcgatagcggcagcccagcagaagaagcagggctgaagaacaacgatcttgttgtagctgtgaatggcgaaagcgtcgagacattagaccatgatagtgtcgtggaaatgatccgtaagggcggcgatcaaacgagcttactggtggttgacaaggaaactgataatatgtatagacttgcccacttttctccttttctgtactaccagtcgcaagaactgcccaatgggtcagttaaagaggcgccggcccccacacccacctcactggaggtctcatcccccccagacacaaccgaggaggtcgaccacaagccgaagttgtgtcggctcgcaaagggggaaaacggctacgggttccacctgaacgcgatcagaggcctgcctggatcctttattaaagaggtgcagaaaggcggacccgctgacctggcaggactggaggatgaagatgtgattattgaggtgaacggtgtaaacgtccttgacgagccctatgaaaaagtggtggaccgaattcagtcatctggaaaaaatgtgaccctcctggtgtgcggaaagaaagcctacgactacttccaagcaaagaagatacctattgtgagttctctggccgaccccctcgacacgccccctgactccaaagaggggattgtagttgagagcaaccatgacagtcacatggcaaaagagcgggcgcacagcacggcatcccactcgagctccaacagcgaggacacagagatgtag

SEQ ID NO: 198813 - DNA, 1560 bp, synthetic construct
  misc_feature 1..1560: note = Description of Artificial Sequence: Synthetic coding sequence
  source 1..1560: mol_type = other DNA
atgaccagcaccttcaacccccgggagtgcaagctgagcaagcaggagggtcagaattatggattcttcctgcggatagaaaaagacaccgagggccacctggtgagggtggtagagaagtgtagcccggctgagaaggcgggactacaagacggtgacagagtgttacggataaatggtgttttcgtcgacaaggaggaacatatgcaggtggtggatctggtcagaaagagcggaaactcagtgacacttctcgttctcgacggtgacagctatgaaaaggcagttaaaacacgggttgacctgaaggagttaggtcaatctcagaaagagcaggggctgagtgataacattcttagtcctgttatgaatggtggagtgcagacttggactcagccaaggctgtgctacctcgtgaaggagggagggtcttacggcttttccctcaagacagtgcagggtaagaagggggtgtatatgactgacattactccccagggtgtcgctatgagggcgggtgtcttggccgatgatcatctgattgaggtgaatggcgagaatgttgaagatgctagccatgaagaggtggtggaaaaggtgaaaaagtcagggagtcgtgtgatgtttcttctcgttgataaagagactgacaaacgtcacgtcgaacagaagatccaatttaagagagaaactgcttcgctgaaactgctcccacatcagccgagaattgtggaaatgaagaaaggcagtaacggttacggcttctacctgagagccggatcagagcagaaggggcaaatcattaaggatatcgatagcggaagccctgcagaagaggccgggctgaagaacaacgaccttgtcgtcgccgtcaatggcgaaagtgtagaaaccctggaccatgatagcgtcgtagagatgattagaaaggggggcgaccagacgagtctgctggtggtcgacaaagagactgataacatgtaccggctggcccatttttctcccttcctctattatcaatcccaggagctgcccaatggttctgtgaaggaagctcccgcaccgacaccgaccagtttggaggtgtcctctcctcctgacaccaccgaggaggtggatcataaacctaagctgtgcagactcgctaaaggagagaatggctatgggttccatctgaacgccatcagaggcctgccgggctcttttattaaggaagtgcaaaaaggcggtcctgcagatcttgcagggcttgaggatgaagacgtcatcattgaagttaacggggtaaatgtgctggatgaaccttatgagaaggtggttgatcgtattcagagtagtggcaaaaatgtcacattactcgtgtgtgggaagaaggcttacgactacttccaagccaagaaaatacccattgtttcctcattggcggacccactggatacaccgcctgactcaaaggaagggatcgtagtggagtctaaccacgatagtcatatggccaaggaaagagcccatagtactgcaagccatagctcctcaaattccgaagacactgagatgtag

SEQ ID NO: 198814 - DNA, 795 bp, synthetic construct
  misc_feature 1..795: note = Description of Artificial Sequence: Synthetic coding sequence
  source 1..795: mol_type = other DNA
atgaccagcaccttcaacccccgggagtgcaagctgagcaagcaggaaggccagaactatggcttttttttgcgcattgagaaggatactgagggtcacctcgtgcgcgttgtagaaaaatgttcacccgcagaaaaagccgggctacaggatggcgatagggtattgcggatcaacggcgtcttcgtcgacaaggaggagcacatgcaggttgttgacctcgtcagaaagagcggaaattcggtcaccctgctagttttggatggtgattcatacgaaaaggccgtgaagacgagagttgatctcaaagagctgggacagtcacagaaggaacaaggattgagcgacaacatactgtcccccgtcatgaatggcggggtccagacatggacacagccacggctctgctacctggttaaagaaggtggctcctatgggttcagtctcaagaccgtacagggtaagaagggggtatatatgactgatatcacccctcagggcgtggctatgcgcgccggggtactcgccgatgaccatctgattgaggttaatggcgagaacgtggaagacgctagccatgaggaagttgttgagaaagtcaaaaagagtgggtctagagtgatgtttttgctggtggacaaagagactgataaacgccacgtagagcagaagattcagtttaagagagaaaccgcatcactgaagttattaccccaccaacctcggatagtggaaatgaaaaaaggatcgaacggatacggattttacctgagggccgggagcgaacagaagtag

SEQ ID NO: 198815 - DNA, 1227 bp, synthetic construct
  misc_feature 1..1227: note = Description of Artificial Sequence: Synthetic coding sequence
  source 1..1227: mol_type = other DNA
atgaccagcaccttcaacccccgggagtgcaagctgagcaagcaggaaggtcagaattacggcttttttctccggatagaaaaggataccgaggggcatctcgtgagggttgtggaaaaatgctcaccagctgaaaaggctgggctccaggatggagatcgcgtcctgagaatcaacggggtgttcgtagataaggaagaacatatgcaggtagtggatctggtgaggaaatcaggaaactccgttactctcctggtcctggatggagactcgtacgagaaggccgtcaaaacccgcgtggacctcaaggagctgggtcaatcccagaaagaacaggggctgtccgacaacattttgtccccagtcatgaatggcggagtacagacatggactcaacctcgactgtgctatctcgtcaaggagggaggaagctatggcttctccctgaagaccgtgcaaggccaaatcatcaaagatatcgactccgggagcccagcagaagaagcgggcctgaaaaataacgacttggtggtagcagtaaatggcgagtctgtggagactctcgatcacgactctgttgtcgagatgattaggaaaggcggggaccagacatcactgttggtggtcgacaaggagactgacaatatgtaccggctggctcacttctccccttttctgtattatcagtcacaagaacttcccaacggttcagttaaggaagcaccagcacccacccccacatctctggaagtaagttccccacccgatactaccgaggaagtcgaccataaacctaaactgtgccgtctcgcaaagggcgagaacgggtatggctttcacctcaacgctatacgtggactaccaggcagctttatcaaagaggtacagaaaggaggacccgccgacctggccgggctggaagacgaggatgttatcatagaagtcaatggggtgaatgtcctggacgaaccttacgaaaaggtcgtggataggatacagtcttccggtaagaacgttaccctgctggtgtgtgggaaaaaagcgtatgattatttccaggcaaaaaaaatacctatagtttcctcactggcagatcccctggacacaccccccgactcaaaggagggtatcgtcgtggagtcaaatcatgattcccatatggccaaggagcgagcacacagcactgcctcccattcatcctccaactccgaagatacagagatgtag

SEQ ID NO: 198816 - DNA, 423 bp, synthetic construct
  misc_feature 1..423: note = Description of Artificial Sequence: Synthetic coding sequence
  source 1..423: mol_type = other DNA
atggacagccggatcccctacgacgactaccccgtggtgttcctgcctgcttacgaaaatcccccggcatggatccctccccatgaacgcgtgcatcacccagattataacaacgagctgacgcagtttctgccaaggaccataacactgaaaaaaccacccggagcgcagctgggctttaacatccggggcggcaaagcctctcaactgggaatttttataagtaaggttatcccagactccgacgctcaccgagccggcctccaagaaggtgaccaagttctcgccgtcaatgacgttgattttcaagatatcgaacatagcaaagccgtggaaattcttaagacagcacgcgagataagcatgcgagtgcgcttcttcccgtacaattatcatcgacagaaagagcgtacagtgcactag

SEQ ID NO: 198817 - DNA, 423 bp, synthetic construct
  misc_feature 1..423: note = Description of Artificial Sequence: Synthetic coding sequence
  source 1..423: mol_type = other DNA
atggacagccggatcccctacgacgactaccccgtggtgttcctgcctgcttatgagaaccctcctgcgtggattccccctcatgagcgcgtgcaccaccccgactacaacaatgagctgacccagttcctcccacggacgattaccctaaaaaaaccaccgggcgctcagctaggatttaatatccgaggcgggaaggcaagtcagctgggtattttcattagtaaggtgattcccgatagtgatgcgcatagggctgggctgcaagagggcgatcaagtgctggcagtgaatgatgttgacttccaggatatcgagcactcaaaagctgtagagatactcaagacggctagggagatcagcatgcgcgttcgttttttcccttacaattatcaccggcagaaggagcgtacagtgcactag

SEQ ID NO: 198818 - DNA, 8520 bp, synthetic construct
  misc_feature 1..8520: note = Description of Artificial Sequence: Synthetic coding sequence
  source 1..8520: mol_type = other DNA
atgcccatcacccaggacaacgccgtgctgcacctgcccctgctgtaccagtggctccagaactctcttcaggaggggggggacggtcctgagcagcgcctgtgccaggctgctatccaaaagctccaggagtacatccagctgaacttcgccgtggacgagagcacggttcctccggaccattcccctccagagatggagatatgcacagtctacttgacaaaagagttgggtgatacagagaccgtgggcctgagcttcgggaacattccggttttcggagactacggcgagaaaaggcgtgggggcaaaaaaagaaagactcaccagggtcccgtactggacgtggggtgcatctgggtcacggagctcagaaagaatagtccagctgggaaatcaggaaaggttaggctaagagacgagattctgtctctgaatgggcagctgatggtcggggttgacgtgtctggggccagttatctggccgagcagtgctggaacggtggatttatttaccttatcatgcttaggaggttcaaacacaaagctcactccacttacaatggcaattcttcaaactcatcggagcctggcgaaacccccacattggaactaggtgatagaacggctaaaaagggcaaaaggactcgaaagttcggggttatctccagaccgccagccaataaggccccagaggagtctaagggttccgctggatgcgaggtaagctccgatccgagcacagaactggagaacggaccagaccccgagctgggtaatggccatgtcttccagcttgagaacggccctgatagcctgaaggaagtcgctggcccacatctggaacgcagtgaagtggatcgcggcactgagcacagaatccccaaaactgacgccccgcttacaaccagcaatgacaaacgtcgtttttctaaggggggcaagacggactttcagagctcggattgcctggcccgcgaagaggtgggacgaatctggaaaatggagctgttaaaggagtcggatggactcgggattcaggttagcgggggtaggggttctaaacgttccccccatgccattgtggtgactcaggttaaagaggggggggccgcacaccgcgacggccgactgagtctaggcgacgagctcctggtgatcaacggtcaccttttagttggcttatctcatgaagaggcagtggcgatattgaggtccgccaccggcatggtccaactcgtcgtggccagtaaggagaatagtgctgaagaccttctgcgtttgacttctaaaagtctgccggacctcacaagttcagtggaggatgtgtctagctggacagataacgaggatcaggaagccgatggggaggaagatgaaggaacatccagttccgtccaaagagccatgccaggtaccgacgaaccccaggatgtgtgtggcgccgaggagagcaagggcaatttggagtctccaaagcagggaagtaacaaaatcaagctcaagtcccgcctttccggcggcgtccacagactggagagcgtggaggagtacaatgaactaatggtgaggaatggcgaccctaggatccgcatgttggaagtgagtcgcgacggcaggaaacattccttaccgcagctgttggactcatctagtgcaagtcaggagtatcacatcgtgaagaaatcaacccgcagcctgtctacaacccaggtggaatccccctggcggttaattcgcccatccgtcatctccattataggattatacaaggagaaaggtaaaggactcgggttttctatcgcaggaggcagagattgtatccgaggtcagatgggtatttttgtgaaaacaattttcccgaacggatctgctgccgaagatggtcgccttaaggaaggcgatgagatcttggatgtgaatggcatccctattaaggggctcacctttcaggaagctatccatactttcaaacagattagatccggactttttgtcctcacagtaagaacaaaactcgtatctccatctctaaccccttgtagcactccaactcatatgagcagatctgcctcccctaatttcaatacgagcgggggggcatccgctggggggagtgacgaaggatcctccagctccttaggcaggaagacaccaggacctaaggataggattgtgatggaggtgacattgaataaggaacccagggtggggctgggcataggcgcctgttgtctcgctctcgaaaactccccccccggaatttatatccacagccttgctcctggcagtgtggccaagatggaatctaacctctcccgcggcgaccagatcctggaggtaaattccgttaacgttagacatgccgcactgagtaaggtgcacgccatcctttccaagtgccctcccggacctgtgcggctggtgatcggccgccaccccaatcctaaagtatccgagcaggagatggacgaagtgatcgcacggtcaacttaccaggagagtaaggaggcaaactcgagcccaggtctcgggacgccccttaagtctccctcacttgccaaaaaggattccttgatatccgaaagcgaattatcacaatattttgcgcatgacgtcccgggccccttgagcgattttatggtggctggatcagaggatgaggatcaccccgggtccggatgtagcaccagcgaagagggcagcttgcctccatctacctctacccataaggagccaggcaaacccagggcgaattccctggttactctgggtagccatagggcatcagggctctttcataaacaggtcacagtggctcggcaggcgtctcttccagggtccccccaagctctaagaaaccccctgctgagacaaaggaaggtgggctgctatgatgccaatgacgcctcagatgaagaagaattcgacagagagggagattgtatttccctgccgggcgctcttcccggacccatccgtccgcttagcgaggacgaccctagacgcgtcagcatctcttcatctaagggaatggatgtgcacaatcaagaggagagacccaggaaaactttagtgtctaaggccatcagcgcaccccttctcggctccagcgtagacctagaggaaagtatacccgagggaatggttgacgcggccagctacgctgctaatttgaccgacagtgcagaagctcctaagggctcccccggatcatggtggaagaaggaactcagcggcagttcttcggcccctaaactcgaatacacagtcaggactgacactcagagcccaacgaatacaggctctccatcttccccacaacagaagtccgagggcttgggttcaagacaccgccctgttgctcgggttagcccccactgcaaacggagtgaggctgaggctaaaccctccgggtcccagaccgtgaatctaaccggtagagccaatgacccatgtgatctggactccagggtacaagctacatccgtcaaggtgaccgtggccggttttcagcctggcggcgctgtggaaaaagaatccctcggcaagcttacgactggcgatgcgtgtgtgtccacgagttgcgaactggccagcgccttgtctcacctagatgcttcacatcttactgaaaacctccctaaggctgccagtgaactgggtcagcaacccatgaccgaactcgactctagtagcgaccttattagtagccctggcaagaagggggcagcccaccctgatccctcaaaaacctccgtggataccggccaggtcagccgacctgagaacccaagtcagccagctagcccacgcgtgacaaagtgcaaggctcggtctcctgtgaggttgcctcatgagggctcaccctccccaggcgaaaaagccgctgcaccacctgattactccaagaccagatcggcatccgagacatctaccccacataatactcgacgggtggccgcactccgtggagctgggcccggcgccgaggggatgacaccagctggcgccgttttgcctggcgacccattaacctcccaggagcaacgccaaggggctccagggaaccattcgaaggcccttgaaatgacgggtattcacgctcctgagagctcacaagagccttctttactcgagggggcagatagcgtgagttcacgggctccacaggcttcccttagcatgcttccttctacagacaacacaaaagaagcatgtggacacgtcagtgggcactgctgtcccggaggttctcgtgagagtcctgtgaccgacatcgactccttcataaaggagcttgacgccagtgcagctaggagcccctcttctcagaccggagatagtggctctcaagaggggtcggctcagggacaccctcccgccggggcaggaggcggttcctcctgtcgcgctgagccagtgcctgggggccagacgagcagtccacgcagggcctgggcagcaggcgctcctgcctacccccagtgggcttcccagccttccgtgttggattcaatcaatcccgataaacatttcacagtcaacaaaaacttcctctctaactacagcagaaacttttcttccttccacgaagattccacttctctgtccgggttgggagattctacagaaccctccctcagtagcatgtatggcgatgctgaagatagctcctccgatcccgaatctctgacagaagcaccccgggcctccgcccgagacggatggagccctcccaggtctagggtatccctgcacaaagaggacccttcagagagtgaggaagagcaaatagagatttgtagcacacgaggctgtcccaatcctccatccagcccggctcatttgcctactcaggccgctatttgtcccgctagcgccaaggtgctgtctcttaaatatagcactccccgggagtccgtggctagcccaagggagaaagcagcctgcttgcccgggtcttacacaagcggacctgacagtagtcagccatccagccttcttgaaatgagctcccaggagcacgagacccatgccgatatctctacttctcagaaccacaggccaagctgcgcggaggagaccactgaggtaacctccgcaagctcagctatggagaattcacctctttctaaagtggccaggcactttcattctccccctatcattctctcatccccgaacatggtcaatggcctagagcatgatctgcttgacgacgagaccctgaatcagtacgagacctccataaacgccgcggcttccctctcttccttctcagtggatgtgcccaaaaatggggagagcgtcctggagaatctgcatattagtgaatctcaggatttggatgaccttttgcagaagcctaagatgattgctaggagaccaattatggcctggtttaaagaaattaataaacataatcaaggaactcacctgcggtctaagactgagaaggaacagcccctgatgcccgcccggtcccctgactccaaaatccaaatggtcagcagttcacagaaaaaaggggtgaccgtgccgcactcccccccgcagcccaaaaccaacctggaaaacaaggacttgtccaagaagtctccagcggagatgctccttacaaatggtcagaaagcaaaatgcggtcccaaactcaagcgactctccctgaaaggaaaggccaaagtgaacagtgaggcacctgctgccaatgctgtcaaggcaggcggaaccgaccatcggaagcccctcattagcccgcagaccagtcacaagactcttagtaaagccgtatcccagagattgcatgtcgccgatcatgaagatcctgacaggaataccactgccgcccctagatcaccacagtgcgtccttgagagcaaaccgccactggccacaagcggtccactgaagccctctgtgtccgacactagcatccgcacttttgtgagtccgcttacttcaccgaagcctgttcctgaacaaggcatgtggtcacgttttcacatggccgtgctgtcagagccggaccgcgggtgtcccacaacacctaaatcaccgaagtgtagagccgagggacgggccccccgggctgatagcggcccagtcagccccgcagcttcaaggaatggtatgagcgtggccggcaaccgccagagtgagcctcggctggccagtcatgtcgccgcagatacagcgcaacctaggccgacaggggagaagggcggcaatatcatggcaagcgatcgacttgaaagaaccaatcagttgaaaattgtcgaaatttccgccgaagctgtcagtgagaccgtgtgcggtaacaaaccagctgagtcagacagacgtggcgggtgcctggcccagggcaattgtcaagaaaagagcgagatccggctatatagacaggtcgcagagtcaagcacctctcatccttctagtctccccagccacgcgagtcaggccgaacaggagatgtctagatctttctctatggcaaagctcgcatctagcagttccagcctacagacagcaatacgcaaagcagaatactcccagggcaaatcaagcctgatgtccgattcccgcggcgtccctcggaattcaataccaggcggaccttcaggcgaagatcacctatacttcacccctagaccagcgacaaggacctattcaatgcccgcgcaattttcatctcacttcggccgcgaggggcatcctccccattctctggggcgctcccgggatagccaggtgcccgtcacctcaagtgtggtgcctgaggccaaggcatcccgcgggggcctgccaagcctggcgaacggacagggcatctactctgtcaaaccactactggacacatcccggaaccttccagcaactgacgaaggggatatcatatccgtgcaagagacctcatgccttgtgacagataagattaaagttacacgaagacactactgctatgaacaaaactggcctcatgagtcgaccagcttcttcagtgtaaaacagcgaattaagtccttcgaaaacctggcgaatgccgatagaccggtggccaagtcaggcgcctcgcccttcctgagcgtgagtagcaaaccccctattggaagacgctcatcaggctccatcgtaagcggcagcctcggacaccccggcgatgcagcggctcgcctgctacgtcggagtctgagctcgtgtagtgagaaccaatccgaggccggcacccttttgccacagatggccaagtctccaagtataatgaccctgacaatatcccgtcagaatccgcccgagacgagttccaagggatccgattctgaactgaaaaagtctctgggacctttgggaattcctacccccacaatgaccctggcctcgccagtgaagcgaaataagtccagcgttaggcatactcagccgtctcccgtctctcgatctaagctgcaggagctgcgcgccctgtcaatgcccgacctggataaactgtgctctgaagattacagtgccggtccctccgctgttctcttcaagaccgaactggaaattaccccgcggcgcagccccggacctccggcaggcggggtctcctgccccgagaaggggggaaacagagcctgtcccggtggctccgggcccaagacatctgccgccgagacaccctcgagcgcgtcggacaccggtgaagcagctcaggacctgccttttcgtagaagctggtccgtgaacctcgatcagctgctcgtgtctgcaggagaccaacagcggctgcaaagcgtgctctcatctgttgggtccaagtctaccattctgaccttgatacaggaagccaaggcccagtccgagaacgaggaagatgtgtgctttatcgtgcttaataggaaggaaggcagtgggctgggcttctcagtagccgggggaactgacgtcgagccaaagtccattactgtgcaccgggtgttttcacaaggggctgcatcgcaggagggcacgatgaacagaggggatttcctgctgtctgttaacggagctagtctcgcaggcctggcacacggtaatgtcctgaaggtgcttcaccaagcacaacttcataaggacgctctggtcgtgattaaaaaggggatggatcagcctaggccgagtgccagacaggagccacccacagccaacggcaagggcctgttatcaaggaaaaccatcccactggaacctggaattggaagaagtgttgctgtgcacgatgcactctgtgttgaggtgctcaagacttccgctggtctcggattgtctctggatgggggcaaatctagtgttacaggagatggccctctggtcattaagagggtgtacaaggggggagccgccgagcaggctgggataattgaggctggcgatgagattctggccataaatggtaagcctctggtgggactcatgcacttcgatgcctggaatatcatgaagagcgtgccagagggccccgtgcagctgcttatccgcaagcacagaaattcaagttag

SEQ ID NO: 198819 - DNA, 7923 bp, synthetic construct
  misc_feature 1..7923: note = Description of Artificial Sequence: Synthetic coding sequence
  source 1..7923: mol_type = other DNA
atgcccatcacccaggacaacgccgtgctgcacctgcccctgctgtatcaatggctgcagaactctctccaggaaggtggggatggccccgagcagagactgtgccaagcagctattcagaaactgcaggagtacatccagcttaattttgctgtcgacgagtctaccgtaccccccgaccatagccctccggagatggaaatatgtaccgtgtaccttacgaaggagcttggcgataccgagacagtgggcttgagtttcgggaatatccctgttttcggagattacggcgaaaaacgacggggcggaaagaagaggaaaacccatcaagggcctgtcttggacgtgggttgtatttgggtaaccgaactgagaaaaaacagccctgccgggaagtccggcaaggttcggctgagggacgaaattttgtccttgaacgggcaactcatggtcggggtggacgttagcggtgcctcatatctggccgagcagtgctggaacggaggtttcatctacttgataatgctgcgaaggtttaagcacaaggctcattcgacgtataacgggaacagctccaattcctccgaacccggagagacccctacccttgaactgggggacagaacggccaaaaaaggcaagagaactcggaaattcggcgtcatatctcggccccccgcaaacaaggcgcccgaggaatcaaaaggatcagcagggtgcgaagtcagctccgaccccagcacagaactggaaaacggtcccgacccagaattgggcaacggccatgtcttccagctggagaatgggcccgattcccttaaagaagtagccgggcctcacctcgaaagatcagaagttgacagaggaactgagcatcgcatcccaaaaaccgacgccccacttacaacaagcaacgacaagcgccggttcagcaagggcggtaaaaccgactttcagagctctgactgtttggcccgggaagaggtgggccggatctggaagatggagttgctgaaagagagcgacgggctgggcattcaggttagcggcggcagaggcagcaagaggtctcctcatgccattgtagtgacgcaagtgaaggaaggaggcgccgcccatagggagtatcatatagtgaaaaaatcaacccgctcgctgtctaccactcaggttgaaagcccttggaggctaatccgccccagcgtaatatctatcattggactttataaggagaaagggaagggattagggtttagcatagctggtggaagggattgcatccggggtcagatgggcatttttgtaaagaccatatttcccaatggtagcgcagccgaagatggaaggcttaaagaaggcgacgagatcctggacgtaaatggcataccaattaagggacttacattccaggaagcgatccacacatttaagcagatcagatccggtctgttcgtccttaccgtccgcacaaagctggtgagcccctcactgacaccatgctcaacaccgacccatatgtctcgctcagcaagtcctaactttaataccagtgggggagcctccgccgggggaagtgatgaaggctcatcctcaagcctagggcgaaaaacgcctgggcccaaggatagaattgtcatggaggtgacattaaataaggagcccagggtgggcctgggaattggcgcgtgctgcctggctctcgagaactcaccacctggcatatatattcattcacttgcacctggttcggtggctaagatggagagcaacctgagcaggggggaccagatcctggaggtgaatagcgttaacgtccggcacgccgctctctccaaagttcatgctatactcagtaaatgccccgtgtccgagcaggagatggatgaggtgatagctaggagcacttaccaggaaagcaaagaagctaatagcagtcccggcctgggaacgcccctgaagagcccaagcctggcgaagaaggacagcttaatctcagaaagcgagctgagccagtatttcgcacacgatgtgcccggccctcttagcgatttcatggtcgccggaagtgaagatgaggatcatcctggctcgggatgttcaacttctgaagagggctcattaccaccaagcacaagtaaggaaccgggcaaacctagagccaacagtcttgtgacactcggatcacaccgggctagcggcctgttccataagcaggtgacagtcgcgcgccaggcctccttgccagggtcgcctcaagcacttaggaacccactcctgaggcagcgcaaggtcggctgctatgatgccaatgatgcctccgatgaggaggagttcgatcgggaaggcgactgtatttcactccccggcgccctgccgggccctattcgcccgctgtccgaggatgatcccaggcgggtgtccatctccagctctaagggcatggatgtccacaaccaggaggagagaccgcggaaaacacttgtgtctaaggccatctccgccccgctgctggggagtagcgtggatcttgaggaaagcatcccggaaggcatggtcgacgcagcgtcctatgctgccaacctgacagacagtgctgaagcacccaaaggctcgccaggatcgtggtggaaaaaagaactgtctggctcctccagtgcgccgaaattggagtacaccgttcggaccgatactcagagcccaaccaataccgggtcgcccagctccccacagcagaaatccgagggactggggtctaggcatagacctgttgcgcgggtgagcccccactgtaagcggtctgaggccgaagccaaaccatccggttcccagacggtgaatctgaccgggagagctaacgatccttgcgatctggattcaagggtgcaagccacctccgtcaaagtgactgtcgcagggtttcagcctgggggtgcagtggaaaagctctgccaagaaagcctcggaaagctcactacaggagacgcctgcgtgtctactagctgcgaactggcaagtgccctctcccaccttgatgcctcacacctaaccgagaacttgccaaaggcagcttccgagcttgggcagcagcccatgactgcatcggacctcatttcctctcccggtaagaagggcgccgcacacccagatccctccaagacctcagttgatacggggcaggtgtctcgcccagaaaatccttcccaacctgcatctcctcgcgtgaccaagtgtaaggccagatctcccgtcagactacctcacgaggggtccccctctccaggcgaaaaggccgcagctccacccgattacagcaagacacggtctgcctctgagacgtccacccctcataacactagacgggttgccgcgctgaggggcgctggcccaggtgcggaggggatgacacccgccggggcagtactacccggcgaccctctcacctcccaagagcagcggcaaggcgcccccggaaatcacagcaaggcactcgagatgacaggaattcatgcccctgagtcatctcaagagccctccctactggagggggccgatagcgttagttctcgggccccccaggctagtcttagcatgttaccaagcacagataatacaaaggaggcatgcggacatgtgagcgggcactgctgcccaggcggttcaagagagtccccagtgactgatattgactccttcattaaagaattggacgctagtgctgctagaagcccgtcttctcagacaggtgactctggtagccaggagggctctgcacaggggcaccctcccgccggtgccggcgggggatccagttgtcgggctgagccagtacccggaggacagaccagctcccctagacgtgcctgggctgccggagcccccgcctacccccagtgggcaagccagccttccgtcctcgactcgatcaaccctgacaaacacttcaccgtcaacaagaacttcctgtcaaattactcaagaaacttcagcagctttcacgaggattcaacctccctctcaggcctgggcgattccacagaaccctctctgagcagtatgtacggagatgccgaagatagctcttccgaccccgaaagcttaacagaagcacctcgtgcttctgcacgcgatggctggtctcctccgcgctcccgggtgagcctgcacaaagaggacccaagcgagtcagaagaagaacaaatcgaaatttgcagtacacgggggtgtccaaatcctcccagctccccagcacatctgcccacgcaggcagcgatttgtcccgccagcgccaaagtgctgtccctgaagtacagcacccctcgcgagtccgtggcaagcccacgagaaaaggctgcgtgtctccctgggtcgtacacctcaggccctgattcttcccagcctagcagcctcttggagatgtcatcccaggagcacgagactcatgccgatatctcaacttctcagaaccaccgcccttcctgtgccgaagaaactacagaggttaccagtgcaagctcggcaatggaaaattcaccgctctcaaaggtggctcgccacttccactctccacccatcatcttatccagccccaatatggtaaacggcctcgaacacgacctccttgacgatgaaactctcaatcaatatgagacaagtattaacgccgcggcctcgctctcctccttttccgtcgacgtacctaaaaatggagagtcagtgctagaaaatttgcacatttcagagtctcaggaccttgatgatttgctgcagaagcccaagatgatcgcaaggcgacccatcatggcctggttcaaggaaattaacaagcataatcagggcactcaccttaggagcaagaccgagaaggagcagccactgatgcccgctcgctccccagatagcaagatacagatggtatcctcgtctcagaagaaaggggtcactgtcccgcactcccccccacagccgaagacgaacctggaaaataaggatctgtcaaaaaagtcacccgccgaaatgctcctgactaacggacagaaagcgaagtgcggcccaaaattgaagagactgtctctgaaaggcaaagcaaaagtgaactccgaggctcccgccgccaacgcggttaaggctggcggtacggaccacagaaagccgctcatctcaccccagacaagccacaaaacactatccaaggccgtgagtcagaggctgcatgtggcagaccacgaagacccagataggaacaccacggctgcaccgagatccccacagtgtgtgcttgagtccaagcctcccctggccactagtgggcctctgaaaccgtccgtgagtgatacttccatcaggactttcgtatcccctctgactagtccaaagccagtgccagaacagggaatgtggtccaggtttcacatggccgtgctgtcagaacctgaccggggttgccctactacacccaagtcaccgaaatgccgggcggaaggaagagcccctagagctgactctgggccagtgagtcccgctgccagccgtaatggtatgtccgttgcagggaaccgccagtcggaacctcggctcgcgtcccatgttgcggccgacacggcgcagccccggcctacaggggagaagggtggcaacataatggcttccgaccgcctggagcggacaaaccagctaaagatagtagagatctctgcggaagccgtgagtgagacagtgtgtggaaacaagcccgcagaaagcgataggaggggtggatgtctagcgcagggcaactgccaggagaaaagtgagattaggctgtaccggcaggtggcagagagttctactagtcacccctccagcctgcccagtcatgcctcgcaggcagagcaggaaatgagccgcagcttttccatggcgaaactggcaagctcaagctcctcattacagactgccattaggaaagccgagtatagtcaaggcaagagctccctgatgtctgacagcagaggagtgcctcgcaactcaattccgggcgggcctagcggggaggatcacctctattttactcctagaccggccacacgtacttatagcatgccagcacaattctcatctcatttcggcagggaaggccatcccccacactccctgggccgcagcagggattcccaggtgccggttacctcttccgtcgtccctgaggccaaagcaagtcggggcgggcttccttccctggcgaacggccaaggcatctattctgtaaaacccctgttggataccagccgaaacctgccggcgacagacgaaggcgatatcatctccgtgcaagaaacaagctgcctcgtgacagataagattaaagtcacgcgacgccattattgctacgagcagaactggccacacgaatcaacctcttttttctctgttaagcaaaggattaaatcctttgagaatcttgccaacgccgacagacctgtcgccaagagtggcgctagcccctttctgtccgtgtcctcaaagcctcctatcggtaggcggtcaagcggatcgattgtgagtggatcactaggccaccccggggacgcagccgctagacttttacggaggtcgctaagctcttgctccgaaaaccagtccgaagcagggactctgctacctcagatggcaaaatcaccgtcaatcatgaccctaacaatctctagacaaaacccaccagagacgtcttccaagggatctgacagcgagttgaaaaagtccctgggacctctgggcatcccaacccccacaatgacccttgcctctccagtgaaaagaaataagtcgagtgtgcgccatacccagcctagccccgtgtctcgatcaaaactgcaagaactgcgtgcactttctatgccggacctggacaagttgtgctccgaagactattccgccgggcctagcgccgtattgttcaagaccgaattggagatcacaccaagacgttctcctggcccccctgctggcggggtcagctgtcccgaaaaaggggggaacagagcctgccccgggggttctgggccgaagacaagcgccgctgaaacaccctcctcggctagcgacaccggcgaagccgctcaagatcttccttttagacggagctggagcgtgaatctggaccagttgttggttagtgccggtgaccagcagcgcctccagtcagtgctttcgagtgtgggctccaaaagcaccatcttgacccttattcaggaagccaaggcccaatccgagaacgaggaggacgtgtgcttcatcgtgttgaaccgcaaagaaggatccggactggggtttagcgtggcgggaggaactgacgtcgagcccaaatctattaccgtccacagggtctttagccaaggcgcagcatcccaggaggggacgatgaacagaggcgattttctcctctcagtgaacggagcatcactagccggactggcccacggcaacgtactgaaagtgctgcaccaggcacaactgcataaagatgcactcgtggtcataaagaagggcatggaccaaccccggccatctgcccgccaagagccgcccactgctaatggaaaaggactgctgtctagaaaaactattcctctcgaacctgggatcggccgctcggttgcggtccacgatgccctgtgcgtagaggtactgaagacaagcgctggattgggtctctcattggacggaggcaagtcctccgtcaccggcgacggccctctcgtgatcaagcgcgtgtataaaggaggagcagctgaacaggccggtatcattgaggcgggtgacgaaatcctcgccatcaacggcaaaccgctcgtggggctgatgcactttgacgcgtggaacattatgaaaagcgtaccagagggccccgtgcagcttctgattcggaaacataggaattccagctag

SEQ ID NO: 198820 - DNA, 8520 bp, synthetic construct
  misc_feature 1..8520: note = Description of Artificial Sequence: Synthetic coding sequence
  source 1..8520: mol_type = other DNA
atgcccatcacccaggacaacgccgtgctgcacctgcccctgctgtaccaatggctgcagaattccctgcaagaggggggtgatggtcccgaacagagactttgtcaggctgcgatccagaaacttcaggaatacatccagctgaactttgctgtggatgagtcgaccgtgcctccggatcactcacctcctgagatggaaatatgtactgtctacctgaccaaggagttgggcgacactgagaccgttggactaagcttcggcaacatcccagtttttggcgactatggggaaaagcggagaggcgggaaaaagcgcaagactcatcagggccctgttctggatgtcggttgcatctgggtcacggagctgagaaaaaactcccccgcgggaaagtcgggcaaggtaaggttaagggacgagatcctgtcgctgaacgggcagctcatggtaggagtggatgtctcaggagctagttatctggccgaacagtgttggaacggaggcttcatctatttgattatgctgcgtagattcaagcacaaagctcattccacatacaatggaaactcctctaactcatcagagcccggagaaacccccactttagagctgggtgatagaacagctaaaaaggggaaaaggacccgtaagtttggtgtgataagccgtcccccagccaataaagccccggaggagagcaaaggatctgcgggctgtgaagtgagcagcgacccaagcacagagctagagaacggacctgacccggaactgggtaatggccatgtcttccagttagaaaacggccccgactcattgaaggaagtcgctggacctcatctcgaaaggtctgaagtcgatcggggcactgagcaccgaatcccgaagaccgacgcccccctaaccacaagcaatgacaagcgccgtttctccaagggaggcaagaccgactttcaaagctctgactgtcttgccagggaggaagttggccgtatttggaagatggagctgctgaaagagtccgatggcctgggaatacaagtttcaggcggccgcggctctaaaagatcaccgcatgctattgttgtcacccaggtgaaggagggtggggcagcccaccgtgatggacgtttgagcctgggcgacgagctgcttgtgattaacggccacctcctcgttggcctctcacacgaagaggcagttgcaattctgcgctccgcaacgggcatggtgcaactggtcgtcgcctctaaagaaaactctgctgaggacctgctcagactcacttctaagagcttacccgatctgacctcttcagtggaggatgtctccagctggaccgataacgaggaccaggaagcagacggggaagaggacgagggaacttcatcttctgtgcagcgggctatgccaggtacggacgaaccccaggatgtttgcggtgctgaggagagcaaagggaatctcgaaagtccgaaacaggggtccaacaagatcaagctgaaatccagactttccggtggagtccaccggctggagagcgttgaggaatataatgagctgatggtacgcaacggggatccgcggatccgtatgttagaggtttcgcgcgacggtcggaagcattccctccctcaactgctcgattcctcctcagcgagccaggagtatcacatagtgaagaaatccacacgttctttaagcacaacccaggtcgaatcgccttggcggctgattaggccgtctgtaattagtatcattgggttatataaggaaaagggcaagggcttgggttttagcattgccggggggcgcgattgcatccggggacagatggggatctttgttaagacgatcttcccaaacgggtcagctgctgaagacggtaggctgaaagaaggagacgagattctggatgttaacgggatccccatcaagggcctgaccttccaggaagcaatacacaccttcaaacagattaggtcagggctgttcgtcctcactgtccggactaaacttgtcagtcccagcctgactccttgtagcacgcctacccacatgagcagaagtgcctctccaaatttcaacactagcggaggggcctctgctggcggatctgacgaagggagctcgtccagcctgggccgcaaaacccccggcccaaaggatcgaatcgtcatggaggtgacccttaataaagagccccgagtggggcttggcatcggcgcttgttgcttggccctggaaaactccccgcctggtatttatatccattccctggcgccaggatctgtagccaaaatggagagcaacctctctcgcggggaccagattctggaagtgaactctgtgaacgtgaggcacgcagccctatctaaagtacatgcaattctctccaagtgtcccccgggtcctgtccggctggttatcggtcgacatccaaatcctaaagtgtcggagcaggagatggacgaggtgattgcacggtccacttatcaggagtctaaggaggccaacagcagccctgggctcggtacccccctgaaatccccctcactcgctaagaaggacagccttatcagcgagtctgagttgtcccagtatttcgcccatgacgtgcctgggccgctttccgattttatggtggccgggtcagaagatgaagatcatcccggctctgggtgttcaacatctgaagaaggatctcttccgccctcgacatcaacccataaggaacccggaaaaccccgtgccaattccctagttacgctggggtctcatcgggctagcggactgttccataagcaggtcactgtggctcggcaagccagtctgccagggtcccctcaggccctgcgtaatcccctcttgcgacagaggaaggtagggtgctacgatgctaatgacgcatcagacgaggaggagtttgatcgggagggtgattgtatctctctgccaggggccctgccaggcccaattcgtcccctgagtgaagacgatcccagaagggtcagcatcagtagctctaaggggatggatgtgcacaaccaggaagaacgcccacggaagaccctcgtttccaaagcaatcagcgcgcccctactgggatcatccgtagacctcgaggaatctatccctgaaggcatggtcgatgcggcatcatatgccgctaacctgaccgatagtgccgaggctcctaagggatctccaggaagctggtggaagaaggagctgagcggtagcagctcagccccaaagttggaatatactgtaagaaccgacacccaaagtccgacaaatactggcagcccctcatctccacagcaaaagagcgaaggacttggttcccgtcacagaccggtagcccgagtcagcccccactgtaaacggagtgaggcggaggcgaagccctccggttctcagacagtaaacttgaccggtcgcgcgaacgatccatgtgacttagatagtagggtacaagccacatctgtcaaagtgaccgtcgcggggttccagcccggcggagctgttgagaaagaatctctagggaaactgacaaccggggacgcttgcgtgagcacaagttgtgagctcgcttccgcactctctcacctcgacgcctcacacctgaccgagaatttacctaaagccgcctctgaacttggccagcagccgatgactgagctggatagcagctctgatctgatatcttcacctggcaagaaaggagcagcgcatcccgacccaagcaagacgtcagtcgatactggccaggtaagcaggcccgaaaacccgtcccaacccgcttcaccgagagttactaagtgcaaggcacggagccctgtgcgcctcccacatgaaggttctccatcccccggagagaaagctgctgccccaccagactattctaaaacacgaagcgcttcagaaacttctaccccacataacactagacgtgtcgctgccctcaggggcgccggtccaggcgccgaagggatgactccagctggagctgtactgccgggtgacccactgacgagtcaagagcaacgccagggtgcgcccgggaatcacagcaaagcgctggaaatgaccggtatccatgctcccgaatccagtcaggagccttcgttactggagggcgctgacagtgtgagctcccgagctccgcaagcctcactgtcgatgctgccttccacagataacacaaaggaggcctgcgggcatgtgtcaggccactgttgcccgggaggctcccgagagagcccggtgacagatatcgactctttcatcaaggaactggacgcctctgccgcccgctctccatcgtcccaaacgggggactcaggttcccaggagggctctgctcagggacatcctcccgccggagcaggcggaggaagctcctgccgggccgaaccagtacccggaggacaaacatctagcccgcgacgggcatgggctgctggcgcccccgcttatcctcagtgggcatcgcagcctagtgtcctagattccatcaatccggataagcattttacagtgaacaagaatttcctttccaactactcccgtaacttcagctcatttcacgaggactctacgtccctgagcggtttaggcgactctacagagccctccctgtccagtatgtacggtgatgccgaggattcatcaagcgaccccgagagcctgaccgaggcacctcgcgcctctgctcgtgatggctggagcccgccccgctccagggtatccctgcataaggaggacccctcggagagtgaggaggaacagatcgagatttgctccacccggggctgtccaaatccccctagtagtcctgctcaccttcccacacaggctgccatctgtccggccagtgcaaaagttttatctcttaaatattcgactcctcgtgagtccgtggcctcacctagggaaaaagcagcctgtcttccgggctcctatacttccggcccggacagttcccagccctcatccctgctcgagatgtcttcccaggaacacgaaacacacgctgacatcagcactagtcaaaaccatcggcctagctgtgcagaagaaactacagaggtgacctctgcctctagcgccatggagaatagccctcttagtaaagtcgcccggcattttcacagcccacccattattttgtcatctcccaacatggtgaatggccttgaacatgatctgctggacgatgagacgctgaaccagtacgaaacaagtatcaatgcagctgcaagcctatcctctttttccgttgacgtcccaaaaaacggagagtcagtgcttgaaaatttgcatatttcagagtcacaagacctggacgaccttttgcagaaacctaaaatgattgcgaggaggccgataatggcctggttcaaggagattaacaagcataaccagggcactcacctcagatcaaaaacggaaaaggaacagccactgatgccggcccggagtccagactcaaaaattcagatggtgtccagcagccagaagaaaggagttaccgtcccccactcccccccccagcctaagaccaacctcgaaaacaaagatctgagcaaaaaatccccggccgaaatgctgctgactaatgggcagaaagctaagtgcgggccgaagctgaagaggctgtcactgaagggtaaagccaaggtgaattctgaggctcccgcagccaatgccgtcaaggcagggggaacagatcatcggaaacctctgatctccccccagacaagccataaaaccctgagcaaggccgtgagccagcggctgcatgtagcggatcacgaagaccctgatcgaaacacaactgcagcacctaggtccccccagtgtgtgttagaaagtaaacctcccttggccacttccggccctttgaaaccatccgtgtccgacacctcaattagaacttttgtctccccactgacctccccaaaacctgtccccgaacagggaatgtggtccaggtttcacatggcagtgctgagtgagcctgataggggctgcccgaccacccccaagtcacctaagtgtagagcggagggcagagccccccgtgcagatagcggacccgtgtccccagctgcatctcggaatgggatgtcggtcgcaggtaatagacaatcagaaccccgtttggctagccatgtggcagctgacacagctcagccaagaccaaccggcgagaaaggcggaaatattatggcatcagatagattggagcggaccaaccagcttaagatcgtggaaattagcgcggaagctgtttctgagacggtctgtgggaacaaaccagccgagtccgaccggcgcggcgggtgtctggcccagggaaactgtcaggaaaagtcagaaattaggttgtaccgacaggttgccgagtcgagtacaagtcacccctcatccctgccctcacatgcctcacaggcagagcaagaaatgtcgagatccttttccatggcaaagcttgctagctcatcctcatccctccagacggctatcagaaaggcagagtatagtcagggtaaatcctcactcatgtccgatagcagaggtgttccaagaaacagtatccctgggggccccagtggggaggatcacctgtattttacgccccgacctgcaacacggacctattccatgcccgcacagttttcgagccacttcgggagggagggacatccaccgcattctcttggcagatcccgggactcccaagtgcccgtgacctcgtctgtcgtgcctgaggctaaagccagtagaggcggcttaccctctctggcgaatgggcagggcatttactctgtgaagcctctactggacacctcccgcaacctgcccgccacagatgagggtgacataatatccgtccaagagacctcatgtcttgttaccgataagatcaaggtcacgagacgccattattgctatgaacagaactggccacacgaaagcacgtcttttttctccgtgaagcaaaggattaaatctttcgagaatctggcaaatgcagacagacccgtggccaaatccggagcctcaccattcctctccgtgtctagcaagcctcccattgggcgcaggagctccggaagcattgtgagtgggtcgctgggccatccaggagacgcggcagcacggctgctgcgccgatcgcttagctcctgttccgagaatcagtcggaggcgggcacactgctgccgcagatggcgaaatccccatccataatgacccttaccatttctcggcaaaacccacccgagacctcctcgaaaggatcagattccgaattaaaaaagagccttggcccgctcggtatccctacccctaccatgacccttgcaagccccgtgaagaggaacaaatcctcagtgcgccacacacagccatcaccagtgtcccggtctaagctgcaggagctgagggcactttcgatgcctgacctggacaagctctgcagcgaagattactccgctggcccaagtgctgtcttgtttaagaccgagttggagattacccccaggcgttcacctggcccgcccgcagggggggtgagctgtcccgagaaaggagggaatcgcgcgtgtcctgggggtagcggtcccaaaacgagcgctgctgagaccccctcttcagcctcggacaccggagaggcagcacaggacctgccgtttaggcgcagctggagtgttaatctagaccagctactcgtatcagcaggggaccagcagagactgcagagcgttctcagcagcgtgggaagtaagtctaccattctcacgctgattcaggaagcaaaagcacagtctgaaaatgaagaggatgtctgcttcattgtgttgaatcgcaaggagggaagcgggttggggttcagcgtggctggagggacggacgttgagcccaaatctattacagttcaccgagtgtttagccagggagccgcctctcaggaaggcacaatgaaccgtggcgatttcctactgtctgtcaatggcgcctctctcgcaggcctcgctcacggcaatgtactcaaggtgctccatcaggcacagctccacaaggacgctctagtggtgatcaaaaaagggatggatcaaccccggccctccgccagacaagaaccccccacggctaatgggaagggactcctgagtaggaaaactatcccattggagcctggcattggcagatcagtggcagttcacgatgcgctgtgtgttgaagtgctcaagacgtccgcagggctgggcctctccctggatggtgggaaatcatctgttacgggcgatggtcccctcgtgattaagagagtgtataagggaggggctgccgaacaggccgggattatcgaggccggcgacgaaattcttgcaatcaatggcaagccactagttggactcatgcattttgacgcttggaacatcatgaaatccgtgcccgaagggccagtacagttactcatcagaaaacatcgaaattcatcctag

SEQ ID NO: 198821 - DNA, 45 bp, synthetic construct; identical to SEQ ID NO: 92627
  misc_feature 1..45: note = Description of Artificial Sequence: Synthetic coding sequence
  source 1..45: mol_type = other DNA

SEQ ID NO: 198822 - DNA, 1476 bp, synthetic construct
  misc_feature 1..1476: note = Description of Artificial Sequence: Synthetic coding sequence
  source 1..1476: mol_type = other DNA
atggagaaggccgccgacctgcaggacaccgccagcctgaccctgaagttcaagtttaaccctaaactgggaattgataatcccgttctttctctcgcagaagaccacgacccatacgacccatggagtctggagaggcccaggttctgcctactcagtaaggaagaagggaagtccttcgggttccacttgcagcaggaactaggccgggctggccacgtcgtatgcagggttgacccggggactagcgcccagcgccagggcttgcaggagggcgaccggattctggccgtaaacaacgacgttgtcgagcacgaggactacgctgtggtcgttcggcgcatccgggcatcgtcaccccgcgtgcttctaactgtgctcgctagacacgcccacgatgtggccagagctcagttgggtgaagacgcgcacctgtgtccaaccttggggcctggtgtgcggccccgactgtgtcacatcgttaaagacgaggggggatttggcttctcagtcacccatggaaaccagggccccttttggcttgtactgagcacagggggcgctgccgagagggctggcgtccccccgggggcaaggctcctcgaggtgaatgggttatggcagtccgggcagcaggtaactcttctggtcgcaggacctgaggtggaagaacagtgcaggcaactcggactgccactggccgctcctttagctgaaggctgggccctcccaacaaaacctaggtgcctgcacctcgagaaaggaccccaaggcttcgggtttttgctgagggaggagaaaggcctagacggtcggccaggacagttcctgtgggaggtggatcccggtctgcctgctaaaaaggcagggatgcaggcaggcgaccgcctggttgccgttgccggggagagtgtcgaaggcctcggccacgaggagactgtgagccggatacagggtcagggctcttgtgtaagtttgacggtggtggatcccgaagcggataggttcttttccatggtcagactgagtcctctcctgtttctagagaacacagaggccccagccagccctcggggcagttccagtgcttctctcgtggagaccgaggacccatctctcgaagatacatcagttccctcagtacccctaggttctaggcagtgcttcctgtaccccggtccgggaggctcctacgggttccgcctctcatgtgtggctagcggcccccgtctatttattagtcaggtgaccccaggcggctcagccgctcgggccggacttcaggtgggtgacgtaatccttgaggtgaatgggtatcctgtggggggtcagaatgatctcgagcgtctacagcagttaccagaggccgagcctcctctctgcttgaaactcgccgcccgctctttgcgcggcctagaagcctggattccgcctggggcagctgaggactgggccctggcgagtgacctgctctag

SEQ ID NO: 198823 - DNA, 1518 bp, synthetic construct
  misc_feature 1..1518: note = Description of Artificial Sequence: Synthetic coding sequence
  source 1..1518: mol_type = other DNA
atggagaaggccgccgacctgcaggacaccgccagcctgaccctgaagttcaagttcaaccctaaactgggcatcgacaacccagtcttgagcctggctgaagaccacgatccctacgacccctggtcgctggaacgcccaaggttttgcctgttgagcaaagaggaaggcaaatcttttggttttcatctgcagcaagaactggggcgcgcaggacatgtggtgtgccgcgtggatcccggaacatcggctcagcggcagggcttacaggaaggcgacagaatcctggctgttaacaatgacgtggtggaacacgaggactatgcagtggtggtccgaagaatccgagcgtccagcccaagggtgcttctgaccgtccttgcacgtcacgctcatgacgtggcccgcgcacagttgggagaagatgctcatctgtgtccaacccttgggccaggagtgcgacctagactgtgccacatagttaaagacgagggtggatttggattttctgtcacacacggcaaccagggtccattctggctcgtgctttctaccggcggagcagccgaacgagcaggcgttccacccggggcacgcttgctcgaagtgaatggtgtctctgtagaaaagtttacacacaaccagctgacccgcaagctatggcagtctggccagcaggtgactttgctagttgcaggacccgaggtcgaagagcagtgcaggcaactgggacttccactggccgctcctctggctgagggctgggcactgccaacaaagcctaggtgccttcacctggaaaaaggacctcaagggttcggctttctgctgagggaagagaaaggacttgacggtcggccaggacagtttttatgggaagtggatcctggcctacccgccaagaaggctggcatgcaggccggggatcgactcgtggctgtagctggagagtcagtggagggcctaggacatgaagagacagtgagccggatccaagggcagggctcttgcgtaagtctgaccgttgtcgatccggaagctgaccggttttttagtatggtgaggttgtcccctctcctgttcttggagaacaccgaagccccagctagcccgcgcggttctagctcggcatccctggtggagacagaagaccccagtctagaggacacctccgtcccaagtgtccctctaggctctcggcagtgttttttatatcccggaccgggtggtagctacggtttcagactaagctgtgtcgcctccggccccagactgtttatcagtcaggtgacccctggcggatcggctgccagagctgggctgcaagtaggagacgtcattctagaagttaacggataccctgtgggcggacagaacgatttggaacggctgcaacagctgcctgaggcagaaccaccactttgtctgaaactggctgctcgatcactgcggggccttgaagcttggataccacctggcgctgcagaggattgggccctcgcctctgatctgctatag

SEQ ID NO: 198824 - DNA, 1716 bp, synthetic construct
  misc_feature 1..1716: note = Description of Artificial Sequence: Synthetic coding sequence
  source 1..1716: mol_type = other DNA
atggtgacccccagcccccccggcaaccacagcctgagcctggaggcccccaggctgcatactgccagcgatctgctgggtaatcactccctggggctgcctctcatcactgctctggtgggatcaagggacagacgtggcagagtcttttcacctgttccagttccactccccactaaccctacgacacagcaccccacacggcaaaaactcccgagcactctcagcggtcatcgagtgtgccaggcacacggggaacccgtgctggggctttgtccactgttgccgctattttgctgtcctcctcatcctcctgatccttggagcttggagcgtcctagattctgcctgctctctaaagaggagggcaaatccttcggatttcatctgcagcaggaactcggcagagctggacacgtggtttgtcgagtagatcctgggacaagcgcacagagacaggggctacaggaaggggaccgtatccttgctgttaataatgatgtggtagaacacgaggattatgccgttgttgtccgacgaattagagcgtcatcgccacgtgtcctcttgacggtgctggcaagacacgctcatgatgtcgcacgagcccaactgggcgaagatgcacatttgtgtccgaccctgggcccaggcgtgcgtccccgtttgtgccatatagtgaaagatgaaggtgggttcggtttcagtgtgactcacggaaatcagggccctttttggctcgtgctgagcacaggtggagccgctgagcgagcaggggtaccgccaggcgccaggctgctcgaagtcaatggcgtgtcagtggaaaaatttacacacaatcagctgacccgaaaactgtggcagagcggccagcaggttaccctgctggtggccggaccagaggtagaagagcagtgcaggcagcttggcctcccacttgctgccccattagccgagggatgggctttacccactaaacctaggtgtttacacctggagaaaggcccacagggattcggattcctgctgcgcgaggaaaaaggactggacggccgcccaggccagtttttgtgggaggtggatccggggctcccagccaagaaagcagggatgcaggccggggaccggctggtagcagtggccggcgaaagtgtggaagggcttggccacgaggagactgtaagcagaatccagggccagggctcctgtgtgagtctgacagttgtggacccagaagctgaccgattctttagtatggttagactgagcccgttgctgttcctggaaaatacagaggcacccgcctcccctcgcggttcatctagcgcctcattggtcgaaaccgaggacccatctctggaggatacctcagttccttcggttcccctaggctctaggcagtgctttctctacccgggacctgggggctcgtatggatttcgtctctcctgcgtggccagcgggcctcgactgtttatcagtcaggtgactcccggggggtccgccgccagagccggtctccaagtgggagatgtcatactcgaagtcaatggctatcccgtcggtggccaaaatgacctggagcggctccagcagctccctgaggccgaacccccactgtgcctgaagctggccgctcggagtcttcgcggtctagaggcatggatccctcccggggccgcagaggactgggcactagcctctgatctattgtag

SEQ ID NO: 198825 - DNA, 1518 bp, synthetic construct
  misc_feature 1..1518: note = Description of Artificial Sequence: Synthetic coding sequence
  source 1..1518: mol_type = other DNA
atggaggaggccctggacctgcaggacaccgccagcctgaccctgaaatttaaattcaatcccaaactcggaatcgacaatcctgtactgagccttgccgaggatcacgacccatacgatccctggagtctggaacggccgagattctgtctgctgagcaaggaggaaggaaagtctttcgggttccacttacagcaagagttgggaagagcaggccacgttgtgtgtcgggttgaccctggcaccagtgctcaaagacaagggctacaggagggcgatcgaatcctggccgtgaacaatgacgtggtggagcacgaagattatgcagtggtggtgcgacgcattagagccagctcccccagggtgctacttacagtactggctaggcacgcccatgacgttgctagagctcagctgggtgaggacgcacacctttgccccacactcggccctggcgtgcgacctaggctctgccacattgtgaaagacgaggggggcttcggcttttctgtgacccacggtaatcagggtccattctggttggtgctgtccaccggcggtgccgcggaacgggccggtgtgccccctggggctcgtctgctggaagttaacggtgtgagtgttgaaaaatttacacacaaccagctgacccgtaagctttggcagtccggacagcaagttactctgcttgtggcaggccccgaagtggaagaacagtgcaggcagctgggactgcccctagcggcgccgcttgccgagggatgggcccttcctacaaaaccacgctgtctccacctcgagaaaggcccccagggcttcggcttcctgctccgtgaggagaaaggactggacggtagacccggtcaattcctgtgggaagtggatcccgggctcccggcaaagaaggccggaatgcaagccggagatagattagtcgccgtggcgggagaatccgttgaaggactcggccacgaagagaccgtgtctcggatacagggccagggatcctgtgtgtctctgacggtggtggatcctgaagctgaccgattcttcagtatggttcgtctcagcccactgctcttcctagagaataccgaagcccccgccagtccccggggctcctccagcgctagcctggttgagaccgaggaccctagtctcgaggacacatctgttccatcagttccccttggaagcagacagtgcttcctttaccctgggccaggaggctcgtacggcttcagattgagctgcgtggcgagtggccccagactgttcatttctcaggtgacgcctggcggtagcgccgcaagggcggggctgcaggtgggagacgtcatcttagaagtgaacggctatccagtgggcggccaaaatgacttagaacgcctgcagcaattgcccgaagccgagcctcctctatgtctcaaactggctgctagaagtttacgagggcttgaggcttggattcctcccggcgctgccgaagattgggccctggcatctgacttgttgtag

SEQ ID NO: 198826 - DNA, 1716 bp, synthetic construct
  misc_feature 1..1716: note = Description of Artificial Sequence: Synthetic coding sequence
  source 1..1716: mol_type = other DNA
atggtgacccccagcccccccggcaaccacagcctgagcctggaggcccctaggctacacacagcatcagacctgctgggtaatcactccctgggtctgccactgatcaccgccttagttggaagtcgggaccgccggggtcgagtgtttagtcccgtgcccgtgcctctgcccaccaaccccacaacacagcatcccaccagacagaagctcccctccacccttagcggccaccgcgtgtgtcaggctcatggggagcccgtgctcggcctgtgcccactgctccccttattctgttgccctccacacccccctgacccttggtctcttgagaggcctagattctgtcttctctcaaaagaggaggggaaatctttcggcttccacttgcagcaagaattagggcgagccggtcacgtggtgtgcagagtcgatccgggaacatcagcccagcgacaggggctgcaggagggggatcgaatcctggctgtgaacaatgatgtggtagaacacgaggattacgccgtcgttgtgcgacggatccgagcttcatcaccccgcgtgctgctaacagtgctggcgaggcatgctcatgatgtggcgcgagcgcaacttggcgaggacgcccatctgtgtcctacccttggaccaggagttcgcccacgcctgtgccatatcgtcaaagatgagggcgggtttggctttagcgtgacccacggaaaccagggtccgttttggctcgtgctgtccaccggtggggctgcggaaagggcaggggttcctccaggcgctcgtcttctggaagtgaatggcgttagtgtggaaaaattcacccacaatcagttgacccgcaagttatggcagtccggtcagcaggtgactctactcgttgccggaccagaggtcgaggaacagtgtagacagctcggtttgcctttagccgccccattagcagagggctgggcactgcctactaagcctcggtgccttcacctggaaaaaggcccccagggttttggcttcctgctccgggaggagaaagggctggatggacggccagggcagtttctatgggaggtagaccctgggctgcctgccaaaaaggcaggcatgcaggccggcgaccgtctggtcgcggtagccggggagagtgtcgaaggattggggcatgaagagaccgttagccgaattcaggggcaaggctcctgtgtttcattaaccgtcgtcgaccccgaggccgataggttcttctctatggtgcgcctgtcacccttgctgttcctcgagaataccgaggcccccgcctctccaagaggtagctcttccgcatcattggtggagacagaagacccgtcacttgaggacaccagcgtccctagtgttcccctcgggtcgcgccaatgttttctgtatccaggcccaggtggcagttatggctttcggctgagttgcgtggcctcgggacctagactgtttatttcacaagtcactcctggcgggtccgccgctagggccggactgcaggtgggagacgtgattctggaggttaacggctaccctgtggggggccaaaacgatttagagcggctccaacaactccctgaagctgagcctccactttgtctcaagctcgccgctcggtcacttagaggcctggaggcttggattccccctggcgcagcggaggactgggctctggcctccgacttattgtag

SEQ ID NO: 198827 - DNA, 2310 bp, synthetic construct
  misc_feature 1..2310: note = Description of Artificial Sequence: Synthetic coding sequence
  source 1..2310: mol_type = other DNA
atgggctgcaacatgtgcgtggtgcagaagcccgaggagcagtacaaggttatgctgcaggtgaatggcaaggagcttagcaagctgtcccaagagcagacgctgcaggcgctgaggagctctaaggaacctctggtcatccaggttctaaggaggtccccccgcttacgcggcgatagtagctgccatgacctgcagctggtagattcggggacccaaactgacattacgttcgaacacatcatggccctcggcaagctccgccctcccacccctcctatggttatactcgagcctcctccaatttctcatgagtactacgacccagctgagtttatggaaggaggaccccaagaggccgacagactggatgaactcgagtacgaagaggtcgagctctacaaatcctcacacagagacaagctggggctaatggtctgttataggacggatgacgaggaggacctgggaatttatgtcggcgaggttaatccaaactctatcgcagctaaagacgggcggattagggagggcgaccgtattatccagattaatggcgtagatgtccagaatagggaggaggccgtagcaattctcagccaggaagaaaataccaatatttctttgctagttgctaggccagaaagccaactagctaagagatggaaagactccgacagagacgattttttagacgacttcggctctgagaacgagggtgagctgcgcgccaggaagttgaaatcaccccccgcacaacagcctggaaatgaagaggagaagggggcccctgacgcgggacctggtctcagtaattcacaggagctcgacagtggcgtgggccgtacggatgagagcaccagaaacgaggagtctagcgagcacgacttactaggggacgagccaccaagcagcacaaatactcccgggagccttaggaagttcgggctgcagggggatgcactgcagagtagggatttccacttcagtatggacagcctgctagctgaaggagctggcctgggtggcggggacgtgcccggtctaaccgacgaggagtacgaacgctatcgagagctgctggagataaagtgccacctggagaatggcaaccagctagggcttctgttcccacgggcctccggcggaaattccgcactggacgtcaatcgcaacgagtctctgggtcacgagatggcaatgctcgaagaggaacttaggcaccttgagttcaaatgcagaaatatactgcgcgctcagaagatgcagcagctgcgcgagcgttgtatgaaggcttggctcctcgaggaggagtcactgtatgacttggccgcctctgagcctaagaaacatgagcttagcgacataagtgaacttccagaaaagtcagataaggattcaacgagcgcctataacaccggagagagttgtcgcagcaccccgctcctggtggaacccttgcctgagtccccgttacggcgggccatggctggaaatagcaatttgaataggacaccaccaggaccagcggtggcaacacccgcaaaagcagccccaccgcctggctctccggcgaaatttcgctctctttccagagatccagaagccggtaggagacagcatgctgaagaacgcgggcggcgaaatcccaagacgggactgacgcttgagagagttggtcccgaatctagtccatacctgtccaggcggcaccgtgggcaggggcaggagggcgagcattaccattcttgcgttcagctcgcccctaccaggggcctcgaggagctcggccacgggcctctgtccttagcaggcggcccgcgggtgggaggggtggctgctgcagccacggaagccccgcgtatggagtggaaggtgaaagttcggtcagatgggaccagatacgtagccaaaaggcccgtccgagacagactgcttaaggcccgggctttgaaaatacgggaggagcgaagcggtatgaccactgacgacgatgcggtgtccgaaatgaagatgggtcggtattggagcaaagaggaaaggaaacagcatctgatcagagcccgggagcagaggaagagacgggagttcatgatgcagtccaggctcgaatgcctcagggagcaacagaacggtgatagtaagcccgaattaaatattatcgccttaagccaccgtaaaacgatgaagaaacggaataaaaagatcctggataactggatcacaatccaagaaatgcttgcccacggcgcccggtccgcggacggtaagcgggtgtataatcccctgctctccgttacaactgtgtag

SEQ ID NO: 198828 - DNA, 2085 bp, synthetic construct
  misc_feature 1..2085: note = Description of Artificial Sequence: Synthetic coding sequence
  source 1..2085: mol_type = other DNA
atggccctgggcaagctgcggccccccaccccccccatggtgatcctcgaaccctacgtgctttccgaactgcctcctatatctcacgagtattatgatccggccgagttcatggagggtggaccacaggaagccgatcggcttgacgagcttgaatacgaggaagtcgagctgtataagtccagccatcgggataagctgggcctgatggtctgctatcgcaccgacgatgaggaggacctgggaatctacgtcggcgaggtcaaccccaattccatagccgccaaggacggccggattagagagggtgacagaatcatccaaattaatggtgtagacgtgcaaaaccgggaggaggctgtggctatcttgagtcaggaagaaaatactaacatctctttgctcgtcgcccgccccgaatcacagctggcaaagagatggaaggattcagatagagatgactttctggatgattttggttctgagaacgaaggcgaactccgggccaggaaactcaaaagcccccccgcccagcagccagggaacgaagaggagaaaggggcaccagacgcaggccctggcttaagcaactcccaggaactcgatagtggcgtcgggcgcaccgacgaaagcactcggaatgaagaatcatcagagcacgaccttttgggggacgagccccccagctccacgaacacgccagggagtctccggaaatttggcctccagggcgatgccctgcagtctcgggatttccatttcagcatggactccctgctcgcagagggagccggtctcggcggcggtgatgtgcctgggctcacagacgaggaatacgagcgataccgggaactcctagaaatcaagtgtcacctcgagaacggcaaccagcttggattgctgttccctcgtgcctctggcggtaactcagccttagacgtgaacagaaacgagtctctgggccatgagatggcaatgctcgaagaagaactgcggcacttagaattcaagtgtagaaacatcctgcgggcacagaagatgcagcagctgcgggaacgatgtatgaaagcttggttactggaggaggagtcactgtacgatctggctgcgtctgagcctaaaaagcatgaactgtctgatatcagcgagctgcccgagaaaagcgacaaagacagtacatccgcatacaacaccggcgagagctgccgcagcaccccactgctagttgaaccactcccagagtccccactccgacgcgccatggcgggaaactccaacctgaataggacaccacccggtcctgccgtcgcaacccctgccaaagccgcacctccaccaggaagtcctgctaagttcagatctttgtcccgcgatcctgaagccggccgaaggcagcatgcggaagaacgggggcgtcgcaaccctaagaccggattgactcttgaacgtgtggggcctgaatcctcgccatacttaagcaggaggcacaggggccagggccaggagggcgaacattatcatagctgcgtgcagttggcgcctaccagaggcctggaggaactcggacacggaccattatcattagccggcggtccacgggtagggggcgtggccgctgcggctaccgaggcaccacggatggaatggaaagttaaagttcggtctgacggaacacgatatgtcgctaagaggccagtgcgtgatcgccttctgaaggcgcgtgcactgaagattagggaggagcgctctggcatgaccaccgacgatgacgccgtgtctgaaatgaagatgggcagatattggtcgaaggaagagcggaagcaacacctaatacgagcccgcgagcagagaaagcggagggaattcatgatgcagagccgactggagtgtctgcgcgagcagcagaacggagacagcaaacctgagttgaacattattgccctttcccatcgaaaaactatgaaaaagagaaataagaaaattctggacaactggatcaccatccaggaaatgctggctcatggcgcccgctctgctgacggaaaacgagtgtacaaccccctgctgtcagtgacaactgtctag

SEQ ID NO: 198829 - DNA, 2022 bp, synthetic construct
  misc_feature 1..2022: note = Description of Artificial Sequence: Synthetic coding sequence
  source 1..2022: mol_type = other DNA
atgaccgccccccccatcagccacgagtactacgaccccgccgagtttatggagggcggaccccaggaggccgatagactagatgaactggagtacgaggaggtagaactatataaatcctcgcatagagataaactgggattgatggtgtgctatcggactgatgacgaggaagacctgggcatttatgtgggcgaggttaatccgaactcaattgcagcaaaggacggccgcatcagggagggagatcgaataatccagatcaatggggtcgatgtgcagaatagagaggaagcagtcgctattctgagtcaggaagaaaatactaacatatcactactagtcgcacggcccgagtcccagctcgcgaagagatggaaggatagtgaccgcgacgatttcctcgatgatttcggctccgaaaatgaaggagagcttcgggctcgcaaactcaaaagtccgcctgctcagcagcccggtaacgaggaggaaaaaggcgctcccgacgccggacccggcctcagcaattctcaggagctggacagcggggtcggccggacagacgaatctacccggaacgaagaatcctccgaacatgatttgctgggggacgagcctcccagcagcacgaacaccccaggcagtttgcgcaaatttggtctgcaaggtgatgctcttcaatcaagagactttcactttagcatggactcacttcttgctgagggtgcagggttgggcgggggggatgtgccgggcctgaccgacgaagagtatgaacggtatagggaactcctggagattaagtgccatttagaaaacggcaatcagcttggcttactgttccctcgcgctagtgggggtaatagcgcccttgacgtgaaccgcaacgaatcactgggccacgagatggctatgctcgaggaggaactgagacatctggagtttaagtgtcgcaacattctgagggcacagaagatgcagcagctgagagagagatgcatgaaagcctggctgctggaggaggaatctttgtacgatctcgcagcctcagaaccaaagaagcatgagctttctgacatctctgagctgccagaaaagagcgacaaggactctacgtctgcttataacactggtgagtcctgcagaagcactccacttctggtggaacctttaccagagagccctctgcggcgcgccatggccgggaatagcaacctgaatcggactcctcctgggcctgcagtggctacccctgccaaagcagccccgccaccgggctcacccgcaaaatttagatctctgtcacgcgacccggaagcgggccgccgccagcacgcagaggagagagggcgccgcaatccgaagactggccttactctcgaaagggtcgggcctgagagctcaccctacctgagtaggcgccacaggggacagggccaggagggtgagcactatcactcatgtgttcagctggcacccacccgtggacttgaagaactgggtcacggaccactctcgctcgccgggggcccccgtgttggaggagtggccgctgcggctaccgaggcgccccgaatggagtggaaggtaaaagtaagaagtgatggaacccgatatgtggcgaagcgacctgtgcgggatagattgttgaaggcacgggccttaaaaataagggaagagcgctccgggatgacaaccgacgatgacgcggtaagcgagatgaaaatgggcagatactggtctaaggaagaaagaaagcaacatttaattcgagctagggaacagagaaaaaggcgcgagttcatgatgcagagccgcctggagtgtctcagggagcagcagaacggagacagtaagccagaactgaacataatcgccttgagccatcgtaagaccatgaaaaaacgcaataagaagatactagacaattggatcaccatccaagagatgctggctcacggcgctagatctgccgatgggaaacgggtttacaatccacttctatccgtgaccacggtatag

SEQ ID NO: 198830 - DNA, 1983 bp, synthetic construct
  misc_feature 1..1983: note = Description of Artificial Sequence: Synthetic coding sequence
  source 1..1983: mol_type = other DNA
atgggctgcaacatgtgcgtggtgcagaagcccgaggagcagtacaaggtcatgcttcaggaagtggaactgtacaaaagctctcaccgggacaagctggggcttatggtctgttacaggacagacgatgaggaagacctcggcatatatgttggggaggtcaatcccaatagcattgctgccaaggatggacgcatacgggagggtgatcggatcatccagatcaatggcgttgacgtacagaaccgcgaggaggctgtggcgatcctttcccaggaggagaacaccaacattagccttctggtggctaggccagagagtcagctggcgaagcggtggaaagactcggaccgtgacgattttttagatgattttgggtccgaaaacgagggtgagctgcgagcgcgcaagctcaagagccctcccgcgcaacagcctggaaacgaagaagagaagggggccccagacgctggaccaggcctgagcaatagtcaggagctggacagcggagtgggaaggacagacgaatccaccagaaacgaggagagcagcgagcatgatctactgggagacgaaccacctagttccacaaacacgcctggctccctccggaagttcggcctgcagggggacgcacttcagagccgggatttccacttctccatggactcgctcctggccgagggcgccggactcggcggaggtgacgtgcccggtctgaccgacgaagagtatgagaggtatcgagaactgctagagattaagtgccatctggaaaatgggaatcagctgggcctcttgtttccccgcgcctctggagggaacagtgctcttgacgtgaaccggaatgagtcattaggacatgaaatggccatgcttgaagaggaactgcgccatcttgagttcaaatgcagaaacattctgcgggctcagaagatgcagcagcttagagaaagatgcatgaaggcttggctgttggaagaggaatctctatacgatttggcggcaagtgaacctaaaaagcatgaactctcagatataagcgaacttcccgagaagtcggataaggacagcacttcggcctataacacgggggagtcatgccggtctactcccctgttggtagagcccctgccagaatcccccctgcggagggctatggccggtaactctaacctgaatagaaccccccctggacctgccgtggccactccagctaaggccgccccaccaccaggcagccctgcaaagttccggtcccttagtagggatcccgaggctggccgacgccaacatgccgaggagcggggacgccggaaccctaaaacaggattaacattggaacgggtgggcccggaatccagtccttatttatctcgcaggcaccggggacagggacaggagggagagcactaccactcctgtgtgcagttggcacccacgagagggctggaggaattaggtcacgggcccttgtccctcgctgggggccctagagtgggtggagtcgccgctgccgccaccgaggccccaaggatggaatggaaggttaaggttaggtctgacggcacgcgctatgtggctaagagacccgtacgagaccggctgcttaaagcccgcgcactgaagatccgagaagagcggtcaggcatgacaaccgacgacgatgctgtgagcgaaatgaagatgggacgttattggagcaaagaggaacggaagcagcacttaatacgggcacgcgagcagcgtaaaagaagggaatttatgatgcagagtaggctcgaatgtctcagggaacagcaaaacggagatagcaagccagaactcaacattatcgctctttctcacaggaagaccatgaagaaaagaaacaaaaaaatattggacaattggattactatccaggagatgctagctcacggagctagatctgccgacggcaagcgtgtctataatcccctgctttcggtcaccacagtgtag

SEQ ID NO: 198831 - DNA, 1554 bp, synthetic construct
  misc_feature 1..1554: note = Description of Artificial Sequence: Synthetic coding sequence
  source 1..1554: mol_type = other DNA
atggcccagggcttcgccgtgggcttcgaccccctgggcctgggcgacctctccagcggctcactgagctctctctccagtcgcggacacctcggttccgacagtgggagcaccgccaccaggtatcttctgagaaagcagcagcggctgctcaacgggcctccccgggggattcgggccagcagcccaatgggtcgggtcattctcattaattcacctatcgaagcaaactctgatgagagtgatataatccacagtgtccgcgttgaaaagagtcctgctggcaggctagggtttagtgtgcggggaggaagcgaacacggactcgggatcttcgtgtcaaaggtcgaggaaggaagcagcgctgagcgggccggcctgtgtgttggagacaagataacagaggttaacggtctctctctcgaatctaccaccatggggagcgccgtcaaggtgctcacatcttcatcacgattgcacatgatggtgcggagaatggggcgggtccccggtatcaagttttctaaggaaaagactacttgggtggacgtagttaatagacggctggtcgtggagaagtgcggatccaccccttctgatacatcatcggaagacggtgttcggcgcatcgttcacctctacaccacatctgacgacttttgcctgggcttcaatatacgtggcggaaaggagttcggcttgggaatctacgtatcaaaagtggaccacggtggcttagcggaggaaaacggcatcaaggtcggcgatcaagtcctggcggccaatggcgtacgattcgatgacattagccactcacaggcagttgaggtcctcaagggacagacacatatcatgctgacaataaaagagacgggacgctatcctgcttacaaagaaatggtatccgagtactgttggctggaccgcctatctaatggggttctgcagcagcttagtcccgcttcagaatcttcctcaagcgtttctagttgtgcctccagcgcaccttatagctccggcagccttccctctgataggatggatatttgcctcgggcaggaggagcccggtagccggggtcctggctggggccgcgccgataccgctatgcagacagagcctgatgcgggcggtagagtggagacttggtgctccgtcaggcctacagtaatcctgcgtgacacggccatacgttcagacggtccgcaccccggtaggagattggactccgcattatctgagagccccaagactgctctgctgctcgccctgtcccgccctcgtccacccattacacgctcccagagctatttgactctgtgggaggaaaagcagcaacgaaagaaggaaaaatccgggtcccctggcgagaaaggagccctacagcggtccaaaactctgatgaatctgtttttcaagggggggcggcagggcagactcgcacgcgacggaaggagggaggcatggacccttgacagcggatctttggctaagacgtacccccgcctggacattgagaaagagatgggtgtctcaccctgctgccccggttag

SEQ ID NO: 198832 - DNA, 3102 bp, synthetic construct
  misc_feature 1..3102: note = Description of Artificial Sequence: Synthetic coding sequence
  source 1..3102: mol_type = other DNA
atggcccagggcttcgccgtgggcttcgaccccctgggcctgggcgatctctcatccggcagcttatccagcctaagctctcgaggtcatttaggaagcgattctggatccaccgctacacggtacctccttaggaagcaacagcggctgctcaacggtcctcctagagggatcagggcctcctctccaatggggcgagtcatcttaataaactccccaattgaagccaatagtgatgagagtgacattatccactcggttcgggtagaaaaaagtccagcgggaaggttgggctttagtgtgaggggcgggtccgaacacggcttgggtattttcgtgagcaaagtcgaagagggatctagtgccgagcgggcgggcctgtgcgtgggagataagatcactgaggtgaatgggctctccttggagtcaacaactatgggcagcgccgtgaaagtccttacaagcagttccagactccacatgatggtgcggcggatgggtcgggtgccaggtattaagtttagcaaagagaagaccacctgggtagacgtggtaaacagaaggcttgtggtcgagaagtgtggatcaaccccctctgacaccagttccgaggatggtgtgcgtcggatcgtccatttgtatactacatctgatgacttttgtctagggttcaacatacgtgggggaaaggagttcgggctgggcatctacgtttctaaagtggaccacggcggcctggccgaagagaatggaattaaagtaggagatcaagtcttagctgccaacggagtacggttcgatgatatttcccattcacaggctgtggaggttctaaagggccaaacccatatcatgcttaccattaaggaaaccgggcgctacccagcatacaaggagatggtcagcgagtattgttggcttgacagactttctaacggagttctccaacagctcagccctgccagcgagtctagttcgtcagtgagcagctgtgcaagctctgcaccctatagttccgggtctctccctagcgatcgcatggacatttgcctgggccaggaggaacccggtagccgcggccctgggtggggacgcgcagacacagcaatgcagacagaaccagatgctggagggagagtggagacatggtgctctgtcagacccacagtgatactaagggatacagctatccgatcagacggtccacatccaggcaggcggctggactccgccctctcggaatcccccaagacagcgctactgctcgccttgtcccgcccaagaccccctatcacccggtcacagtcttatttgacactctgggaggagaaacaacagcggaagaaagaaaaatccggtagtcccggcgagaaaggagccctacagcgatccaagactctgatgaacctgtttttcaaaggcggacggcagggccgcttagctcgtgacggccggcgggaagcttggacactggatagtggcagcctggcaaaaacctatccaaggctcgatattgagaaagccggcggagttggacccgttcagaagtttgtgacttggcgtcttcgcagagatcaagagagaggaagagccttgctgagtgcacgcagcggatctcccagtagtcagctgccaaacgtcgacgaacaagtccaggcttgggagtctagaagacccttgatccaagaccttgcacagcgtctgctgaccgatgatgaggtactcgctgtgactcgtcactgctcccgttatgtccatgagggaggaattgaggatctagttcgtccactcctggccatcctggatagaccagagaaactactgctgcttcaggatatccgctctgttgttgcgcccactgacttgggacgtttcgactcaatggtgatgcttgtggaattagaggccttcgaggctctgaagtccagggcagtgcgccctcccgctctccgacccgctcgccaggatacccctcccaaaaggcatctcatcacgccagttccagattcccgtgggggattctatctgcttcctgtgaacgggttcccagaggaagaggataacggagaactgcgcgaacggctgggggccctcaaagtgagtccctcagcatcagccccccgacatccgcacaagggcattcctcccctccaggacgtgcctgtggatgctttcactcccctgcgcattgcgtgtaccccacctccacagctgccgcccgtcgccccgcggcccctgcgtcccaactggctgttaaccgagcctctaagtcgtgaacatcccccacagtcccagatccgaggacgagcccagtctcggagccgctccagatctaggagtaggtcaagaagcagccgggggcagggcaaaagtccaggacgccgcagtccttcacccgtgccaacccccgccccctctatgaccaatggccgctaccacaaacccagaaaggcaaggccaccattaccgaggcctctagacggcgaagctgccaaggtgggggcaaagcaggggccatctgagagcgggactgagggcaccgccaaagaggccgctatgaaaaatccatccggagaacttaagaccgtcactttgtctaaaatgaagcagtccctaggaatcagcatcagcggaggcatcgaaagcaaggtgcagccgatggttaaaatcgagaagatcttccctggtggggcggctttcctctccggcgcattacaggctgggttcgagctggtggccgtcgatggcgagaaccttgagcaggtgacccatcaaagagccgtggacacaatccgcagggcttaccggaacaaggcccgagagccaatggaactggtggtgcgtgtccccggacctagcccacggccgtccccctccgacagtagcgccctcacagacgggggactgccggcagaccacctgcctgcccaccagccgctcgatgctgcacctgtgccagcgcattggctgccagaaccacccacaaacccccagacgcccccaaccgatgctaggctgttacaaccaactccatcaccagccccatccccagcactccaaacaccagactccaaaccagcacccagtccgcgcatcccctag

SEQ ID NO: 198833 - DNA, 627 bp, synthetic construct
  misc_feature 1..627: note = Description of Artificial Sequence: Synthetic coding sequence
  source 1..627: mol_type = other DNA
tgaccccggccccccatcacccggagccagagctacctgaccctgtgggaagagaagcagcagaggaaaaaagagaagagtggctcacctggcgaaaaaggagccctgcaaaggagcaagacactgatgaacctcttctttaaaggcggccgccagggaaggctcgcccgcgacgggagaagggaggcctggaccttggacagtggttcccttgccaagacatacccccggcttgatatcgagaaagcaggcggagtaggccccgtgcaaaagttcgtgacctggcgcctgcgtagagaccaggagcgggggcgggcacttttatctgcgcggagtggctcaccgtcaagtcagctgcccaacgtggatgagcaggtccaggcctgggagagcaggagacctctgatccaggacctggcccagagattacttactgacgatgaggtcctcgcagtgacccgccactgctccagatacgtccacgaaggaggaatcgaggacttagtcagacctttgttggcgattctcgatcgtccagagaagcttcttttactgcaggacattcgctctgtagtagcaccgactgacctggggagattcgactcaatggtcatgctggtagaatag

SEQ ID NO: 198834 - DNA, 3465 bp, synthetic construct
  misc_feature 1..3465: note = Description of Artificial Sequence: Synthetic coding sequence
  source 1..3465: mol_type = other DNA
atgggcctgctgctgatgatcctggccagcgccgtgctgggcagctttctgaccctgctcgctcagtttttcctgctgtacaggaggcagccggagccgcctgcggacgaggccgcccgagcgggcgaaggcttcagatacatcaaaccggttcccggtctgttgttaagggaatacctgtacggcggaggacgggatgaggaaccctctggcgccgcccctgaaggcggcgctaccccgactgcagctccagagactcctgctccgccgacccgcgaaacttgttatttcctaaacgcaacaatcctcttcctgttcagggagctgcgggatacggccctcactagaaggtgggttactaagaagattaaggtagagtttgaggaactcctacagactaagaccgcagggagactcttggagggcctgagcctgcgggacgtgttcttgggcgagactgtgcccttcatcaagaccattcggctcgttcgacctgtggtccctagcgccaccggggagccggatggtcctgagggggaggccttgcctgccgcttgcccagaagagcttgcctttgaagctgaggtcgagtacaacggcggattccatttggcaatcgacgtggacttggtcttcgggaaatccgcttacctctttgtgaagctgtctagagtggttggtaggctgcggcttgtctttacgcgggtacctttcacccattggtttttttcctttgtggaggatcctcttatcgattttgaagtcagatctcagttcgaggggagaccgatgcctcagctaacatccataatcgtgaaccagctcaagaaaatcattaagcggaagcatactttgccaaattataagattcggtttaaacccttctttccctaccagaccttgcaaggcttcgaggaggatgaagaacatattcacattcagcagtgggcactgacggaaggccgtctcaaagtgaccctgcttgaatgttctaggctactgattttcggatcttacgaccgtgaagccaacgtccactgtaccctcgaactgagcagttctgtgtgggaggaaaaacagaggtcctctatcaagacagttgaactgatcaaggggaacctgcagagcgtgggcctaactctacgactggtccagtccaccgatggttatgccgggcatgtcattatcgagaccgtcgcccctaattcacctgcggctattgcagatttgcagcggggcgacaggctaatcgccattggtggggttaaaattacttcgactctgcaggtgctgaaactgatcaagcaggccggtgacagagttctggtttattatgaacggcctgtgggacagtcgaatcagggcgccgtcctgcaagacaattttggacagctggaggagaactttctctctagttcctgccagtcaggctacgaggaggaggccgccggtttgaccgtcgacactgaatcgagagagctagattctgagttcgaagatctcgccagcgatgtgcgagcacaaaacgagtttaaggacgaggcacagtctctcagtcacagtcccaagcgggtaccaaccaccctcagtatcaagccgttaggcgctatttcccctgtacttaaccgaaagctcgctgttggttcacatcccctccctccaaagattcaatccaaggacgggaacaagcccccccctcttaagacttctgagatcaccgatcccgcccaggtctccaaacctacacagggcagtgctttcaagccacccgtgccgccaagaccccaggctaaggtgcccctgccaagtgctgacgctcctaaccaggccgaacccgatgtcctcgtcgagaagcccgagaaggtcgtcccaccaccgctcgttgataagtctgctgagaagcaggccaaaaatgtcgacgcaattgacgatgccgcagctcccaagcagttcctggcaaaacaagaggtggcaaaggatgttaccagcgagacgtcttgtcccactaaggacagcagcgatgaccgccagacctgggaatcatccgagattctctataggaataaactggggaaatggacacgcacgagagctagttgcctgtttgacattgaggcatgtcatagatacctcaatatcgcactgtggtgtagagatccatttaagctgggagggctgatttgtcttggacatgtaagcctgaaattggaagatgtcgctctgggatgcctcgctacaagcaatactgagtatctctctaagctgcgtctggaggctccttcacccaaagcgatagttactcgaactgccctccgcaacttgagtatgcagaaaggtttcaatgacaaattttgttatggagatataacaatccacttcaagtatttaaaggagggtgaaagtgatcaccacgtagtcacaaatgtagaaaaggagaaggaaccacaccttgttgaggaggtcagcgttcttccaaaggaggagcagtttgtgggccagatgggcttaacagaaaacaagcactcatttcaggacacgcagttccagaacccaacctggtgcgattattgcaaaaaaaaagtgtggactaaagccgcatcccaatgcatgttctgcgcctacgtatgccacaagaaatgccaggagaagtgcctcgccgaaacgtcagtgtgcggcgccacagaccgtcgaatagataggactcttaagaatttacggcttgagggacaggagactcttcttggcctccctcccagagttgatgccgaggcttctaagagcgtgaacaaaaccaccggcttgactaggcacatcattaatacctccagtaggctcctgaacctccggcaggtgtctaaaaccaggctgagtgagcctggtactgatctcgtggaaccttcccctaaacacacgcccaacaccagcgacaatgaaggctctgatactgaggtgtgcggccccaattctccttctaagcggggtaacagcactggaattaagctggtccgcaaggagggaggcctcgacgattccgtcttcattgcagtgaaggagatcggtcgagatctgtacaggggcctgcctaccgaggaaaggattcaaaagctggaattcatgcttgacaaactgcagaacgagattgaccaggaattagaacacaataatagtctggtgcgggaggagaaggaaacaacagatacacgcaaaaagtctctgctgagcgccgccctcgctaagtccggggagagactccaggccctgacattgctgatgatccactacagagccggcatcgaggatattgagacgcttgaaagcctttctctggaccagcacagcaagaagatctccaagtacaccgatgacactgaagaggacctggacaatgagatcagccagctgatcgactcccagccgttttcatccattagcgacgacctgtttggaccatcagagtctgtttag

SEQ ID NO: 198835 - DNA, 3201 bp, synthetic construct
  misc_feature 1..3201: note = Description of Artificial Sequence: Synthetic coding sequence
  source 1..3201: mol_type = other DNA
atgggcttcgagctggaccggttcgacggcgacgtggaccccgacctcaaatgcgccctgtgtcacaaggttctggaagatcccctcactaccccatgcggacacgtcttttgtgctgggtgtgtactcccctgggttgtgcaggaaggttcatgccccgcacgctgcagaggccggcttagtgctaaggaattaaatcacgtgcttccccttaagcggctcatcttgaagttagacataaaatgtgcttacgcaactcgcggctgtggcagagtggtcaaattacagcaactccccgagcacttggagcgctgtgacttcgccccagctcgctgtagacatgctggctgcggacaagtgctgcttcgtcgggacgtggaggcccatatgcgggatgcgtgtgatgccaggcccgtcgggcgttgccaagagggatgtggattgcctttaacacacggtgaacaacgagctggagggcattgttgcgccagggcactacgagctcataatggcgctctgcaggctagactaggagccctccacaaggccctcaagaaggaggccctgcgggccggtaagagggagaagtccctggttgcccagctggcggccgctcaactggagcttcagatgaccgctctaaggtatcagaagaagtttacggagtattctgcacgccttgatagcttaagtagatgtgtggccgccccccccggaggcaaaggagaggaaacgaaaagcttgaccttagttctgcatcgggactcgggtagcctcggcttcaacattattggtgggcgacccagcgtggacaaccacgatgggagctcctctgagggaatatttgtgagcaagatcgtcgattccgggccagccgccaaggaaggcggactgcagattcacgaccgaatcattgaagtgaatggccgtgacctgtctcgcgccactcacgatcaggcagtggaggctttcaagactgccaaggaaccaattgtcgtgcaggtactacgacgcaccccgcgcaccaaaatgtttactccaccctcagagagtcaattggtggacaccgggacccagaccgacatcacattcgagcatatcatggccctgacaaaaatgtcctctcctagtccacccgtcctggacccttacctgctccccgaagagcacccttccgctcatgagtattatgatcctaacgattacatcggtgatatccatcaggaaatggatcgtgaggagctagagttagaggaggtcgacctctatcgcatgaattcacaggacaagttgggcttgaccgtgtgctaccgtacggacgacgaagacgatatcggtatttatattagcgaaatcgacccaaattctatagccgccaaagacggacgcatcagagagggcgacaggatcatacagatcaacggcatcgaagtgcaaaatcgggaggaagctgtagccctgctgaccagcgaagaaaacaaaaacttctcactgctcatcgctagaccagagttgcagctggatgaaggttggatggatgacgaccggaacgactttttggacgacctccacatggatatgctcgaggagcagcaccatcaggccatgcaattcaccgcatctgtattgcaacagaaaaagcacgatgaggatggcggtacgaccgacaccgcgactatcctcagcaatcagcacgagaaggatagcggagtcggccggacggacgaaagtactcgtaacgacgaatcctcagaacaggaaaataatggagacgatgctacggcctccagcaaccccttggccggacagcgcaagttgacttgcagccaagataccctcggcagcggggacctccccttttctaacgagagcttcatctccgcagattgtaccgatgcagactacctcggtattccggttgatgagtgcgaaagatttcgggaacttctggaacttaaatgtcaggttaaatccgctaccccatacggactttattaccctagtggacccctggacgccggaaagtcagatcctgagagtgtggacaaggaacttgagctgctcaatgaagaactcaggtccattgagctagaatgtctctcaattgttagagcccacaagatgcagcagttgaaagaacaataccgggagagttggatgctccacaattcagggtttagaaactataacacctccatcgacgtcagacgacatgaactgagcgacatcacagaattacccgagaaaagtgacaaggatagcagtagcgcctacaacaccggagaatcctgccgatctacccccctgacgctggaaatcagcccagacaattctctgcgcagggctgccgaggggatttcttgcccttctagcgagggagccgtgggcactaccgaagcctatggtccagcatcaaagaacttgcttagcattacggaagacccagaggtgggcacgcctacatactctccgtctctcaaagaactggaccccaatcagcctctcgaatctaaagaacggcgtgctagtgacgggtcccggagccccacgccgtctcagaagttaggcagcgcttatctgcccagttatcaccatagtccgtacaagcacgcacacatccccgcccacgcccagcattaccagtcatatatgcagttgatccaacagaaaagcgccgtggaatacgcacaaagccaaatgtctctagttagcatgtgcaaggacttatcgtcacctactccatcagagcctcgcatggaatggaaggtcaagatcagaagcgatggcacccgttatatcaccaagagaccagttcgcgatcgtctcttgcgcgaacgggctttgaaaattcgggaggaaaggtctggaatgacaactgacgatgatgcagtctccgaaatgaaaatgggaaggtactggtctaaggaagagcgcaaacagcacctcgtaaaagcaaaagaacagcgccgaaggcgggaatttatgatgcagtcaagactcgattgcctcaaggagcagcaggccgcggatgatcgaaaggaaatgaatatactagaactttcccataagaagatgatgaagaaacggaacaagaaaatcttcgataattggatgactatccaggaactgctaacccacggcacaaagagtcccgatggcacccgggtttataactccttcttatccgtcacgacggtttag

SEQ ID NO: 198836 - DNA, 2190 bp, synthetic construct
  misc_feature 1..2190: note = Description of Artificial Sequence: Synthetic coding sequence
  source 1..2190: mol_type = other DNA
atgggcttcgagctggaccggttcgacggcgacgtggaccccgacttgaaatgcgcattgtgccacaaagtactggaagaccctcttactactccctgcgggcatgtattttgtgcagggtgtgtcctgccatgggtggttcaggaggggtcctgccctgcccgttgcagaggacggttgagcgctaaggagctgaatcacgtcctaccactgaagcgcctcattctgaagctcgacattaaatgcgcttacgccacccgggggtgcgggagagtagtcaagttgcaacagctgcctgagcacctcgagcggtgcgacttcgcacccgcacgttgtcggcatgcaggctgtgggcaagtgctgctcagaagggacgtggaggcccacatgcgggatgcctgtgacgcaaggccagtagggcgttgccaggaaggttgcggcttgcctctgacacacggagaacagcgggcaggtggccattgctgcgcgagggccctgcgcgctcataacggcgctcttcaagcaagattaggtgcgttgcacaaagcgttgaaaaaggaggctctgcgtgccggaaagcgagagaagtcattggtagcacaattagcagcggctcagttggaactccagatgacagcactgaggtaccaaaagaagttcaccgaatatagcgctcgcttggactcactgagcagatgcgtcgctgccccccctgggggtaagggcgaggaaactaaaagcctgacccttgtcctgcaccgcgattccggatcactcgggttcaatatcatcggcggtcggccttctgtagacaatcatgacggatcgagtagcgagggaatctttgtatcaaagatcgtcgactccgggcctgccgcaaaggagggcggcctccagatccacgatcgcatcatcgaggtcaatggacgagacctatcccgcgcaacacacgatcaagcggtggaggccttcaagactgctaaggagcccatagttgtccaggttctgaggaggacaccgcggactaagatgttcaccccaccctctgaatctcaactggtcgacaccggaacacaaactgacataaccttcgagcacatcatggctctcactaaaatgtcgagcccaagtcctccagtgcttgacccctacttgctgcccgaggagcacccatccgcacacgaatactacgaccccaatgattacatcggcgatatccaccaagagatggatcgcgaggagctcgagctggaggaagtagacttatatcgtatgaactctcaggataagctggggctcacagtgtgttatcgaactgatgacgaggacgacattggaatttacatctctgaaatagaccccaactccatcgctgctaaggacgggcgcatccgagagggggaccgcattattcagatcaatgggatagaggtacagaatagagaggaagcagtcgccttgctgacatctgaggaaaataagaatttctccctattgatagctcgcccagagctgcaattagatgagggatggatggatgacgacaggaacgactttctggatgacttgcatatggacatgttagaggaacagcatcaccaggcaatgcagtttactgcctccgtgcttcaacagaaaaagcatgatgaggatgggggcactaccgatacggctaccatcctgagcaatcagcacgaaaaagactctggtgtcgggaggacagacgaaagtacacggaacgatgagtcctccgagcaggaaaataatggcgacgacgccacagcatcgagcaaccctctggcgggccagaggaaactgacttgttcacaagacactctcggctctggcgacctgcccttcagcaatgaatcttttatcagtgccgactgtactgacgctgactacttgggtatacctgtggaaggtgaggatcctcaacggagggacgcgctgcatcatcaggaggcgcgtgctggaccccctgcggcaggcgcacggccagaagatccaggacgcgcccagagacatgaccaccgccggcggaggggcgagcgcgatgaggatggcgcgctgttagaacaaggtggcgaagaagcagcgcccggcgaaggacagggggctgccgctgcagcgagggtccacgacgccgagcaagtcgggctgtcgcagggagccgcatcctctcgatag

SEQ ID NO: 198837 - DNA, 2352 bp, synthetic construct
  misc_feature 1..2352: note = Description of Artificial Sequence: Synthetic coding sequence
  source 1..2352: mol_type = other DNA
atgggctgcagcctgtgcagcctgcagaagcaggaggagcagtacaagcttctgtatgaggtgtgccaggtcaacgggcgggacctgtctagagccactcatgaccaggctgtggaggcattcaagactgcaaaagaacccatagtggtgcaggtgctgagaagaacacctcgaacgaaaatgttcactcccccatctgagtcccagctagtcgacaccggaacacaaacagacattaccttcgagcacatcatggcactaacgaaaatgtcgagccccagtccacctgtgttggatccatacttactacccgaggaacatccaagtgctcatgagtattatgatccgaatgactatatcggcgatatccaccaggagatggatcgggaggagttggagctcgaagaggtggatctgtataggatgaactcgcaggataagctgggtttgaccgtatgctaccggacagacgatgaagatgacatcggtatatatatttccgagatcgatccgaacagtatagcagcgaaggacgggaggatcagagagggggacagaattatacaaattaacgggatagaggtacaaaatcgggaagaggcagtcgctctgctgacaagcgaggaaaataaaaatttctccctgcttatcgcgaggcccgaactgcagctggacgaggggtggatggatgatgaccgcaacgacttcctcgatgacttacacatggacatgttggaggaacaacaccaccaggcaatgcagtttactgcatctgtgctgcagcaaaaaaaacacgatgaagatggaggcaccaccgatactgcaaccatattatctaaccaacacgagaaggatagcggagtcggccggaccgacgagagcactagaaatgacgagtccagtgagcaagagaataacggtgacgacgctacagccagctcgaaccccctcgccggtcagcggaagctgacctgttcacaagatacactcggctctggcgacttacctttcagtaacgagagtttcatatccgccgattgcaccgatgctgactacctgggcattcccgtggatgagtgtgaacggttcagggagctactcgagctgaaatgccaggttaagtcggcgacaccctatggcctgtactatccctcaggacctctggatgctgggaagtccgaccctgagagtgtcgataaagagctcgaactgttgaatgaggagcttaggtctatcgaattggagtgtctttcaatagtgagggcccataaaatgcagcagttgaaggagcagtaccgggagtcttggatgctccataacagcggctttcgcaactacaatacctccatcgacgtcagaaggcatgaactctctgatatcaccgaactaccagaaaaatccgataaggatagtagtagcgcttacaatacgggggaatcttgtagatcaaccccgcttactctcgagatttctccggacaacagtttgcgcagggccgctgagggcatttcttgtccaagtagcgaaggggccgtgggcacaaccgaagcctatggaccagccagcaaaaatcttctctccataaccgaggacccagaagtgggaacacctacgtacagccccagcctgaaggaacttgatcctaatcagcccctggagtcaaaagaacggcgagcctccgatgggagccgaagcccaactcctagccaaaagctaggaagcgcgtatctgccctcatatcaccacagtccttacaaacatgcccatatccctgctcatgcccagcattaccaatcatacatgcagctgattcagcagaagagcgcagtggagtatgcccagtcccagatgagcctcgtgtcaatgtgtaaagatctctctagtcccacacccagcgaacctagaatggaatggaaggtgaagattcgcagtgatggcacgagatacattacgaaacggcccgttcgcgatcggttgctaagagagagagcattaaaaatacgcgaggaaagaagtggcatgaccacggatgacgatgctgtgagcgaaatgaaaatggggcggtactggtcaaaagaggaaagaaaacagcacctggttaaagctaaggaacaacgccggaggcgtgagtttatgatgcagagcagactggactgcctgaaggagcagcaagcggcagatgacagaaaagagatgaatatcctggagctgtctcacaagaagatgatgaagaagcgtaacaagaagatctttgataactggatgacaatacaggagctactaacacacgggactaagagtccagatggcacccgagtatataactcattcctttccgtcaccaccgtatag

SEQ ID NO: 198838 - DNA, 2367 bp, synthetic construct
  misc_feature 1..2367: note = Description of Artificial Sequence: Synthetic coding sequence
  source 1..2367: mol_type = other DNA
atgaagatggagcacaagcggatgatcctgctgttcagcaagttcactttgatccacaaacctcatgggggacgctggtatctggtgaatgggcgcgatctctcacgggccacccacgatcaggccgtggaggcttttaaaactgccaaagagccaattgtcgtgcaggtcctgcggcgcactccaagaactaagatgtttacaccgccttctgagagccagctcgtcgatacaggcacacaaactgatatcacttttgagcatatcatggcactgactaaaatgtccagtccaagcccgccagtccttgatccttacctgcttcctgaagaacatccttcagcgcacgagtattatgatcccaacgattatattggggatatccaccaggagatggaccgggaagagctagaactggaagaagtggatctttaccgcatgaacagccaggacaaactgggtctgactgtctgttaccgcacagacgacgaagacgacataggaatctatatctcagaaatcgatcctaactccattgctgcaaaagatgggcgaatcagagagggtgatcgtattatacagataaatggcatcgaggtgcaaaacagagaggaggccgtagcccttcttactagcgaggaaaataagaatttctctcttctaatcgcccgtcctgaactgcagctcgacgaaggctggatggacgatgatagaaatgactttctggacgacctacacatggatatgctcgaagaacagcaccatcaggcaatgcagttcactgcttccgtactacaacagaaaaagcatgacgaggacgggggaacaaccgacactgccactattctctccaatcagcacgagaaagactcaggcgtaggcagaaccgatgagagcaccaggaacgatgagtccagcgagcaagaaaacaatggagacgacgctacggccagtagcaatccactggcggggcaacgaaagttgacgtgcagtcaagacacattggggagcggagacttgccgttcagtaacgaatcatttatctctgccgactgcactgatgccgactacctgggcataccggtcgacgaatgcgagcgatttcgagaactgctcgagctaaagtgccaggtgaaaagtgctaccccctacggtttgtactacccttcaggacctttagacgccgggaaatctgatcccgagtcggtcgacaaagagctagagttgctgaacgaagagttgagatctattgagctggagtgtctgagtatcgtgcgggctcacaagatgcagcaacttaaggagcaatatcgtgaaagctggatgttgcacaatagcgggttcagaaactacaacacttcgatcgatgtgcgcagacatgagctgtccgacatcactgaactacccgaaaagtctgacaaggattcctcctctgcatataacacgggggagtcttgccggtccaccccattgactctggaaatatcaccagataactctctgagacgtgccgccgaaggaataagctgcccttcgtctgagggtgcggtcggaaccaccgaggcatacggcccagcctcaaaaaatttgctttccattaccgaagacccagaagtcggcacgcctacatattccccatccctgaaggaactagatccaaatcaacccttagaatcgaaagagagacgggctagtgacgggagccggtctcctactccctctcagaaactgggctctgcctatctgccatcgtaccatcacagtccatacaaacacgcgcatatccctgcccacgcccagcactatcagagctatatgcagctaattcagcagaaatcggccgtcgaatacgcccaatcccagatgagtcttgtttctatgtgcaaagacctatcctctccgaccccaagcgaaccaaggatggaatggaaagtgaaaattcgcagcgacggcaccaggtatatcactaaaaggccggtgcgggaccgcctcctgagagagcgagccttgaagatcagagaggagaggagtgggatgacgactgacgatgatgccgttagcgaaatgaaaatgggccgctactggtccaaggaggaaagaaaacaacacctcgtcaaagctaaagaacagcggcgcagacgcgagttcatgatgcagtcccgtctagactgcctgaaagaacagcaggcagccgatgataggaaagagatgaatatcctggagttgtcccacaagaagatgatgaaaaaaaggaataagaaaatcttcgataattggatgactattcaggagttattgactcatggcacaaagagtccagatggcacgagagtgtataattcatttctttcggtgaccactgtgtag

SEQ ID NO: 198839 - DNA, 2331 bp, synthetic construct
  misc_feature 1..2331: note = Description of Artificial Sequence: Synthetic coding sequence
  source 1..2331: mol_type = other DNA
atgagcggcaagcggcagttcttcctgaagcccctggccctgctgacctgttggccaagtaccgtcaacggaaaagacctgtccaaagcgacccatgaagaagctgttgaggcctttcgaaatgccaaagagcccatcgttgtacaagttttgcgacgaacgcctctgtctcgacctgcatacggcatggcaagcgaggtgcaactcatgaatgctagcacccaaaccgatatcacattcgaacatataatggcccttgctaagctccggccgccgacaccccccgttccagacatatgcccgtttctgctgagcgactcttgccacagtttgcacccgatggaacacgaattctatgaagataacgaatatatctcctcactgcccgctgatgctgaccggaccgaggattttgagtacgaagaagtggaactgtgcagggtgagtagtcaggaaaaactgggcctgaccgtctgctatcggactgatgacgaggaggacacaggtatctatgtttccgaagtcgaccccaactccatagcagccaaagatgggcggatacgggagggcgacaggatcctccagattaacggagaggatgtgcagaatagagaagaggcagtggctcttctgagcaacgatgagtgcaagagaatcgtgctactcgtggcacggccggagatccaactggatgagggatggttggaggacgaacggaacgagttcctggaggagctgaatctggagatgctggaggaagaacataatgaagcgatgcagccaactgccaacgaggtggaacagcccaagaaacaggaggaagaggagggcaccaccgatacggccacatcttcaagtaataatcatgagaaggacagcggggtgggccggactgatgaatcactgcggaatgacgaaagcagcgagcaagagaatgccgctgaggacccaaattctacatccctcaaatctaagagggacttggggcagagccaggataccctgggatctgtggagttgcagtacaatgagtccctggtcagcggggagtatatagacagcgattgtattggtaatcccgatgaggactgcgagaggtttagacaactcctggagctcaagtgcaagattaggaatcatggagaatacgacctctattacagctcttccaccattgaatgtaaccagggcgaacaggagggggtggagcatgagctgcaattgctgaatgaagaattacgcaatattgagctggagtgtcaaaatatcatgcaggcccaccggctgcagaaggtcaccgatcagtacggagacatatggacacttcacgacggcggcttcagaaattacaacacatcaattgacatgcagcggggcaagttggacgatattatggagcaccctgaaaaaagtgacaaggattcctcatccgcatataatacagcggagagttgccgctctaccccactgacagtggatcgctctcctgatagttcactgccaagggtgattaacctcaccaacaaaaaaaatctgagaagcacgatggccgcgacacaatcttcaagcggccagtcaagcaaggagtcaacatcaacaaaggcgaagactaccgagcaaggatgtagcgctgaatctaaagagaaagtcctggaaggaagcaaactacccgaccaggagaaggccgtatccgagcacataccctacctgtctccctatcattccagctcttatagatatgccaatatccccgctcacgctcggcactaccagtcttatatgcagctcatccagcagaaatctgctgtcgaatacgcccagagccagctgtcccttgtgagtatgtgcaaagaaagccagaagtgttcagaaccaaagatggaatggaaagtcaagatccgaagcgacggcaccaggtacatcaccaaacggcctgtgcgggacagaattctgaaagagagggccctcaagatcaaggaagagcgctccgggatgacaacagatgatgataccatgtccgaaatgaagatgggcaggtactggagcaaagaagagaggaagcagcatcttgtgagagccaaggaacaaagaaggcggcgcgaattcatgatgcgttcgagacttgagtgtcttaaggaatccccccaatctggatctgagggcaaaaaagaaatcaacatcatcgaactgtcacataaaaagatgatgaaaaagcgaaataagaagattctggacaactggatgacaatccaggaactgatgacccatggcgcgaaatctcccgacggcacgagagtacacaatgcattcctatcagtcacaacagtgtag

SEQ ID NO: 198840 - DNA, 3111 bp, synthetic construct
  misc_feature 1..3111: note = Description of Artificial Sequence: Synthetic coding sequence
  source 1..3111: mol_type = other DNA
atgggcttcgccctggagcggttcgccgaggccgtggaccccgccctagaatgtaagctttgtgggcaggtgctggaggaaccactctgcaccccttgcggacatgtcttctgtgcctcatgtctgctcccctgggccgtccggcggcggagatgcccactgcagtgtcagccattagcccctggcgagttgtatagagtgcttcccctacgcagccttatccaaaaactgagggtccagtgtgactaccgtgccaggggctgcggccactccgtgcggttgcatgagttggaagcccacgttgagcactgtgatttcggccctgcacgcaggctgcggtctaggggaggttgtgcatccggattgggggggggcgaagttccggcccgtggcggctgcgggccaactccacgcgccggtagaggtgggggagcacgcggaggaccacctgggggcagatggggccggggaagagggccggggcctcgagtactcgcctggcgaagaagggagaaagcactcttggcccagctatgggctctgcagggggaagtgcaactgacagcccgacgatatcaagagaagtttacccagtatatggctcacgttcgtaactttgtaggcgatcttggaggcggccataggcgcgacggggaacacaaacctttcactatcgtgctagagagagagaacgacaccctcggctttaatattattggaggacgcccgaaccaaaataatcaggagggcactagtacagaaggcatctacgtgagcaaaattttagagaacggcccagccgatagagccgatgggctggagatccacgacaagattatggaagtgaatggcaaggaccttagtaaggcaacacatgaagaagccgtagaagcttttcgaaatgccaaggaacccattgtcgttcaagttctgcggcgtaccccacttagtcggcccgcgtatggaatggcatccgaagtccaacttatgaacgcctccactcaaaccgatattacttttgaacacataatggctctggctaagcttcggcctccaactccccctgtgcccgacatctgtccctttttattgtccgactcatgtcatagcctgcaccccatggagcatgaattttatgaggataatgaatatatatcctccctacccgccgatgcagaccgcacagaagactttgaatatgaagaggtggaactgtgccgggtatcttctcaggaaaagctaggtcttaccgtttgttatcggacggatgatgaggaagacaccgggatctatgttagtgaggtcgacccaaacagtatcgcagctaaggatgggcggattagagaaggggatcgaatcctgcaaattaacggcgaggacgtccagaaccgggaagaagcagtagcccttctctctaacgatgagtgcaagaggatcgttctcctggtcgctaggcctgagattcagctcgacgagggctggctcgaagacgaaaggaacgagttccttgaagaacttaatctggagatgttggaggaggagcacaacgaagcaatgcagcccacagccaacgaggtggagcaacctaagaagcaggaagaggaagaaggcaccacagacacagctacttcttcaagcaacaatcacgagaaagatagcggcgtcgggcggacagatgaatccctgcggaatgatgagtcatccgaacaggaaaacgccgccgaggaccctaattccacctccctgaaatctaagcgagatctcggacaaagtcaggacacgctggggtcggtggaactgcagtacaacgagagcctggtcagtggagagtacatcgattccgactgtatcgggaacccagatgaggactgcgaacgattccgccagctgctggagttgaagtgcaagatccggaatcacggagagtacgacctgtactactccagtagtactattgaatgcaatcaaggggaacaggaaggcgtagagcacgagttgcagctgctcaatgaggagctgcgcaacattgagcttgagtgtcaaaacattatgcaagctcatcgacttcagaaagttactgaccagtacggagacatttggaccttgcacgatggcggcttccgcaattataatacctctatcgatatgcagcgtggtaagctggatgatatcatggaacaccctgagaagagcgataaggactcttcctctgcctataatacagcggagagctgcaggtccaccccactgaccgtggataggagccctgatagttcactgccacgagtgattaaccttaccaataaaaaaaatctgagatcaactatggcggctacccagtcttctagcggccaaagctctaaggagagtacttcaacgaaggctaaaaccaccgagcagggatgttctgccgagtctaaggaaaaggtgttggaggggtctaagctccccgatcaggaaaaggccgtgtccgagcacattccctacctcagcccttaccattcctcctcctaccgttatgccaatatcccagctcacgcgcgacattatcagagttatatgcagctcatacaacaaaagtcagcggtggagtatgcgcaatcccagctgagcctggtgtcgatgtgtaaggaatcccaaaaatgttcggagccgaagatggagtggaaagtgaagatccgcagcgacgggacaagatacatcaccaagcgaccagtgcgagaccgcattctcaaagaacgcgctctgaagatcaaggaagagcggagtggcatgacgaccgacgatgatacaatgagcgagatgaagatgggaagatattggtcaaaagaggagagaaaacagcaccttgtgcgcgctaaagagcaacgcagaaggagagaatttatgatgaggtcccgcctggaatgtttgaaggaaagtccccagtccggaagtgaaggcaagaaagaaataaacatcatcgagctgtctcataaaaagatgatgaagaagcgcaataagaaaattctggacaactggatgaccatccaggaactcatgactcacggggccaagagtcccgacggcacacgcgtacacaacgcgttcttgagcgtgaccactgtgtag

SEQ ID NO: 198841 - DNA, 2337 bp, synthetic construct
  misc_feature 1..2337: note = Description of Artificial Sequence: Synthetic coding sequence
  source 1..2337: mol_type = other DNA
atgggctgcaacctgtgcaccttccagaagcgggaggagcactacaaactgttgtatgaagtgtcccaggtgaacggaaaagatttatccaaagctacccacgaggaggcagtggaagcatttagaaacgctaaggagccaatcgtggtccaggtgctgcgacgcactcctctatcccggccagcctacgggatggcctctgaggtgcagttaatgaacgcaagcacccaaaccgacattacatttgagcatattatggccttggccaaacttagacctcccaccccccccgttcctgatatatgccctttcctgctcagcgactcttgccacagcctacacccaatggaacatgagttctacgaagacaacgaatacattagtagtctgccagcagacgccgatcgtactgaagattttgagtatgaagaggtcgagctttgtagagttagttctcaagagaagctcggattgacagtgtgttataggaccgacgatgaagaggacacaggcatatacgtttctgaagtcgatcctaatagcattgctgcaaaggacggccgcatccgcgagggggaccgaattctgcagatcaacggtgaagatgttcagaacagagaagaggcagttgcactactgtcaaacgacgagtgcaagaggatagtgctactagttgcacggcccgaaatccagcttgacgagggatggctggaggacgaacgcaatgaattccttgaagaactgaacttggagatgctggaggaggaacacaatgaggcgatgcagcctactgcaaatgaagtcgagcagcctaagaaacaggaagaagaagaaggaactacagacactgccacaagctcttccaataatcacgaaaaggactcgggcgtgggcagaacagatgagagtctgcggaatgatgaatctagcgagcaggagaacgcagccgaagaccctaactctacatcactgaaaagcaagcgtgacctgggtcagagtcaggacacattagggtccgtggaactgcagtataacgagtccttagtcagcggagaatatatcgattcggactgtataggaaatcccgatgaggattgtgagcggttcaggcagctgctggagttgaagtgcaaaattagaaaccatggcgaatatgacctgtattactcctccagcaccattgagtgtaatcaaggggaacaagagggagttgagcacgaacttcagttgttgaatgaggagcttaggaatatcgagctggaatgtcagaacatcatgcaggctcacagattacagaaggtgacggatcagtacggtgatatttggactctacacgacgggggcttcaggaattacaatacgtctatcgatatgcaacgcggaaagttagacgatatcatggaacatcccgagaaaagtgacaaagatagcagcagcgcctataacaccgccgaatcatgtcgctctacaccactgaccgtcgatcggtctccagatagctccctcccacgcgtcatcaacctgactaacaagaaaaatctgaggtccacaatggcagctacccaaagcagcagcggtcagtcctctaaggaaagcacttctactaaggctaagaccactgagcagggttgcagcgcggagtcgaaagagaaggtactggaggggagtaaattgccagaccaagaaaaggctgttagtgaacatatcccatatttatcgccttaccactccagctcatatcgatatgcaaatattccagcccatgcgagacattaccaaagctatatgcagctcatccagcagaagagcgccgtggaatacgctcagtctcaattaagtttagtctcgatgtgcaaagaatcccaaaagtgttccgagcctaagatggagtggaaggtgaagataagatccgacggaactcggtacattactaaacgacctgtgcgggaccgcatcctcaaggagcgagccctcaaaatcaaagaagaacggagcggcatgacaacagatgatgatactatgagtgaaatgaagatgggaaggtattggagcaaagaggaacgtaaacaacacctggtcagagccaaggaacagagaaggcgcagagagtttatgatgaggtcaagactggagtgtctgaaggagagtcctcagagtggttctgagggaaagaaagagatcaacatcatcgagctcagtcacaaaaaaatgatgaagaagaggaacaaaaagatccttgataattggatgaccatccaggaattgatgacacatggggctaagagccccgatggcacacgtgtgcataacgcttttcttagtgtgacaaccgtgtag

SEQ ID NO: 198842 - DNA, 1158 bp, synthetic construct
  misc_feature 1..1158: note = Description of Artificial Sequence: Synthetic coding sequence
  source 1..1158: mol_type = other DNA
atgaagctggtgcggaagaacatcgagaaggacaacgccggccaggttaccctggtgccagaagagcctgaggatatgtggcacacctataatctggtgcaggtgggtgatagtttaagggcgtctactattcgaaaggttcagaccgagagcagtactggaagcgtgggctctaatagagtgcgaaccaccctgacgctgtgtgtggaagccattgacttcgactcccaagcatgtcagcttagagtcaaagggaccaatatccaggagaacgaatacgtgaagatgggcgcttaccacaccattgagcttgaacccaaccgccagtttacattagcaaaaaagcagtgggactcagtggtactggaacgcattgaacaagcgtgcgatccagcatggagtgctgatgtagcagctgtggtgatgcaggaagggttggcacacatctgcctggtgactccgagtatgaccctgacacgcgctaaggtcgaggtcaacatacctcggaaacgcaaaggtaattgctcacagcacgatcgtgcgctggagcgtttctatgaacaggtagtgcaggccattcagcgtcatattcatttcgatgtggtcaaatgcatcctagtggcgtcacccggattcgtccgggaacagttttgcgactatttgtttcagcaggctgtgaaaactgataataagttactcctcgagaatcgcagcaaatttctgcaggtccacgccagttctggtcataaatactctctgaaagaggctctgtgcgaccccacagtggccagccggctgtcagacaccaaggccgccggcgaggtcaaggcgctggacgacttttataagatgctccagcacgagcctgaccgcgccttctatggactcaaacaggtagagaaggcaaatgaggcaatggccattgacacgttattgatttctgatgaactgtttcgccaccaggatgtcgccaccaggtcaaggtatgtacggcttgtggatagtgtgaaagagaatgcagggaccgtaagaattttcagctctctgcacgtgtctggcgagcagctctctcagttgacgggagtcgcagcaatccttaggttcccagtgcccgagcttagcgaccaggagggcgacagcagcagcgaagaagactag

SEQ ID NO: 198843 - DNA, 855 bp, synthetic construct
  misc_feature 1..855: note = Description of Artificial Sequence: Synthetic coding sequence
  source 1..855: mol_type = other DNA
atggccagctacccctaccggcagggctgccccggcgccgccggccaggctccaggcgcacctccagggagttattacccagggccgccaaactcaggtggacagtatggcagcggtctgcccccaggcggcggttatggaggacctgcgccagggggcccgtatgggccaccggctggcggcggcccatacggccatcctaacccgggaatgttcccatcaggcacacccggtgggccctacggaggtgccgcccccggtgggccctatggacagccacccccctcaagctatggcgctcagcagcctggcctgtacgggcagggcggtgcacccccaaacgtggacccagaagcgtacagctggttccaatctgtcgacagtgaccatagtggctacatctccatgaaggagttgaagcaggccctggtgaactgtaactggtctagtttcaatgatgagacctgtttgatgatgatcaacatgttcgataagacaaaatccgggcgcatagatgtgtacggattcagtgcgctgtggaaattcattcagcagtggaagaatttattccagcagtatgaccgggataggtccggcagcataagttatactgaacttcaacaggcattgtctcagatgggctataacctgtctcctcaatttacccagcttctggtgagtcgctactgccctcgatccgccaaccctgccatgcagttagatcgctttatccaggtatgcacgcaattacaagtgcttactgaggcttttagagagaaggatacagccgtgcagggtaatatcagattaagtttcgaagacttcgtaactatgacagccagcagaatgctttag

SEQ ID NO: 198844 - DNA, 423 bp, synthetic construct
  misc_feature 1..423: note = Description of Artificial Sequence: Synthetic coding sequence
  source 1..423: mol_type = other DNA
atggccagctacccctaccggcagggctgccccggcgccgccggccaggcaccgggggcacctccaggtagctattatcccggccccccaaactcagggggtcagtacggatctggactgcctcccggtggtggatatggtggtcctgcacccggcgggccttacggaccacctgccgggggaggtccatacggccacccgaatcccgggatgttccccagtggcaccccaggggggccctatggcggagccgcccccggcggtccttacggccagccacccccttcctcatatggagctcagcaacccggactctacggccagggcatccatgctgagggagcagcacccgtatgggatatgctgtctttgtggcagagagagggtgccggagagctcgcacggatgcataatgctagttag

SEQ ID NO: 198845 - DNA, 1146 bp, synthetic construct
  misc_feature 1..1146: note = Description of Artificial Sequence: Synthetic coding sequence
  source 1..1146: mol_type = other DNA
atgcacctgctggccatcctgttctgcgccctgtggagcgccgtgttggctgagaactcagatgactacgatctgatgtatgtgaacttggacaatgagatcgataatggtcttcacccgacagaagacccgacaccctgcgcctgtggacaggagcacagcgagtgggacaaactcttcattatgttggaaaatagccaaatgcgcgagcgtatgctgctgcaggcgacagacgatgtactgcgaggggagctgcaacgactaagggaagagttgggaagactggctgagagcctggctcggccctgcgccccaggtgcccctgctgaggcacggctcacgtcagctcttgatgaactgttacaggcaactagagacgcaggaaggagactcgcacgaatggaaggagctgaggcacaacgacccgaggaggctggcagggcgttagcagccgttctggaggaactgaggcaaactagagcagatctccatgctgtccaaggatgggccgcccggtcttggctccctgccggctgcgaaactgcaatcctgttccctatgcgctccaagaagatcttcggcagtgtccaccccgtaagaccaatgcgcttggaaagctttagcgcatgcatctgggtgaaagccactgatgtgctgaataaaactatcctattttcttatgggacaaagaggaacccatacgagatccaactctacctgtcataccaatcaattgtgttcgtggttggaggcgaagagaataagctagtagcagaggcaatggtgtcattaggacgctggacccacttgtgcggtacttggaacagcgaggagggcctaacttccctgtgggtgaacggcgaactggcggccaccactgtcgagatggctacaggtcacatcgttcccgagggcggcatcctacagatcggccaggagaagaacggatgttgcgtgggaggaggcttcgacgaaactctggcgttcagcggcagactaaccggttttaacatatgggacagtgttctctccaacgaagagatcagagagacaggtggggccgagtcctgccacattaggggcaatatcgtggggtggggggttaccgagatacagcctcatggtggggcacagtacgtgagttag

SEQ ID NO: 198846 - DNA, 1422 bp, synthetic construct
  misc_feature 1..1422: note = Description of Artificial Sequence: Synthetic coding sequence
  source 1..1422: mol_type = other DNA
atgggcagcggcaactgggaggtgaccggccccccctgcggcagccggtgcgagcggcctcctggtctgcctagaggagttcatggccaattcagaagcgctgtcggcttgtccggcctcaggtggtttagacgtttccaagaagtgacgtggacacacttgcagaacattgcttccaattataatgtgtcctataacgttgatgtccgcttcaggagcttagccgaagagtcgcaggctgtggcccaagccgttaaccggtcccaggcctctgtccagggagagctagcgcaactgaaggcctgggttcggaagctgcagcggcgcggcagaaaggtcgatacacgacttcgggccttagatctaacgctcggagaacgcagccagcagcgggcacgggaacggaaggcccacaaagctcagcgggacgccctccaggacagcctggcccggctcgagggtctggtccatagccagggtgcacgcctcgcagctctggagggccgtttgcccgttgcccaccccggaaccgccgctctgggacctgccttggtccccacccctactcaaccagaggaactgggcccaacttctcttaaacttcagagagatcgccaggagctccgcgccgcttctgaacatcgaggtccaccccaggattctagcgcccctctgcaaggacggcgggaaccccctgcctctggctctcaccgggtgctgtccggcactgcccccaaagatcctcgccaacaggcctggtctccacaggttcctggggagatctgcggagttggaccaacgctggtcttccccaatgcatccacacggaatgtcgtgtttctctccccaggttttgttacggctctgagggcactgtcgttttgctcctgggtccggactgccagcggccgcctcggcacgctcctgtcatacgccactgaggataacgacaataagttggtactccacggtcgtgattcactgctgcccggcagcattcacttcgtaatcggggatcccgcattccgcgaacttcccctgcagttgctgcttgacggccaatggcaccacatctgtgtcatctggacctccacccagggacgatactggcttcacgttgatcgcaggctggtggccactggaagccgattccgggagggatacgagattcccccaggcgggtctctggttctgggccaggaacaggactctgtgggggggggttttgactcaagcgaggccttcgtgggaagtatgtctggcttagctatctgggacagggcactggtgcctggggaggttgcgaatctggcgatcgggaaagaatttccaactggagccattttgaccctggcaaacgcagctctggccggcgggttcgtgcagggcgctaattgcacctgtctggagagatgtccgtag

SEQ ID NO: 198847 - DNA, 1437 bp, synthetic construct
  misc_feature 1..1437: note = Description of Artificial Sequence: Synthetic coding sequence
  source 1..1437: mol_type = other DNA
atgggctgcagctggcggaagaccctgagcttcttcctggtgttcgtccccatatacctgcacggagcttcatctcaagaggccgcgccagtcggcccgcgcaagccgttctttgaacggctgagacgcttagaggagcagttccgccgcttccaggaggtgacctggacccatttacagaacattgcaagtaattacaacgtctcttataacgtagatgttcgattccgttccttggccgaggaatcccaagcagttgcccaagcagtgaacagaagccaagcgtcggttcagggcgaattagcccagctgaaagcttgggtccgaaagctgcagcggaggggccggaaagttgacactcgactacgagctctcgatctgaccctgggggagaggtctcagcagagggccagagagcgaaaagcccacaaggcccagcgcgatgccctccaggactctctcgctcggctggaggggctcgtccattcacaaggggctcggttggctgccttggagggaagactgcccgtggcacatcccggcacagcagcattgggccctgcactcgtacctaccccaactcagccagaagaactcggcccaacttccttgaagctccagcgcgatagacaggagctacgcgccgcctccgagcacagaggccctccacaggacagcagcgccccactacagggtcggagggaaccccccgcgtccgggtctcaccgcgtgctctcgggtactgcaccgaaggaccctcgtcagcaagcttggtctccccaggtacccggcgaaatctgtggagtgggtccaacattggtgtttcctaatgcatcaacaaggaacgtggtttttctgagccctggattcgtgactgctcttagggccctgagcttttgctcctgggtacgcactgcatctggcagactggggacattgctgtcttacgcgacagaagataacgataataaattggtattgcacgggcgggatagcctactaccagggtccattcattttgtgattggcgacccagccttccgggagctgccacttcaactcttgcttgacgggcaatggcaccacatttgtgtgatctggaccagcacacaggggcgatactggcttcatgttgaccggcggctcgtggccacaggcagccgctttcgagaggggtatgaaattccccccggcggttcccttgtgcttggtcaagagcaggattccgtgggcggcggattcgacagctccgaggcatttgtggggtctatgagcgggttggcaatctgggaccgcgccctcgtacctggagaggtggccaacttggccataggaaaggaatttccgacaggcgctatcctgacacttgctaacgctgctctcgccggcgggtttgtccagggagcaaactgcacatgtctggagagatgtccctag

SEQ ID NO: 198848 - DNA, 1167 bp, synthetic construct
  misc_feature 1..1167: note = Description of Artificial Sequence: Synthetic coding sequence
  source 1..1167: mol_type = other DNA
atgaagtggctgctgctgctgggcctggtggccctgagcgagtgcattatgtataaagtgcccctaatcagaaagaagtccctgaggagaactttaagtgaacgggggctgctgaaagacttccttaagaaacacaatcttaaccccgccagaaagtattttcctcaatggaaagctcctacactggtggatgagcagcctttggaaaattacttagacatggagtacttcggcactatcggcattgggacacccgcacaggatttcacagtggtatttgatacaggctccagtaacctttgggtccctagcgtttactgctcatccctggcctgcacaaaccacaacaggttcaatccagaggattcgagcacttaccaatccacatccgagacggtcagcattacctacggaacgggtagcatgacaggcattcttggctacgacactgtccaggtgggaggcattagcgacacaaaccagatttttggactctcggaaaccgagcctggatctttcctgtactatgccccattcgacggcatcttgggcttggcctatcccagtattagtagctcaggggcaacgcctgtgttcgacaacatatggaatcaggggctcgtgagccaggatcttttctccgtttatttgagcgctgacgatcagtcgggaagcgtagtgattttcggcgggatcgacagctcttattacacggggtcattgaattgggtaccagtgacggtcgagggctactggcagatcacggtcgactccattacgatgaacggtgaagcgatcgcttgtgcagagggatgtcaggccatcgtcgatactggaacttctttgttaaccgggcccaccagccctatcgccaacatccagagcgacatcggagctagcgagaatagtgacggcgatatggttgtctcttgtagcgccatttcatcactgcctgatatcgtatttacaataaatggggttcagtaccccgtgccccctagtgcctacatcctgcaaagtgagggctcttgtatctcagggtttcagggcatgaatctcccaacagaatccggcgagttatggattctcggcgacgtcttcatacggcagtattttaccgttttcgaccgcgcgaacaatcaggtgggcctggcacccgtcgcttag

SEQ ID NO: 198849 - DNA, 849 bp, synthetic construct
  misc_feature 1..849: note = Description of Artificial Sequence: Synthetic coding sequence
  source 1..849: mol_type = other DNA
atgaagtggctgctgctgctgggcctggtggccctgagcgagtgcatcatgtataaggtaccactcattcgcaagaaaagtttaagacggaccctgagcgagcggggactcctgaaggattttctaaagaaacataacctgaaccctgcaaggaagtatttccctcagtggaaggctccaaccttagtcgacgagcagcctcttgaaaattatttagacatggaatacttcggaactatagggatcggcacccccgctcaggatttcaccgtggttttcgataccggcagtagcaacctctgggtgccatcagtctattgctcttccttggcgtgtaccaatcataatcggtttaatccagaagactcaagcacctaccagagcacatccgagaccgtcagcatcacctatgggactggttcgatgaccgggattctcgggtatgataccgtacagacagttgcgatctggaggtccgctgcaatggggctagtgtctcaggacctgttctccgtttatctcagtgcggatgaccagtccggtagcgtggtgatctttggagggattgactcatcctattacaccggatcacttaattgggtcccggtgacagtggaaggatattggcagattacagttgatagcattaccatgaatggagaagccatcgcatgtgctgagggatgtcaggccattgtggacacaggcacatcactgttaacggggcctacaagcccgatcgccaacatacagtctgatatcggagcgagcgaaaactcagacggggatatggtggtgtcatgttcagccatctcgtcccttccggacatcgtgtttaccatcaactag

SEQ ID NO: 198850 - DNA, 750 bp, synthetic construct
  misc_feature 1..750: note = Description of Artificial Sequence: Synthetic coding sequence
  source 1..750: mol_type = other DNA
atgaccggcatcctgggctacgacaccgtgcaggtgggcggcatcagcgataccaaccaaatctttggcctcagcgagacagagcccggtagttttctgtactatgccccctttgatggaattctcgggctggcatatcctagtattagcagctccggcgcaaccccagtctttgacaatatctggaaccagggactggtgtctcaagatctgttcagtgtctacctctccgccgacgatcagtctggtagtgtggtgatttttggcgggatcgattccagctactacacagggagtctgaattgggtccccgtgactgtagaaggatattggcagatcaccgtggattcgatcaccatgaatggcgaggctatcgcctgtgccgagggctgtcaggccatagtggacaccggaaccagtttattgaccggcccaacctcgcctatagccaacattcagagcgatattggggcaagcgagaacagtgacggcgacatggtcgtctcatgctcagcgatttcttcccttcccgacatagtgttcacaattaacggagtgcaataccctgtgccaccctccgcctatatcctgcagctgccctctgagggctcttgtatttccgggttccagggaatgaacctgcctactgaatctggtgagctgtggatcttaggggacgtgttcataaggcagtactttactgtgtttgaccgtgctaataaccaggtgggcctggcgcccgtcgcttag

SEQ ID NO: 198851 - DNA, 1167 bp, synthetic construct
  misc_feature 1..1167: note = Description of Artificial Sequence: Synthetic coding sequence
  source 1..1167: mol_type = other DNA
atgaagtggctgctgctgctgggcctggtggccctgagcgagtgcataatgtataaagtgcctctcatccgcaagaagagcctgaggaggacactgagcgaaagagggcttctcaaggacttcctcaagaagcataatctcaatcctgcaagaaagtacttcccgcagtgggaggctccgactcttgttgatgaacagcctttggagaattaccttgacatggaatacttcggcactatcggcattggtacacctgcacaggatttcaccgttgtgtttgataccggctcatcaaacctttgggtccccagcgtctattgctctagcctggcttgcaccaatcataatcgtttcaaccccgaggacagctccacatatcagagcaccagcgagaccgtcagtattacatacggcacgggaagtatgacgggcattctgggatatgacaccgtgcaagttggaggcataagtgacaccaatcagatctttggactttcagagaccgaaccgggatccttcctttactacgcccctttcgatggtatcctcggcttagcctatcccagtatttcttcttccggagccaccccagtgtttgacaatatctggaatcagggattggtgagccaagacttatttagcgtgtacctctcagccgacgatcaatcagggagcgtggtgatattcggggggattgactccagctattatacaggttctctgaactgggttcccgtgactgttgagggctactggcagattacagtggatagtattacaatgaacggagaggccatagcctgtgcagagggctgccaagccatagttgatacaggtacctcccttctcaccggcccaacttctccgatagccaatatccaaagcgacataggcgcaagtgaaaactctgacggcgatatggtggtcagctgctccgcaatttcaagcctccccgacattgttttcactatcaatggcgtgcagtacccggtgcccccctccgcatacattttgcaatcagaagggtcttgcatcagcggctttcaggggatgaacctacctaccgaatcaggcgaactttggatactcggggacgtgttcattcggcaatacttcacagtcttcgaccgggccaataatcaggtaggactcgctcctgtggcatag

SEQ ID NO: 198852 - DNA, 1167 bp, synthetic construct
  misc_feature 1..1167: note = Description of Artificial Sequence: Synthetic coding sequence
  source 1..1167: mol_type = other DNA
atgaagtggctgctgctgctgggcctggtggccctgagcgagtgcattatgtataaagtgcctctcatacggaaaaagtccctccggcggactctgagtgagaggggactgctgaaggatttcttgaaaaagcacaatctgaaccccgctcggaagtattttccacaatgggaagcgccaacgctggtagacgaacagcccctggaaaattacctcgatatggagtacttcggaactatcggaatcggaactcccgcccaggacttcacagtggtgtttgacactgggagttccaacctgtgggtcccatctgtgtactgtagttcccttgcgtgcaccaatcacaaccgatttaatcctgaggatagttctacgtatcagagtacctctgagacggttagcattacgtatgggaccggttctatgaccgggatacttggatacgatacagtgcaggtcggggggatttctgatacaaaccaaattttcgggctcagcgagaccgagcctggttcctttctgtattacgctccatttgacggaatcctaggccttgcgtatccaagtatcagctcctctggggccactccagtgtttgataatatctggaaccaggggctggtcagtcaggacctgttcagcgtgtatctgtcagctgacgacaagtctggatctgtggtgatttttggaggcattgattcaagctactacaccggatcactgaactgggtcccagtgaccgtagagggttactggcagatcacagttgattcaattaccatgaacggtgaaacaatcgcttgtgccgaaggttgtcaagcgattgtggacacagggacttcactgctcaccggtcccacttctcccattgccaacattcagagtgacatcggagcttccgagaattccgacggcgatatggtcgtttcatgcagtgcgatctcatcgcttccagacatagtctttactattaacggagtgcagtatccggtcccaccctccgcctacatactccagagcgaaggtagctgtattagcggtttccagggtatgaacgtgccgacagagtccggagagttatggatattgggagatgtatttatccgacaatacttcactgtattcgatcgtgccaacaaccaggtggggctagccccagtggcctag

SEQ ID NO: 198853 - DNA, 849 bp, synthetic construct
  misc_feature 1..849: note = Description of Artificial Sequence: Synthetic coding sequence
  source 1..849: mol_type = other DNA
atgaagtggctgctgctgctgggcctggtggccctgagcgagtgcatcatgtataaggtgcctctgattcgcaaaaagtcgctcaggcgcactctgagcgagcgcggcctactaaaggacttcctaaagaagcacaatctgaacccagccaggaagtattttcctcagtgggaagcgcccacattggttgatgaacagccactcgaaaattacctggacatggagtatttcggtacgataggcataggaaccccggcccaagatttcaccgtggtcttcgataccgggagctcgaacctgtgggtcccgtctgtgtattgcagtagtctcgcctgtacaaaccacaaccgctttaatcctgaggatagcagtacctaccaaagcacaagtgaaacagtctcaattacttatggcactggctccatgacagggatactaggctatgacacagtgcaaaccgtggccatatggaggtctgccgccatgggcctcgtctctcaagacctgttctctgtgtatttgagcgccgacgatcagtccggaagcgtcgtgatcttcgggggaattgacagtagctactacacaggttccctgaactgggtccccgtgactgttgaaggatactggcagattacagtggacagcatcaccatgaatggagaagctattgcctgtgcagaggggtgtcaagcaatcgtggataccggcacatctttattgacgggccccacctcccctatcgcaaatatccagtccgatattggagcaagcgaaaatagtgacggcgatatggtcgtgtcatgcagtgccattagctctctcccagatattgtgttcactatcaattag

SEQ ID NO: 198854 - DNA, 750 bp, synthetic construct
  misc_feature 1..750: note = Description of Artificial Sequence: Synthetic coding sequence
  source 1..750: mol_type = other DNA
atgaccggcatcctgggctacgacaccgtgcaggtgggcggcatcagtgataccaaccagatcttcggtctctccgagaccgagcccggcagcttcctttattatgccccctttgacggcatcctaggcctggcctaccctagtatttcctcttctggtgcgacccctgtgttcgacaacatctggaaccagggacttgtgagccaagacttgttctccgtgtatcttagcgccgatgatcagtcgggaagtgttgtgattttcggcgggatcgacagcagttactacactgggagcctcaactgggtgcccgttacagttgagggatactggcagattacagttgatagcattacaatgaatggtgaagcgatagcttgtgctgagggctgtcaggctattgttgacactgggacttcactactgactggcccaacatctcccattgccaacatccagtcagatatcggcgctagcgaaaattcagatggggatatggtggtatcttgttctgccattagcagcctgccagatatcgtgttcacgatcaacggggtgcagtatcccgtgccccccagcgcttatatactgcagctaccctcagaagggagctgcatctcagggtttcaagggatgaatttgcctacggagagtggagagctctggatcctcggagacgtctttatacggcaatactttaccgtcttcgatcgagcaaacaaccaggttggtctggctcctgtggcatag

SEQ ID NO: 198855 - DNA, 1167 bp, synthetic construct
  misc_feature 1..1167: note = Description of Artificial Sequence: Synthetic coding sequence
  source 1..1167: mol_type = other DNA
atgaagtggctgctgctgctgggcctggtggccctgagcgagtgcataatgtataaggttcccttgattcgtaaaaaatctctgaggcgaacgttatccgaacgtggactactcaaggattttctgaaaaagcataatctcaatccagcaagaaagtatttcccacagtgggaggcgcctaccctcgtggacgagcaacccctcgagaactatctggatatggagtactttggaaccatcggaatcggaactccagctcaggacttcaccgtcgtgtttgataccgggtccagtaacctgtgggtgccatccgtctactgctctagcttggcatgcaccaaccataaccggttcaaccctgaggactcctctacctaccagtctacatctgaaactgtgtccataacatatgggacagggagtatgactggaatcttggggtatgataccgtgcaggtcgggggtatcagtgatactaaccagatttttggcctctcagaaactgagcccggcagcttcctttactacgccccatttgatggcatcttaggcctggcctatccgtctataagtagcagcggggcaacaccagtttttgacaacatttggaatcagggtttagtttctcaagacctgttctctgtctatctctccgcagacgacaagagtggctccgtcgtgattttcggcggtattgactcatcgtactatactggtagtcttaattgggtgcctgtaactgtagaggggtattggcagatcacggtggacagcataaccatgaacggcgagaccatcgcctgcgctgaaggctgccaggccatcgtggacacgggcacaagccttctcaccggcccaacatccccaatagctaacatacagagcgacattggcgcatctgagaattcagacggcgatatggtagtctcatgcagtgctatcagttccctgcccgatattgttttcactataaatggggtgcagtatcccgtcccaccatcagcctatatccttcagtcagaaggctcctgcattagcggattccagggcatgaacgttccaacggaatccggggagctgtggattctcggggacgtgtttattcggcaatacttcaccgtatttgaccgagctaataatcaggtaggactggccccagttgcctag

SEQ ID NO: 198856 - DNA, 849 bp, synthetic construct
  misc_feature 1..849: note = Description of Artificial Sequence: Synthetic coding sequence
  source 1..849: mol_type = other DNA
atgaagtggctgctgctgctgggcctggtggccctgagcgagtgcatcatgtacaaggtccccctgatcaggaagaagagtttacgcagaacactatctgagcggggcctgctgaaagatttcctcaaaaagcataacctaaacccagcccgcaagtatttcccccagtgggaggcccccaccctagttgacgagcagccattagaaaactacctggatatggaatatttcggaacaatcggcattggtactcccgcccaggattttactgtcgtattcgataccggcagttcaaatttgtgggttccaagcgtgtattgctcaagcctggcctgcactaaccataatcggtttaatccagaggacagctctacctatcaaagtacatcagaaacagtcagtattacgtatgggaccgggtccatgacaggcattctcggctatgatacagtccagaccgtagctatctggcgctctgctgcaatgggcttggtcagccaggacctgttttcagtgtacctttctgctgatgataagtcggggtccgtggttatttttggcgggatcgactcctcatactatacagggtccctgaactgggtgcctgttaccgtggaggggtactggcagataactgtggattcgatcacaatgaacggtgagactattgcatgcgctgagggttgccaggccatcgttgacactgggaccagcctcctaacaggaccaacatcccccatcgccaacatccagagtgacattggcgccagtgagaattctgacggcgatatggtcgtgtcatgcagtgcaattagttccctgccagatatcgtctttacaattaactag

SEQ ID NO: 198857 - DNA, 750 bp, synthetic construct
  misc_feature 1..750: note = Description of Artificial Sequence: Synthetic coding sequence
  source 1..750: mol_type = other DNA
atgaccggcatcctgggctacgacaccgtgcaggtgggcggcatcagtgatactaatcaaattttcggactcagcgagacggagccaggaagctttctctactacgcaccgtttgatggcattctgggcttggcctacccctcaatatcaagctctggggcgacacccgtttttgacaacatctggaatcagggccttgtgagccaggacttgttctcagtgtacttgtctgccgacgataagtccgggtctgtggtgattttcggcgggatagactccagttattatacaggtagcctgaattgggtccctgtgacagttgaaggctattggcaaatcacagtggattctataaccatgaacggcgaaacaattgcctgtgcagaaggttgccaggctatcgtcgatacaggtacctccctgttaaccgggcccacgtccccaatagctaatatccaatcagacatcggagcctctgagaattccgatggggacatggtcgtgagctgctcagccatctcaagcctcccagacatagtgtttactattaacggagtacagtatcccgtccctccatctgcatacatactgcagctgccttccgaggggtcttgtatcagcgggttccagggtatgaacgtacctaccgagtccggggaactatggattttgggcgacgttttcatcagacagtactttaccgtgttcgatcgcgcgaacaatcaggttgggctggctcctgttgcttag

SEQ ID NO: 198858 - DNA, 1578 bp, synthetic construct
  misc_feature 1..1578: note = Description of Artificial Sequence: Synthetic coding sequence
  source 1..1578: mol_type = other DNA
atggccgccgtggtgctggccgccacccggctgctgcggggcagcgggtcttggggctgcagcagactgcgatttgggccccctgcctacagacgtttttcgtctggcggtgcataccccaacatccctctcagctcaccgcttcctggagtacccaagccagtgtttgcaacagtggatggacaggaaaaattcgagaccaaagtaacaacactagataatggcctgcgcgttgcaagtcagaacaagtttgggcagttctgtacggtgggtatactgatcaatagtggcagccgttacgaggctaaatatctctccggaatcgctcatttcctggaaaagctagccttttcctcaaccgcccggtttgactctaaggacgagatcttgctcacactcgagaagcacggggggatttgtgattgtcaaacctctcgcgacacgacgatgtacgctgtttccgcagattccaaagggttggacactgtggttgctctgctggccgacgtggtattacaaccccgccttacggatgaggaggtcgaaatgacaaggatggcggtgcagttcgagttagaagacttaaacttgcgcccggaccctgagccgctgctgaccgagatgatccacgaagccgcttatcgcgaaaatactgtgggccttcacaggttttgccctaccgaaaatgtggctaagatcaatagggaggtgctgcatagctacttaagaaactattacacacctgaccgtatggtcctggcgggcgtgggcgtcgagcacgaacaccttgtcgactgtgctaggaagtacttgctaggcgtccaaccagcttggggcagcgccgaggctgtcgacattgaccgttctgttgcccagtacactggcggaattgccaagctggaacgcgatatgagcaatgtttccctgggacccactcctatcccagaactcactcacatcatggttgggctggaatcatgctccttcttggaagaggacttcatcccctttgccgtgctgaatatgatgatgggagggggagggtccttctcagccggggggccggggaaaggaatgttcagccggctgtacttgaatgtgctcaaccggcaccactggatgtacaatgctacctcatatcaccactcctatgaagacacagggctgctgtgtatccatgcctctgctgacccaaggcaagttcgagaaatggtcgagattattaccaaagagtttatcctgatgggagggaccgtggacaccgtggagttggagagagccaagacccaactgacttcaatgctgatgatgaacctagaatcgaggccagttatattcgaggatgttggtcggcaagtgctagcaacgcgcagccggaaactgccccatgagctgtgcacacttatccgaaatgtcaaacccgaggatgtcaagcgcgtagcatccaagatgctcagaggtaaaccagcagtcgctgccctcggggacctgaccgatttgccaacctatgagcatattcaaacagccttatcgtccaaggacggccgcttgccccgcacctaccggctctttcggtag

SEQ ID NO: 198859 - DNA, 441 bp, synthetic construct
  misc_feature 1..441: note = Description of Artificial Sequence: Synthetic coding sequence
  source 1..441: mol_type = other DNA
atggccgccgtggtgctggccgccacccggctgctgcggggcagcggcagttggggatgtagtagattgcggttcgggccgccagcgtacaggcgcttttcatccggtggtgcttatccaaacattcccctctcctctcccctcccgggtgtaccaaagcctgtctttgccaccgtggatggccaggagaagtttgagacgaaggtcacaactctggataacggactgagagtcgcttcacagaacaagtttggacaattctgcaccgtagggattcttattaattcaggcagtcggtacgaagcaaagtatctctcaggcatagcccattttcttgagaagctcgctttttcctccacagctcggtttgacagcaaggatgaaattctcctgacacttgagaagcatgggggaatctgcgattgccagacttctcgttag

SEQ ID NO: 198860 - DNA, 1185 bp, synthetic construct
  misc_feature 1..1185: note = Description of Artificial Sequence: Synthetic coding sequence
  source 1..1185: mol_type = other DNA
atgaagcggaacaccctggtggagctgctgaccttctggaagaactggcatttcagactcctgctggatctgacagcaaaaatgaagttctgtctgcggtggaaatcaatgggcgtgtcggtgacagccaggcaccaagacgaggaggttgagatgacccgtatggctgtgcagtttgaactggaagatctgaatctgcgacccgatcccgagcctttgttgacagaaatgatccacgaggctgcctacagagaaaatactgtggggctacataggttttgtccaaccgagaacgtggccaaaattaatagagaggttttgcacagttatctgcggaactattacacccctgatagaatggtccttgccggcgttggagttgaacacgagcacctcgtggactgtgcacgcaaatacttgctcggcgtacagcccgcttgggggtctgcagaggcggtggacatcgatcgatcggtggcccagtacactggtgggatagccaaactagagcgcgacatgtctaacgtgagcctgggtcccacccccattcccgagctcacccatatcatggtgggactcgaaagttgcagttttttggaggaggatttcatccccttcgcggtgctcaatatgatgatgggtggcggcggcagcttcagcgctggcggcccggggaagggtatgttttcccgcctttatctgaacgttctgaatcgccatcattggatgtacaacgccacctcttatcaccactcctacgaggacacgggattactctgcattcacgccagcgctgatccaagacaggttcgggagatggtggagattattactaaggagtttatactaatgggcggaaccgtcgatacagtggaattggaacgggcgaagacgcagcttacctcgatgctcatgatgaatctagagtcccggcccgtaatctttgaggacgtaggcaggcaggtccttgcgacacggtctagaaaacttccacacgaattgtgtacacttattcgtaacgtcaaacctgaagacgtcaaaagagtggcctctaagatgctgcggggtaagccagccgtagctgccctgggtgacctaactgacctgccaacctacgaacatatccaaaccgctcttagctccaaggacggaagactccctagaacatatcggttgttccgatag

SEQ ID NO: 198861 - DNA, 816 bp, synthetic construct
  misc_feature 1..816: note = Description of Artificial Sequence: Synthetic coding sequence
  source 1..816: mol_type = other DNA
tacaccggcggcatcgccaagctggagcgggacatgagcaacgtgtctctaggaccaactccgatcccagaactgacacacatcatggtgggcctggaatcgtgcagctttctggaggaggattttatcccttttgccgtacttaatatgatgatgggaggcggagggagcttctcggccggaggaccaggtaagggaatgttttctagactgtacctcaatgtgcttaaccgacatcactggatgtataacgccacatcctatcaccacagctatgaagatacggggttgctttgcatccacgcatctgctgatcctcggcaggtacgtgaaatggttgagataattactaaagagtttatattgatgggaggtacagtcgatacggtggagcttgagagggctaaaactcagctcacctctatgctaatgatgaacctcgagagcagacccgtgatcttcgaagacgtgggcaggcaagttctagccacgagaagtcgcaagctgccccacgaattgtgcaccttgatcagagagtatcggaggggatccgagggattgccccaggccagcgcaagactgcgaggcggcagactggcgcttccccaggctgttgtggggttatggtacgtgcatcacacccagaatttggggccgagccctgtcgtcttatccagaggcgggcaggggcaggggcgtggggtggctgatctcgtttccttaccaggcccaaccatgcaccttcttccaccctggcaggtcacgccgccctctgcaccattaggcggggccgtcacaactgcccagtcctgctag

SEQ ID NO: 198862 - DNA, 1482 bp, synthetic construct
  misc_feature 1..1482: note = Description of Artificial Sequence: Synthetic coding sequence
  source 1..1482: mol_type = other DNA
atggccgccgccaccggccccagcttctggctgggcaacgagaccctgaaggtcccgctggccctcttcgcattgaatcggcagcggctgtgtgagcgactgaggaaaaatcctgctgtgcaggccgggtcgatcgttgttctgcagggtggtgaggagactcagcgctactgtaccgataccggggttcttttcagacaggagtccttttttcactgggccttcggcgtgaccgagccaggctgctacggcgtcattgatgtggatactggaaaaagcacgttatttgttccaaggctgcccgccagccacgctacatggatggggaagatccactccaaggaacacttcaaggaaaagtatgctgtggatgacgtccaatacgtcgacgaaatcgccagcgttcttacgagccagaaacctagcgtgctgcttactctgcgcggagtcaatacggattcgggatccgtgtgtcgagaggcctcattcgatgggatttcaaaattcgaggtgaataataccatcttacatcctgagatcgtcgagtgcagagtcttcaagactgatatggaattggaagtgctgcggtacaccaacaagatatcaagtgaagcccatcgtgaggtgatgaaggcagttaaggtcggtatgaaagagtacgaactagagtccctgttcgaacactactgctattccaggggtggcatgagacactcgtcttacacctgcatctgcggaagtggggaaaatagcgcagtcctgcactacggacacgctggcgctcccaacgaccggaccatccaaaatggcgatatgtgcctattcgatatgggaggtgaatattactgttttgcaagtgacattacatgttctttcccggccaacgggaagtttaccgctgaccagaaagctgtgtacgaggcggtcctgcgttcctcccgggctgtcatgggcgcgatgaagccaggagtttggtggccagacatgcatcgtctggcagaccggatccacctagaggagctggcccacatgggtatactgagcggctcagtggacgccatggtccaggctcatctgggggcagtgttcatgccccacggcttgggccatttcctggggatcgacgttcacgacgttgggggctatcccgaaggggtcgagcgaattgacgagcccggactcaggtctctgcggacagcccggcacctacagccaggcatggtgctgactgtggaaccggggatatacttcatcgatcacctcttggatgaagccctggccgaccccgcgagagcttcctttctcaatcgtgaagtgttgcagagattccgcgggttcggcggagtgcggattgaagaggatgtcgtcgtcaccgattccggaattgagctgttgacttgtgtgcctcgcaccgtggaagagatagaggcttgtatggctggatgcgacaaggcttttacccctttttctggaccaaagtag

SEQ ID NO: 198863 - DNA, 1359 bp, synthetic construct
  misc_feature 1..1359: note = Description of Artificial Sequence: Synthetic coding sequence
  source 1..1359: mol_type = other DNA
atggccgccgccaccggccccagcttctggctgggcaacgagaccctgaaggtacctctggccctgtttgccctgaacagacaacggttgtgcgaaaggttgcgaaaaaaccccgcagtgcaggcaggcagcatcgtcgttcttcagggcggtgaggagacccagagatattgtactgacaccggggttctgttcaggcaggaaagcttcttccactgggcctttggggtgacagaacccgggtgttacggcgtcattgacgtggacaccgggaagagcaccctgtttgtgcctaggcttccagcttcgcacgccacctggatggggaaaatccacagtaaagagcattttaaggagaagtacgcggtagatgatgttcagtacgtagacgagattgcctctgtcctcaccagccaaaaacccagtgtacttctgaccctgcgcggggttaataccgactcaggatcagtgtgcagagaagcttcttttgatggaattagtaaattcgaggtcaataacaccattctgcacccagaaatcgtggaatgcctgtttgaacactattgctatagcagaggcgggatgcgccatagcagttacacctgtatctgtggctctggggagaattcggccgtcttacactatggccacgctggtgcacccaatgaccgcacgatccagaacggagacatgtgcctctttgatatgggaggcgaatattattgcttcgcaagcgatataacctgtagttttcccgccaatggaaaattcaccgcggatcagaaggctgtgtacgaggcagttcttcggtcgtccagggccgtgatgggggccatgaaacctggagtgtggtggccagacatgcatcgattggctgatcgaatccacctggaggagcttgcgcatatgggcatcttaagcggatctgtggacgccatggtgcaggcgcatttaggcgccgtctttatgccgcatgggctgggccattttctggggattgacgtgcacgatgtaggcgggtacccagaaggagttgagcgtattgacgagccagggctgaggtccctgcgaactgctaggcacctgcaacccggcatggttctgactgtagaacctggtatctatttcatcgaccaccttctggacgaggcactggctgatcccgcccgggcttcttttctgaaccgagaggttctccagagattcagaggattcggaggggtgagaatcgaggaagacgtagtggtcactgacagtgggatagagctgctcacatgcgttcctagaacagtcgaggagattgaagcttgcatggccggatgcgacaaggctttcacaccattttccggccccaagtag

SEQ ID NO: 198864 - DNA, 1290 bp, synthetic construct
  misc_feature 1..1290: note = Description of Artificial Sequence: Synthetic coding sequence
  source 1..1290: mol_type = other DNA
atggccgccgccaccggccccagcttctggctgggcaacgagaccttgaaggtgcctcttgcgctgttcgcgttaaatcgccagcggctctgcgagagactgcggaagaaccctgccgtccaggccggcagtattgtggtcctgcaagggggcgaagagacgcagaggtactgtacagacactggtgtgctgttccgtcagattgcttcagttttgacctcacagaagccatcagtgctgctcacactgaggggtgtcaacaccgatagtggttccgtttgtcgcgaagcctcctttgacggcataagcaagttcgaagtaaacaacaccatcctccaccccgaaattgtggagtgtcgggttttcaaaactgatatggaactggaggtgctgcgctacactaacaagattagcagcgaagcacaccgcgaagtgatgaaagccgttaaggtcggtatgaaggagtacgagttggaatccctctttgagcactattgttactctcggggcggaatgaggcatagcagctatacgtgcatctgcggctcaggagagaattctgctgttctgcactacggtcatgccggcgcgcctaatgatcgtactatccagaacggcgatatgtgtctcttcgatatgggcggagaatactattgcttcgcttctgatattacctgttctttcccagcaaacggaaaatttacagctgaccagaaagctgtgtatgaagccgtgttgaggtccagtagagcagtgatgggggctatgaagccaggcgtttggtggcccgacatgcatcgcctggctgatagaattcacctggaggagctagcccacatggggatcctaagcggcagcgtggatgcaatggtgcaggctcaccttggcgcagtctttatgccccacggccttggacacttcctaggcatcgacgtccatgacgtggggggttaccccgaaggtgtggagcgaattgatgagccaggcttgcggtcattgcgcacagccaggcacctacagcccgggatggtgctgactgtggagccggggatttatttcatagatcatctactcgatgaagcccttgctgatccagcacgcgcgagctttctcaatcgtgaggtcctgcaacggtttagagggtttgggggtgtacgcattgaggaagacgtcgtcgtgaccgactcaggcattgaactgctgacatgtgtgccgcggacggtggaggagatcgaagcttgtatggcgggttgtgacaaggcgtttacccctttctccgggccaaagtag

SEQ ID NO: 198865 - DNA, 354 bp, synthetic construct
  misc_feature 1..354: note = Description of Artificial Sequence: Synthetic coding sequence
  source 1..354: mol_type = other DNA
atgcgggccagcagcttcctgatcgtggtggtgttcctgatcgccggaactctggttctcgaagccgctgtgacgggagtccctgttaaagggcaggacactgtcaaaggaagagtgcctttcaacgggcaagaccccgtgaaaggccaggtgagcgtgaaaggtcaggacaaggttaaagcccaggaacccgtgaaagggccagtttccaccaagcctggctcctgtcccattatccttatacgatgcgcaatgcttaatcctcccaatcggtgcctgaaagacaccgattgtccaggtataaagaaatgctgcgagggcagctgcgggatggcttgcttcgtgccccaatag

SEQ ID NO: 198866 - DNA, 732 bp, synthetic construct
  misc_feature 1..732: note = Description of Artificial Sequence: Synthetic coding sequence
  source 1..732: mol_type = other DNA
atggcccggctgtggggcgccctgagcctgtggcccctgtgggccgcagtgccctggggaggagcagcagccgtaggggtcagggcttgcagctctaccgccgctcctgatggcgtggagggccccgctttaagacggagctactggagacatcttagaagattggtgctcggccctccagagcctccatttagtcacgtgtgtcaagtcggggacccggtcctgaggggagtagctgctccagtggagcgcgcccaactgggcgggccagaattgcaacgcttaactcagcgacttgtccaggtgatgagacggcggcgatgtgtagggctaagtgctcctcagctgggcgtccctcgccaggtgctcgctctagaacttcccgaggcgctgtgtcgtgaatgcccacccagacagcgagccctgagacagatggaaccatttcctctgcgtgtattcgtgaacccatctcttcgcgttctggatagtagattagttactttccccgagggatgcgaaagcgtcgcaggatttcttgcatgcgtcccaagatttcaggccgtgcagatttccgggctggatcccaatggcgagcaagtggtttggcaagcatctggatgggccgccaggattatccagcatgagatggaccatctccagggctgtttgtttatagacaaaatggacagcagaacttttacgaacgtatattggatgaaggtaaacgactag

SEQ ID NO: 198867 - DNA, 294 bp, synthetic construct
  misc_feature 1..294: note = Description of Artificial Sequence: Synthetic coding sequence
  source 1..294: mol_type = other DNA
atggtgttcgtgcggcggccctggcccgccctgaccaccgtgctgttagccctcctcgtctgtttgggcgcactggtggatgcatacccaataaagccagaagctccacgcgaggacgcgtcccctgaggaattgaatcgctactacgcttccctgcggcattacctcaatcttgtgacccgtcagagatacggcaagagagatgggcccgacaccctgttaagcaaaactttctttccggatggtgaagacaggcctgttagaagtcggagtgaggggccagacctttggtag

SEQ ID NO: 198868 - DNA, 1992 bp, synthetic construct
  misc_feature 1..1992: note = Description of Artificial Sequence: Synthetic coding sequence
  source 1..1992: mol_type = other DNA
atggcccccaagcgggtggtgcagctgagcctgaagatgcccacccacgcggtttgcgtggttggtgtcgaggcccacgtcgacatccactcagatgtgccaaaaggcgctaattctttcagagtctcaggaagcagcggggtagaggtctttatggtgtacaatcgcacgcgcgtgaaagagcccattggtaaagctagatggccactcgataccgatgctgacatggtagttagcgtgggaacagcaagcaaggaactgaaggacttcaaagtcagagtatcatacttcggcgagcaagaagatcaggccctcggaaggtccgtgctgtatctcacaggggtggatatctcactggaagttgataccgggagaacaggcaaggtgaagagaagccagggagacaagaagacatggaggtgggggcctgaggggtatggcgccatcctgctagtgaactgcgatcgggacaaccaccgcagcgcagagcctgacctgacccacagctggttgatgtccttggccgaccttcaggatatgtcccccatgcttctgtcatgcaacggccctgacaaattgtttgatagccacaagttggtgctcaacgtccccttctctgattccaagagggttagagttttctgcgcaaggggtggcaacagcttgtctgattacaagcaggttcttgggccccagtgccttagctacgaggtggagagacagccaggtgagcaggaaatcaaattttacgtggaggggctcacatttccagatgcagactttttgggcttggtgtctctcagcgtgtcactcgttgacccgggaaccctccctgaggtgacattgttcacagatactgtcggcttccgaatggctccatggataatgacacccaacacccagccccccgaggaactctacgtgtgccgcgttatggacactcacggctccaatgagaaattcctcgaggacatgtcctatttgacactcaaagcaaattgcaagctgacgatttgcccgcaagtcgagaacagaaatgaccgctggattcaagacgaaatggaatttggttatatcgaagcccctcacaagtcctttcccgtggtctttgacagccctagaaaccgtgggcttaaggatttcccatacaagaggatcttaggccccgactttggttacgtcaccagagagatccctctacctggcccaagcagtctggattcattcggcaatctggatgtgtcgcctccggtcacagtggggggcaccgagtacccactgggccgaattctcattggcagctcttttccgaaatccggaggccggcaaatggcacgggctgtaaggaatttcctcaaggctcagcaagtacaggctcctgttgagctttattcagactggctctccgtgggtcacgtggacgaattcttgacatttgtgccaacctccgatcaaaaagggttcagactgttgctcgcatcaccatcagcttgcctgaaattatttcaagagaaaaaagaagaaggctatggagaggccgcacagtttgatggtctcaagcatcaggctaagcgctcgataaatgaaatgttggccgaccgacacctccagcgggacaacttacatgctcagaaatgtattgattggaatcggaacgtcctgaagagagagcttggtcttgccgaatccgatattgtggacataccacagctgttttttctgaagaatttctatgctgaagccttttttcccgacatggtgaacatggtggtgttaggaaagtatttaggaataccgaagccatacggccccatcatcaacggcaggtgctgtctcgaggagaaagttcagagcctgctggagccactggggctccattgtatttttatagatgactacctcagctaccacgagctacaaggggaaatccattgtggaacaaatgtcaggaggaaaccttttccttttaagtggtggaatatggtgccctag

SEQ ID NO: 198869 - DNA, 537 bp, synthetic construct
  misc_feature 1..537: note = Description of Artificial Sequence: Synthetic coding sequence
  source 1..537: mol_type = other DNA
atggcccgggccgtgcggaacttcctgaaggcccagcaggtgcaggcccccgtagagctgtacagcgattggctttcggttggccacgtcgacgaatttcttactttcgtgcccaccagtgaccagaagggcttccgcttactgcttgcttccccatccgcctgcctgaagttatttcaggagaagaaggaagaaggatatggcgaagcagcacagttcgatgggttaaagcaccaagccaagagatcaatcaatgaaatgctagcagatcggcacctgcaacgagataatctgcatgcgcaggtgaatatggtggtactgggtaaatacctaggtatccctaagccttacggccccattatcaacggtcgctgctgtctggaagagaaggtccagtcactactggagccgctgggattgcattgtatttttatcgatgactatctgtcttatcacgaactacagggcgagattcactgtggcactaatgttcggcgcaagccctttccattcaagtggtggaatatggtcccctag

SEQ ID NO: 198870 - DNA, 405 bp, synthetic construct
  misc_feature 1..405: note = Description of Artificial Sequence: Synthetic coding sequence
  source 1..405: mol_type = other DNA
atgctggccgaccggcacctgcagcgggacaacctgcacgcccagaaatgtatagactggaataggaacgttctgaagagggagctgggtctggcagagagtgacattgttgacattccccagttattcttcctgaaaaacttttacgcggaagcattctttcccgacatggtgaatatggttgttttgggaaagtatctgggaatccctaagccatacggaccaataatcaatgggaggtgctgtcttgaggaaaaggtgcagtccctgctggagccgctcggtctgcactgtatttttattgatgactatctttcttatcatgaattgcagggagaaattcactgcggcaccaacgtcagaagaaaacccttccctttcaagtggtggaatatggtgccctag

SEQ ID NO: 198871 - DNA, 663 bp, synthetic construct
  misc_feature 1..663: note = Description of Artificial Sequence: Synthetic coding sequence
  source 1..663: mol_type = other DNA
atggcccgggccgtgcggaacttcctgaaggcccagcaggtgcaggccccggtcgagctgtattccgattggctgagcgttggacacgtcgatgagttcctcactttcgtgcctactagcgatcagaaaggcttcaggctgctgctggcaagcccctccgcatgcctgaaattgtttcaggaaaagaaggaggagggatatggcgaggcggctcagtttgatgggttaaagcaccaggccaaaagatctatcaacgaaatgcttgcggacagacacctgcagcgagataatctacacgctcagaagtgcatagactggaatcgtaacgtgcttaagagggagctggggcttgccgaatccgatatcgtagacatcccgcagctgttttttttaaagaatttttacgccgaagccttctttcccgacatggttaatatggtggtgctcggcaagtacttaggcattccaaaaccgtacggccccatcataaacgggcggtgctgtctggaggagaaggttcagtccctcctggagccactgggcttgcattgcattttcattgacgactacctctcataccacgagctgcaaggagaaatccattgcggcactaatgtgcggagaaaaccttttcccttcaagtggtggaacatggttccctag

SEQ ID NO: 198872 - DNA, 1314 bp, synthetic construct
  misc_feature 1..1314: note = Description of Artificial Sequence: Synthetic coding sequence
  source 1..1314: mol_type = other DNA
atgctgcgggagcggaccgtgcggctgcagtacggcagccgggtggaggccgtttacgtgctggggacatacttgtggactgacgtatattcagctgccccggccggtgcacagacttttagcctgaagcactccgaacatgtgtgggttgaagtcgtgcgggacggtgaggcagaggaagtggccacaaacggtaagcagaggtggttgttgtcaccttcaacaacactgcgggtgactatgagtcaggcaagtacggaggcttcgtcagacaaagtcactgtaaactattatgacgaggaggggtctattccaattgatcaggctggactttttctgactgctattgagattagtcttgacgttgacgcagacagagacggtgtggtggagaaaaataatccaaagaaggcatcatggacatggggaccagaaggtcagggagccattctattggttaactgcgatcgggagacaccatggctccccaaggaagattgccgggacgaaaaggtgtacagtaaagaggaccttaaagacatgtcgcaaatgatcctccgaacgaaaggtccggaccgcctgccagcagggtatgagatcgtgttatacatttccatgagcgactccgataaggtcggggtcttttatgttgagaacccgttcttcggacagagatacattcacattctcggtaggagaaagttatatcacgtcgttaagtacacaggcggctctgccgagctcctattcttcgttgagggcctgtgttttcctgacgagggattttcaggcctagtgtccattcacgtatctttgctggaatacatggcccaggatattcccctcacacccatatttaccgacacggtgatcttccggatcgcgccatggatcatgacccctaatatcctccctccggtctccgtcttcgtgtgttgcatgaaagacaactatctcttcctcaaagaggttaaaaatctggtggaaaagactaactgcgagcttaaagtttgtttccaatacttaaacagaggagaccggtggatccaggacgaaattgagttcggatacatcgaggcaccacacaagggattcccagtggtcctagactcccccagggatggtaacctcaaagacttccctgtgaaggagctcctgggacccgacttcgggtacgttaccagggagccactgtttgaatccgtgacgtctctcgatagctttgggaatctcgaagtctcaccgcctgtaacggtgaacggcaaaacctacccactgggaagaatcctgatcggttcgtcgttccccttgtag

SEQ ID NO: 198873 - DNA, 1998 bp, synthetic construct
  misc_feature 1..1998: note = Description of Artificial Sequence: Synthetic coding sequence
  source 1..1998: mol_type = other DNA
atgctgcgggagcggaccgtgcggctgcagtacggcagccgggtggaggccgtatatgtgctgggcacctatttgtggaccgacgtatattccgccgctcctgcgggtgctcagactttcagccttaagcactcggagcatgtctgggtcgaagtggtgcgggatggagaggctgaagaggttgcaactaacgggaaacagcggtggctgttgtcccccagcactacactcagagtaacaatgagtcaggcctctacggaggctagtagcgataaggtcaccgttaattattatgacgaggaagggtccattccaattgatcaagctggtctgtttttaacagcaattgaaatttcccttgacgttgatgccgatcgggacggcgtagtggagaaaaacaatcccaagaaggcctcatggacttgggggccggaagggcaaggtgcaatcctgctggtgaattgcgatcgcgagaccccttggttgccgaaagaggattgcagggatgagaaggtgtactcaaaggaggacttaaaggacatgagccagatgatattgaggacaaaggggcccgatagactgccagccggatacgaaatcgtgctgtacatttctatgagtgactcggataaggtcggagttttctacgtggagaaccctttcttcggtcagcggtatattcatattctcgggaggcgcaagctataccatgtggtgaagtacaccggaggctcagctgagctactcttctttgttgaaggcctgtgcttccccgacgagggcttcagcggactggtcagcatccacgtcagtttgttagagtacatggcacaggacattcctctgaccccaatatttacagacacggtgatctttaggattgctccatggattatgacgcctaacattcttcccccagtgtccgtatttgtgtgctgtatgaaagataattaccttttcctcaaggaggtgaaaaacctggttgagaagaccaattgtgaattaaaagtatgtttccagtatctgaatcgcggcgatcgctggattcaggatgaaatcgagtttggctacatcgaagcccctcacaaagggtttcctgttgtcctcgactcgccacgtgatggtaacctgaaagacttccccgtcaaagaacttctcgggcccgacttcggttatgtgacacgcgaaccccttttcgagtccgtcacttcattagactcattcggcaaccttgaggttagcccgccagttacagtgaatggcaaaacctatcctctagggcggatcctgatcgggagctcattccccctaagcgggggccgaagaatgacaaaggtggtacgcgattttctgaaggcacagcaagtccaagccccggtggaactgtactccgattggctcacagtcgggcacgtggacgagttcatgtcattcgtgcctatccccggaaccaaaaagttcctgctgctgatggccagcacctccgcttgttataagttgtttcgggagaagcagaaggatggccatggcgaggcaatcatgttcaaaggattaggcggcatgtcatccaagcgaatcacgataaataagatcctcagcaacgaaagccttgtacaggagaacttatattttcagcgctgcctggattggaacagggatattctgaagaaggagctcggacttaccgagcaggatatcatcgaccttcccgccctctttaagatggacgaggaccatagagctcgggcgttcttccccaacatggtaaacatgatcgtgttggacaaggacctaggaatccccaaaccgttcggtcctcaggtagaggaagagtgctgtctcgagatgcacgtgcgcggcctgctggagcccctgggtctcgagtgtacttttatcgatgacataagcgcttaccacaagttcctgggtgaagtccattgcggcactaacgtgaggcggaagccgtttaccttcaaatggtggcatatggtgccttag

SEQ ID NO: 198874 - DNA, 1650 bp, synthetic construct
  misc_feature 1..1650: note = Description of Artificial Sequence: Synthetic coding sequence
  source 1..1650: mol_type = other DNA
atgctgcgggagcggaccgtgcggctgcagtacggcagccgggtggaagcagtatatgtgcttggtacttatctctggaccgatgtgtattcggcagcaccggccggagcgcagactttcagcctgaaacattcagaacacgtttgggtggaagtcgtacgggatggcgaggccgaggaagtggccacaaacgggaaacaacggtggttactgagtcccagcactaccctgcgggtcacaatgagccaggcgtcaaccgaagcatcttccgataaagtcactgtaaattactatgacgaggaaggaagcatccccattgaccaggcagggctgttcctgactgccatcgagatttcactggatgtggacgcagaccgggacggcgtggtagagaaaaataatccaaaaaagacccgcagtagtgccaatgccatatctaccagctgggcggggggctcaagcaccatgtggtcctccacccgcgttgcaccaaggagctgctgttcctcttggaaggcctctgtgagccccaccagagctagccaggcctggtcaccctcgatgtctgcctgttggtccacatggccctctatgaaggataactacttgttcttgaaagaagtgaaaaatctggttgaaaagaccaactgtgagcttaaggtttgcttccagtatctgaatcgtggtgacaggtggattcaggacgaaatcgaattcggctatattgaggcaccccacaagggcttcccagtggttcttgactcaccaagggatgggaacttgaaagattttcccgtaaaagagctcttggggccggattttggctatgttacaagagagcctctgttcgagagtgtgacctcacttgattctttcgggaatcttgaagttagtcctccagtgacagtcaacggcaagacctatcctctgggtcgtattcttattggatcaagtttccctctgagcgggggaagaaggatgacgaaggtggtcagagatttcctgaaagctcagcaggtccaagcaccggttgagctctacagcgactggctgactgtgggacatgtggacgagttcatgagctttgtgcctatcccaggaacaaagaaattcctgctcttgatggccagcacaagtgcatgctacaaactttttcgcgagaagcaaaaagacgggcatggcgaggctattatgtttaaaggtctgggcggcatgagttctaagcgtatcaccattaataagatcctgagtaatgagtcactggtgcaggagaacctgtacttccagcggtgtttagattggaatagggacatactgaagaaggagctaggcctgaccgaacaggatatcatagacttacctgccctgttcaagatggacgaagaccaccgagcaagagcgtttttcccaaacatggttaacatgatcgtcctggacaaagatctgggcatccctaagccattcggacctcaggtcgaagaggaatgttgtttagagatgcacgtccgtgggctgctggagcctctggggttggagtgtacgttcattgacgacatttccgcctaccataagtttctgggggaagtgcactgtggtaccaatgtaagaaggaaacctttcactttcaaatggtggcacatggtgccctag

SEQ ID NO: 198875 - DNA, 1995 bp, synthetic construct
  misc_feature 1..1995: note = Description of Artificial Sequence: Synthetic coding sequence
  source 1..1995: mol_type = other DNA
atgagcctgcagcggatcgtgcgggtgagcctggagcaccccacctccgctgtttgcgtagcgggcgtggaaaccctggtagacatttatgggtcagtgcccgagggcaccgaaatgtttgaggtgtacggcactcccggcgtggatatctatatctcccctaacatggagcgtggccgcgaaagagccgatactaggaggtggcggtttgatgcaacactcgaaattatcgtcgtaatgaatagccctagtaacgatttgaatgactcacatgtgcagatttcgtaccattcctctcatgagcccttgccactggcttacgccgtgctgtacttgacttgtgtggacatttcgctggactgcgacctgaactgtgaaggcagacaggatcgaaatttcgtagataaacgccagtgggtctggggaccttcaggctacggtggcatcctactggtgaactgcgaccgtgatgatccttcatgcgacgtccaggataactgtgaccaacacgtgcactgtctccaggacttggaggatatgtccgtgatggtattgcgaacacagggccctgcagccctatttgacgaccataaacttgtgttgcacacttcgtcctatgatgcaaagcgagcacaagttttccatatatgcggtcccgaggatgtatgtgaggcctaccgacacgttctagggcaagataaggtttcttatgaggtgcctcgactgcatggggatgaggagcggttttttgtggagggactaagcttcccggatgctggttttacaggtctaatctcctttcatgtcaccctgctggacgattctaacgaagacttttccgcatcccctattttcactgataccgtggtgttcagggtagctccatggattatgacgccaagtactctcccacccctcgaggtgtacgtgtgtcgggtgagaaacaacacctgttttgtcgacgccgtggctgagctggctaggaaagcaggatgcaagctgacaatctgccctcaggccgagaataggaatgataggtggattcaagatgaaatggaattgggatacgtccaagccccacataagacactccccgtggtctttgactctcctcgtaatggagaactccaggacttcccctataagcgtatcctgggacccgatttcggttacgtcacgcgggaaccacgggaccggtctgtttcaggcctcgactcgtttggaaaccttgaggtgagcccaccagtggtcgccaacggcaaggagtaccccttgggtcgcattttgatcggaggcaaccttcccggctcttctggcagaagggtgactcaggtggtgcgtgacttcttgcatgcccagaaggtgcaaccacccgtggaactctttgtggactggctggccgtgggacatgtggacgagttcttgtccttcgtgcccgctcccgacgggaaggggtttcggatgctgctggccagcccaggggcttgtttcaagctgttccaggaaaagcagaagtgcgggcacggccgcgccctactctttcagggggttgtcgatgatgaacaggtcaaaaccataagcattaatcaggtcctgtcaaataaggacctcataaactacaataaatttgtgcaaagttgtatcgactggaacagagaagtccttaagcgagagctggggctggccgagtgtgacataatcgatataccccagctatttaagacagagcgtaagaaagccaccgccttttttccagacctcgttaacatgctggttttgggaaagcatctcggcatcccaaaaccattcggtcctattatcaacgggtgctgttgcttggaggaaaaggtgcggtccctgttggaacccctcggactgcactgtacatttatcgacgacttcactccatatcatatgctacacggcgaggtccattgtgggaccaatgtgtgccgaaagcccttcagctttaaatggtggaatatggtaccgtag

SEQ ID NO: 198876 - DNA, 645 bp, synthetic construct
  misc_feature 1..645: note = Description of Artificial Sequence: Synthetic coding sequence
  source 1..645: mol_type = other DNA
atggcccagggcaccctgatccgggtgacccccgagcagcccacccacgccgtctgcgtgctggggactttgactcaactcgatatttgttcttccgctcctgaggactgtaccagttttagcattaatgcaagcccaggggtagtagtagatatagcccatgggcctccagcaaagaagaaatccaccgggtcttctacctggccactggatccaggggtagaagtgacccttaccatgaaggtcgcaagcggcagtacaggtgatcagaaggtgcagataagttactacggcccgaagacccctcccgtgaaagccctcctctatttgacaggcgtggatggtgtgtcgccatgtcaccctgggtggtccgccatgcacgatctggcacactgtaaccttcgactgcaagtccaggctatcctgtgtttttccgtcccctccagctggacgaccggagcctgccatcacgcttggctgattttcgtcttcctggtcgaaatggagtttcaccatgtcgggcaagccggcctggagctgcttacgtctggcgacctgcctgccagcggaagtcagagcgcacgtatcacaggaatgaaccattgtgcacggccctccatcttccttattctgaagtatctctag

SEQ ID NO: 198877 - DNA, 1992 bp, synthetic construct
  misc_feature 1..1992: note = Description of Artificial Sequence: Synthetic coding sequence
  source 1..1992: mol_type = other DNA
atggcccagggcaccctgatccgggtgacccccgagcagcccacccacgctgtatgcgtgctcggtactctcacccagctagatatctgtagtagtgcacctgaagattgcacctccttcagcatcaatgcatcacctggcgtcgttgtggatatagcccacgggccgcccgcaaagaaaaagtcaactgggtctagcacctggcccttagatccaggtgtggaagtgaccctgacaatgaaggtggcttccgggtccaccggcgaccaaaaggtgcagattagctattacggacctaagaccccaccagtaaaggcgctcctgtacctaaccggtgtcgaaatctcgctgtgcgcagacatcacacggacggggaaggttaaacctactcgggcagtcaaggatcaaaggacctggacgtgggggccatgtggacagggcgcaatactgctggtgaattgtgacagggataatctggagtccagtgcgatggactgcgaagatgatgaggttctcgattctgaagatctgcaagatatgtcgttaatgactctgtctactaaaactcctaaggacttcttcacaaaccacacattggttctgcatgtggctcgctctgagatggacaaagttagggtatttcaggctacccggggaaaactgtcttcgaaatgctcagtagttctcggccccaagtggccttctcactatctgatggtccctggcggcaagcataacatggacttttacgttgaggccttggcctttccagatacggatttccccggtctcattacgctgacaatttcactgctggacacatctaatttggaactgcccgaggcggtcgtgtttcaggactctgtggttttccgggtagcgccatggatcatgacccccaatacacagcccccccaggaagtatacgcctgcagtattttcgagaatgaggacttcctgaagtccgttactaccttggcaatgaaggccaagtgtaagctgaccatctgccctgaggaggaaaacatggacgatcagtggatgcaggatgagatggagatcgggtacatccaggctcctcataagactctccctgttgttttcgacagccctcgcaatcgcgggctaaaagagtttcctatcaaacgcgtgatgggtcctgactttggatacgtgacccggggccctcaaactgggggcatctctggactggatagcttcgggaatctggaggtcagccctcctgtcactgtgcgaggcaaggagtacccattgggcagaattctgttcggcgattcgtgttacccctccaatgattctaggcagatgcatcaagctttgcaggactttcttagtgcacaacaggtccaagccccggtgaaactttactcggactggctctcggtaggccacgtggacgagtttctgtctttcgtgccggcacccgacaggaaggggttcaggctgttgcttgccagtcccagatcgtgttacaagctatttcaagaacagcagaacgagggtcatggcgaagccctgcttttcgagggcatcaaaaagaagaagcagcagaagatcaagaacattctctcgaacaagaccctccgcgaacataatagcttcgtggagagatgcattgattggaaccgcgagctgcttaaacgcgagctagggctggcggaaagcgacattattgatatcccccaattatttaaactcaaggagttttccaaggccgaggcatttttcccaaacatggtcaacatgctggtattgggaaaacacctgggcattccgaagccctttgggcctgtgattaatggaaggtgttgtctggaagagaaggtgtgcagcctgctggagcccctaggtctgcagtgcacctttatcaatgacttcttcacctatcacattagacacggggaagtgcattgtggaaccaacgtgcgaagaaaaccattttcattcaagtggtggaacatggtaccttag

SEQ ID NO: 198878 - DNA, 384 bp, synthetic construct
  misc_feature 1..384: note = Description of Artificial Sequence: Synthetic coding sequence
  source 1..384: mol_type = other DNA
atggcccagggcaccctgatccgggtgacccccgagcagcccacccatgctgtttgtgtgttaggaactcttactcagctggacatttgcagctcagcccccgaagactgtacaagctttagtataaacgctagccctggagttgttgtagacatcgcccacggcccccccgctaagaaaaaatcgactgggagcagtacttggccactggatccaggagttgaggtgacattaacaatgaaggtggcctcagggtcaactggcgaccagaaggtgcaaattagttattatgggccgaaaacccctcctgtgaaggccctgctgtacctgacaggtgtcgacggggtgagtccttgtcacccaggatggtccgcgatggcctag

SEQ ID NO: 198879 - DNA, 2628 bp, synthetic construct
  misc_feature 1..2628: note = Description of Artificial Sequence: Synthetic coding sequence
  source 1..2628: mol_type = other DNA
atggacaccgtgcaccacatgctgctgttcggctgcaacatgccctcttccactggctcctactggttctgtgacgaggggacttgtactgacaaagcgaacattctatatgcgtgggctagaaacgcaccacctactagactcccaaaaggcgtaggcttccgggttggcggtgagaccggttccaaatactttgtgctgcaagtgcattacggcgatatctccgcattccgtgacaacaacaaggactgtagcggtgtgtccctgcacctaaccaggttaccacagccgctgattgctggaatgtatctgatgatgagtgtagacacagtgatccctgcgggagagaaagtagtcaactctgatatatcctgccactataagaattaccccatgcacgtttttgcctacagggtgcatacacatcatttaggaaaggtcgtcagcggatacagagtgcgcaacggacagtggacattgatcgggagacagtcaccgcaattgcctcaggcattctatcccgtggggcaccccgtggatgttagcttcggggatcttctcgccgctcgttgtgtgttcacaggcgaggggagaactgaagctacgcacataggagggacatcgtcagacgaaatgtgcaacctttatattatgtactacatggaggccaaacatgctgtgtccttcatgacctgcacccaaaacgtggcccccgacatgttccgtacgatccccccagaagcaaacattccaatccccgtcaaaagcgatatggtgatgatgcatgaacatcacaaagagactgaatacaaggataagattccccttttgcagcagccgaagagggaagaggaagaagtcttagatcaaggcgacttttacagcctgttgagtaagctactgggagagcgcgaagacgttgttcacgttcataagtataaccccactgagaaggccgagagcgagagcgatctcgtggccgagatagcaaacgtagtacaaaagaaagacctgggtcgctctgatgcacgagagggcgccgagcatgagcggggcaacgccattctggtacgagatcgcatccataaatttcaccggttggtgtccacacttagacctcctgagtcacgggtattctctctgcaacagccccctcccggagagggtacctgggaaccagaacacacaggcgattttcatatggaggaggctttggactggccaggggtgtacctcctgcccggtcaggtaagcggtgtcgctctcgatcctaagaacaatctcgtcattttccatagaggtgaccatgtgtgggatggaaactcatttgattcaaaatttgtgtaccagcagatagggctgggccccattgaggaggatacaatcctggtaatcgacccaaataatgccgctgtgctgcagagctccggcaaaaacttgttctatctccctcatggcctgtccatcgacaaagacggaaactactgggtcaccgacgtggccctgcaccaagtgtttaagctggatccaaataataaagaaggcccagtgttgatcctgggacgctcaatgcagcccggcagtgatcagaaccacttctgccagcctacagatgtcgccgtagatcctggcacgggtgcaatctatgtgtcagacggctattgtaattctagaatcgtgcagttttccccaagtggaaagtttattactcagtggggcgaagaatcaagcggcagcagcccgctgcccggccagtttacggtccctcactctctggccctcgttccattacttggccagctgtgcgtggctgacagggaaaatggccggatccagtgttttaagacagacaccaaggagtttgttagggagattaagcactcctcattcgggaggaatgtctttgccatcagctacatcccgggcctattattcgcggtgaacggcaagccacacttcggagaccaggagcctgtgcaagggtttgtaatgaattttagcaatggagaaattattgacatcttcaagcccgtgaggaagcacttcgacatgcctcatgatatcgtcgcttctgaagatggcaccgtctacattggagatgctcatacaaatactgtctggaaatttacgctaactgagaagttagagcatcgatcggttaaaaaggctggtattgaggtgcaggaaattaaggccgaagctgtcgtagagactaaaatggaaaacaaaccaaccagctctgaactccagaagatgcaggaaaagcagaaactcatcaaagagcccggctcaggtgtacccgtcgtcttaataaccacactgctggttatcccggtcgtggtcctgctggctatcgctatctttatcagatggaagaaatccagagcatttggggattccgaacataagctggagactagttcggggagggtcctgggacggtttcggggaaaagggagtggaggcctcaatctgggtaacttctttgcgtcccgcaagggttactcacgcaaaggcttcgatagactgagcactgagggttctgatcaggagaaggaggacgacgggtccgagtccgaggaagaatattccgctcccctgcctgcgctggctccctcatcctcttag

SEQ ID NO: 198880 - DNA, 2925 bp, synthetic construct
  misc_feature 1..2925: note = Description of Artificial Sequence: Synthetic coding sequence
  source 1..2925: mol_type = other DNA
atggccggccgggtgcccagcctgctggtgctgctggtgttccccagttcttgcctggctttccgtagtccgctctctgtgtttaagcgcttcaaggagacaacccgcccattttctaatgagtgccttgggaccacgagacccgtggtgcccatagattcgagcgattttgccctcgatattcggatgcctggggtaacacctaagcagtcagacacttacttttgtatgtctatgagaatccccgtcgacgaagaggctttcgtgatcgatttcaaacctagagcttctatggacactgtgcatcacatgttgctgttcggctgcaatatgccatctagtactggctcctactggttctgcgatgaaggcacgtgtacagacaaggcgaacatcttgtatgcttgggcccggaatgcgccaccaacccgactccccaagggcgtggggtttagagtgggcggagaaaccggtagtaaatatttcgttttgcaggtgcattatggggacatttcagccttccgcgacaacaacaaggattgcagcggagtttcactgcacctaacaaggctcccacagcctcttatagccggcatgtatctgatgatgagtgtcgacactgttatcccagcgggagagaaggttgtgaactccgatatatcctgtcattacaagaactaccccatgcacgtttttgcctacagggttcatacgcatcatcttgggaaggttgtgtcaggatatcgggtgaggaacgggcagtggaccctcattggccggcagagtccccagctgccacaggcattttacccggtgggtcaccctgtcgacgtgtcctttggcgatcttctggctgcgcgatgcgtcttcaccggggaaggaaggactgaggccacccacattggcggcacttcaagcgatgagatgtgcaatctctatataatgtattacatggaggcaaaacatgctgtgtccttcatgacatgtacccaaaatgtcgcacccgacatgtttagaaccattccacctgaggccaacattcccattccagtcaaaagcgacatggtaatgatgcacgagcatcacaaagaaactgagtataaggacaagatacccctgctgcagcagccaaagcgagaggaggaggaagtcctggatcagggcgatttttatagtctcctcagcaagttgcttggagagagagaagacgtggtacatgtccacaaatataacccgactgaaaaagctgagagcgaatcagaccttgtggcggaaattgctaacgtagtgcagaagaaggacttgggacgatccgatgcaagggaaggagccgagcacgaacgcggaaatgctatcctggtcagggatagaatacataagttccacagactggtgagtacccttagacctccagaaagtcgggtgttcagccttcagcagccccctcccggcgagggcacttgggagccagaacatacaggtgacttccacatggaggaggctttagactggcctggcgtatacctcctgcctggacaagtgtccggtgtggccctggaccccaaaaataatctcgtaattttccacagaggggaccatgtatgggacgggaactctttcgatagtaagttcgtgtaccagcagataggcctaggccccatagaagaagacaccatactagtgattgaccccaacaacgcagctgtgctgcagagctccggtaagaatctgttctatttgccccatgggctgtccattgacaaggacggaaactactgggtcaccgatgtagctctgcaccaggtgttcaagctggaccctaacaataaagaaggcccagtgctgattctcggtcgatccatgcaacccggatctgaccaaaaccacttttgtcagcccactgacgtggctgttgatccaggcaccggggctatttatgtatcggatggatactgcaacagccgaatagtgcaattctcgcccagcggaaagttcattactcagtggggtgaagaaagctccggctctagcccattgcccggccaattcactgttccgcattcccttgcacttgtcccacttctgggacagctttgcgtcgcagaccgggaaaatggccgcatccaatgcttcaaaacagacaccaaagagttcgttcgcgagataaaacatagtagtttcgggcgtaatgtgtttgctatttcctacatccccggcctgctctttgcagttaatgggaagcctcacttcggagaccaggagcccgtgcagggatttgtgatgaatttctccaatggcgaaatcatagacatatttaagcctgtgagaaaacacttcgacatgcctcacgatatcgtggcctcagaagacggcaccgtttacatcggtgacgcccataccaatactgtctggaagtttaccctcacggagaagctcgaacataggtctgtgaagaaagcgggcatagaagttcaagagatcaaagaagccgaagccgtcgtcgagaccaaaatggagaacaagcctaccagctcagagcttcagaagatgcaggaaaaacaaaaattgatcaaggaaccaggctcaggggtcccagtggttctcattactaccttgctggtcatccccgtcgtggtcttattagccattgcgatattcattaggtggaagaaatcccgtgcctttggagcagatagcgaacacaagttggagacaagctctggaagagtgcttgggagattccgaggcaaaggctcaggaggactcaacctcggaaatttttttgctagtcgtaaaggctatagtcgaaaggggttcgaccggctctccacggagggctcggaccaggagaaagaggacgatgggtcagaaagcgaggaggaatacagcgctcccctgccggccttggcaccttcgtcctcatag

SEQ ID NO: 198881 - DNA, 2664 bp, synthetic construct
  misc_feature 1..2664: note = Description of Artificial Sequence: Synthetic coding sequence
  source 1..2664: mol_type = other DNA
atggccggccgggtgcccagcctgctggtgctgctggtgttcccctctagctgcttagcattccgctcccccctctccgtatttaagcggtttaaggaaacaacacgtccattcagcaacgagtgtttgggaacaacgcgcccggtggtgcctattgattcgtcggacttcgctctggatattaggatgcccggtgtgacccccaagcagtcagatacctacttttgtatgtctatgcggattccggtggatgaagaggccttcgtgattgactttaagccccgggctagcatggacaccgtccaccacatgctgcttttcggttgcaatatgccgagcagtacaggcagctactggttctgtgatgaggggacatgcactgataaggccaatattctctatgcctgggccagaaacgcaccacctacacgcctccccaagggagtgggtttcagagtcggcggcgaaactggtagtaagtactttgtgttgcaagtccactacggagacatatcggccttccgcgacaataataaggactgtagcggagtgtctctgcacctgaccagactgcctcagccattgattgccgggatgtacctgatgatgtcggtggacactgtaattccagccggggaaaaggtggtcaactctgacatctcttgtcactacaagaactatcctatgcacgttttcgcgtacagagtccacacacatcacctggggaaggtggtgagtggttatagggtgcgtaacggtcagtggacccttatcgggcggcagtctccccagctgccacaggccttttacccagttggacatcccgtggatgtatctttcggggatttacttgctgcccgctgtgtgttcactggcgagggccgcacggaggccacacacattggcggcacaagcagtgatgagatgtgtaacctatacattatgtattacatggaggccaaacatgccgtaagctttatgacatgcacccaaaacgtggcccctgacatgttccgcaccatacccccagaggcaaatattccaatcccagtgaagtcagacatggttatgatgcatgagcatcacaaagagaccgagtacaaggataagatccctttgttgcaacagccaaaacgggaggaggaagaggtcctggaccagggcgatttttacagcctcctgagtaaactgctcggcgagagggaggatgtggtgcatgtgcataaatataatcccacagagaaagctgagagcgaaagcgatcttgttgccgagatcgccaacgtcgtgcagaagaaagacctgggacggtccgacgcccgggagggtgcagagcacgagcgcggaaatgcaatactggttcgggacaggatccacaagtttcacaggttggtttccacgcttcggcccccagagagccgagtgttttcactccagcagcctcctcctggagaagggacgtgggagccagaacatactggcgacttccatatggaggaggcgcttgattggcccggagtgtacctgctgcctggacaagtgtcgggcgtcgcgttagaccccaaaaacaacctagttatttttcataggggggatcatgtttgggatggaaacagtttcgattctaagtttgtgtatcagcagatcgggctgggacccatcgaagaagatactattctggtgatcgaccccaacaatgctgctgttctacagtcctcgggaaagaatctcttttacttgccccacggactatccattgacaaggatggaaactattgggttacagatgtggcgttacaccaagttttcaaactggacccgaataacaaagaaggtccagtgctgatcctcggccgcagcatgcagccaggttccgatcaaaatcatttctgccaacccacagacgtggccgtggaccctggaacgggagctatttacgtgtcagacggatactgtaattcccgcatagtgcagtttagccctagtgggaagttcatcacacagtggggagaggaatcgagcgggtcttccccactgcccggacagtttaccgtaccccatagtctggcgctggttcccttgctgggtcagctctgtgtggcagatcgcgagaatggccgcatccagtgctttaaaaccgatacaaaggagtttgttcgggagataaagcattcctccttcggccgaaatgtgttcgcaatatcttacatccctggtctgctattcgcagtcaatggaaaaccccattttggcgatcaggaacccgtacaggggtttgttatgaatttctccaatggcgagatcatcgatattttcaaaccagtacgaaagcattttgatatgccccacgacatcgttgcgagcgaggacgggacagtttacataggcgatgcccacactaacacagtctggaagtttacattgacggagaaactggagcacaggagcgtcaagaaggccgggatcgaagtgcaagagattaaggggaagggcagcggggggctgaatctcggtaacttcttcgcctcccggaagggatacagtcgcaagggattcgatcgcctgagcactgagggtagcgaccaggagaaggaagatgacggctccgagagcgaagaagaatacagcgctcccctacccgctctggccccatcaagctcatag

SEQ ID NO: 198882 - DNA, 2601 bp, synthetic construct
  misc_feature 1..2601: note = Description of Artificial Sequence: Synthetic coding sequence
  source 1..2601: mol_type = other DNA
atggccggccgggtgcccagcctgctggtgctgctggtgttccccagctcatgtctggccttccgatctcccctgagcgtctttaaacggttcaaggaaaccacgcggccttttagcaatgagtgtctggggacgaccaggccggttgtccctattgatagctccgactttgctctggacatccgtatgccgggcgttactccaaagcagagcgacacatacttctgcatgagtatgcgaatccctgtggacgaagaggcttttgtgatcgactttaagcctagggccagtatggataccgtgcatcacatgctactgtttgggtgtaacatgccatcaagcaccgggtcctattggttttgcgatgaaggcacatgcacagacaaagctaacattttgtacgcatgggcccgcaatgcacctcctactcggttgcccaaaggcgttggcttccgcgttggcggagaaacaggcagcaagtacttcgtgctccaggtacattacggcgacatcagcgcattccgcgataacaacaaagactgtagcggggtgagtctgcacctgacccggctcccacagcccctgattgcaggtatgtacctgatgatgagtgttgacacagtgatcccagcgggcgaaaaggttgttaatagcgacatcagctgccactacaaaaattacccaatgcacgtgtttgcttatcgcgtgcacacccaccacctggggaaagtggtttctgggtaccgggtgagaaacggccaatggacactaatcggtcgccagtcgccacagctcccacaggcattctatccagtgggacatcccgtggatgtgagcttcggggatttactggccgctcgttgtgtgtttactggtgaggggcgtacagaagctactcacatcggagggacgagctccgacgagatgtgcaatctgtacatcatgtattatatggaggccaaacatgcagtgtcctttatgacttgcacccagaacgttgctcctgacatgtttagaactatccctccggaagccaatatccccatacccgtgaagtctgatatggtcatgatgcacgaacatcacaaagaaaccgagtataaagacaaaatccccctgctccagcagccgaagcgtgaagaggaggaggtgctcgaccaggacttccacatggaggaggcgttggattggccaggggtatatctcctgccgggacaagtgagcggcgtagcgttggaccccaagaataatctggtaatctttcatcggggtgatcacgtgtgggacggtaactctttcgattctaagttcgtatatcaacaaatcggactgggcccgatcgaggaagacactatcctggtcatcgatcccaacaatgccgcagttctgcagtctagtggcaagaaccttttctatcttccgcatggcctctctatcgataaggatggcaactactgggtgactgatgtggctctgcaccaggttttcaagctagatcctaacaacaaagaaggccccgtgctgatccttgggagaagtatgcagccggggagcgaccaaaaccacttttgccaaccgactgatgtggctgtggaccccggaactggcgcgatctacgtctccgatggatattgcaattcccgtatcgtccaattttctccatcagggaaatttatcacgcaatggggcgaggaaagtagtggctcttcccctctccccggacaattcactgtgcctcactccctggctctggtccctctgcttgggcagctttgcgtggccgatagagaaaatgggagaatccaatgcttcaagactgacaccaaggaatttgttcgggagattaagcattcatcctttggacgtaatgtgtttgctatatcatacattccaggattactgttcgcagtgaatgggaaacctcactttggagaccaggagccagttcagggttttgtaatgaatttcagcaatggggagatcatagacatattcaaaccagttcgcaaacattttgatatgcctcatgatattgtagcctccgaagacggtaccgtgtacattggcgacgcccacactaataccgtatggaagtttaccttgaccgagaagctcgaacacagaagcgtgaagaaggccggtatcgaggtccaggagatcaaagaggctgaggccgtggttgagacaaagatggagaacaagcctacctcatcggagctccagaagatgcaggagaagcagaaactaatcaaagagcccggttctggcgtgccggtggtcctcattacaacattgctggtgatcccagtcgtagttctgctggcaattgccattttcataagatggaagaagtcaagggcttttggggattctgaacacaaattggagaccagctccggaagggtattgggacgatttagaggcaaggggtcaggcggcctaaacttgggaaatttctttgcctctcggaagggctattcccggaaaggatttgacaggctatccactgaaggatccgaccaggagaaggaggatgacgggagcgagagcgaagaagaatacagcgcccccctccctgccctggccccctcgtcgtcatag

SEQ ID NO: 198883 - DNA, 1008 bp, synthetic construct
  misc_feature 1..1008: note = Description of Artificial Sequence: Synthetic coding sequence
  source 1..1008: mol_type = other DNA
atgcagcccggcagcgaccagaaccacttctgccagcccaccgacgtggccgtggaccccgggaccggcgcaatctacgtgtctgatggttattgtaatagcaggatcgtccaattctcacccagtgggaagttcattacccagtggggagaagagtcttcgggcagctcgcccctcccagggcagttcacagtgccacactcattagccctggtgccactgcttggccagctgtgcgtggctgatagggagaacggaagaatccagtgctttaagaccgatactaaagagttcgtgcgcgaaataaagcattcaagttttggacgaaacgtttttgcgatctcttatattccaggactcttatttgctgtaaacggcaaaccccatttcggagatcaggagcctgtgcagggctttgttatgaattttagtaatggtgaaataattgacattttcaagccagttcggaaacatttcgacatgcctcatgacatagttgcctctgaggacggcacggtgtacattggggatgcgcatacgaacactgtgtggaaatttaccctgacggagaaattggagcatcgaagcgtgaaaaaggccgggattgaagtgcaggagatcaaggaagctgaggccgtggtggagacaaagatggaaaataaacccacttcatcagagcttcagaaaatgcaggaaaagcagaagctgatcaaggagcctgggtctggtgtgccagtggtgctgatcacgacactgttggttatccccgttgtcgtgcttctcgctatagctatattcatccggtggaaaaagtcacgggctttcggtgggaaaggatccggggggcttaatctcggcaacttcttcgcgagccgaaagggatattctagaaaggggttcgatcgtctttcgactgagggttcagatcaagagaaagaagacgacggatcagagagcgaggaggagtacagcgcccccctgccagctctcgcgcccagtagctcatag

SEQ ID NO: 198884 - DNA, 468 bp, synthetic construct
  misc_feature 1..468: note = Description of Artificial Sequence: Synthetic coding sequence
  source 1..468: mol_type = other DNA
atgcacgagcaccacaaggagaccgagtacaaggacaagatccccttacttcaacagcctaagagagaagaagaagaagtgctggatcaaggtgatttttattcactcttgagcaaattgctgggagaaagagaggatgtggtccacgtacataaatataacccaaccgagaaagctgagtccgagtctgatctggtggcagagattgcaaatgtcgtgcagaagaaggatttaggaagaagtgatgcacgcgaaggggctgagcacgagcgggggaatgcgattctggttagggaccgaatacataaattccacaggttggtatcaacccttcgcccccccgagtcaagagtgttctctctacagcagcctccgccgggcgagggaacgtgggaacccgaacataccggcgctcgccgtgaggatatgaagtgcttccagtgcaaggaaatgatctccgtgcagtag

SEQ ID NO: 198885 - DNA, 2922 bp, synthetic construct
  misc_feature 1..2922: note = Description of Artificial Sequence: Synthetic coding sequence
  source 1..2922: mol_type = other DNA
atggccggccgggtgcccagcctgctggtgctgctggtgttcccctcctcctgccttgcctttcggtctccgttatccgttttcaaaagatttaaagagactactagacctttcagtaacgagtgtctgggaaccactaggccagtggtgcctattgactcctctgactttgcactggatatcaggatgcctggggtaactcctaagcagagcgatacctacttctgtatgtcaatgcgcataccagttgatgaggaggccttcgttatcgacttcaaacctcgcgcttccatggatactgtacaccatatgctgttgtttgggtgcaatatgccaagcagtaccggttcctactggttctgcgatgagggaacttgtaccgataaggctaacattctctacgcctgggctcggaacgcaccacctaccagactgcctaagggagtgggatttagggttggcggagagaccgggtccaaatattttgtccttcaggttcactacggagatatatctgcttttcgggacaataataaagactgctccggcgtttccttacaccttacgaggcttcctcaacctctgatagccggtatgtacctgatgatgtctgtggacaccgttatccccgccggggagaaggtggtgaactctgacatctcgtgtcattacaagaactacccaatgcacgtcttcgcttatagggtccacacacatcacctgggaaaggtcgttagtgggtaccgggtgcgtaatggccagtggacattgattggccgtcaatcacctcaattgccccaggcattttatcctgtggggcaccctgttgatgtttccttcggcgacttgctcgctgctcggtgtgtcttcacaggggaagggcgtactgaggccacccacatcgggggtacgagctccgacgagatgtgcaatctctacattatgtactatatggaagctaaacacgctgtgtccttcatgacctgcacacaaaacgtggcccccgacatgtttcggactattccccccgaggctaacataccgatacccgtgaaatccgatatggtcatgatgcacgagcaccataaggaaaccgaatataaggacaaaatacctctcctccagcagccaaaacgagaggaggaggaagtgctcgaccaaggcgacttttattcactcctgtccaaacttttaggagaaagagaggatgtggtgcacgtgcataaatataacccgactgagaaggctgagtctgaaagcgacctggtggcggaaatcgccaatgtggtgcagaaaaaagaccttggacgcagcgatgcgcgggagggtgcagagcatgagcgtggtaacgccatactggtacgagatcggatccataaattccacagactagtgtctacgctgcggccacccgaatcccgtgtgtttagccttcagcagccacctccgggcgagggaacttgggagcccgaacataccggagattttcacatggaggaggcactcgattggccaggcgtatatcttctcccaggtcaagtgtccggcgtggccctcgacccaaaaaacaacctcgtcatcttccaccgtggagatcatgtttgggatggtaactcatttgatagtaaatttgtgtaccagcagattggactcgggcccatagaggaagacactatcctagtgatcgatcctaacaacgccgccgtgctgcagagctccggtaaaaacctcttctacctcccacacggactgagcatcgacaaggatggtaactattgggtaactgacgtcgcccttcaccaggtcttcaagctggacccaaataacaaagagggtcctgtgctgattctggggcgaagtatgcagcccggaagcgaccagaaccacttttgccagcccacagacgtcgcggtggaccctggcacaggcgctatctacgtttctgacggttattgtaacagcagaatagtgcagttctcaccctcagggaaatttatcacccagtggggcgaggaatcctcgggatcttcgccactgcctggacaatttaccgtgccgcattctctggcccttgtccccctcttggggcagttatgtgtggccgaccgggagaacggacggatccaatgttttaaaacagacactaaggagtttgttcgtgaaataaagcactcaagtttcggccggaacgtgtttgcgatcagttatatccccggattactcttcgccgtgaacggaaaaccacatttcggagatcaggagcctgtgcaggggtttgtcatgaacttttccaatggcgagatcatagacatttttaagcctgttcgcaaacatttcgacatgcctcatgatatagttgcctctgaagatggtacagtatatatcggcgatgctcatacgaacacggtgtggaagttcacacttacagagaagctggaacaccgctctgtgaagaaggccggaatcgaggtgcaggagattaaagaggccgaggcggttgttgaaactaagatggaaaacaaacctacgagcagcgaactccagaaaatgcaagagaagcaaaaacttataaaggaacctgggtccggtgtcccagttgttctcattaccacactactggtgatccctgtggttgtgctgctagccatcgccatctttattcggtggaaaaaatccagagccttcggagattctgagcataagctcgaaactagtagcggccgcgttttggggcggtttcgtggcaagggatccggagggctgaatctgggcaactttttcgccagccggaaaggctacagcagaaaaggcttcgaccgcttatctaccgagggatctgaccaggagaaggaggacgacggatcagagagcgaagaggaatacagtgcacccctgcctgcgctggcccctagctcaagctag

SEQ ID NO: 198886 - DNA, 2718 bp, synthetic construct
  misc_feature 1..2718: note = Description of Artificial Sequence: Synthetic coding sequence
  source 1..2718: mol_type = other DNA
atggccggccgggtgcccagcctgctggtgctgctggtgttcccctctagttgcctcgcatttaggagccctctgtcagtgttcaagcggtttaaagaaacaacaagaccattctctaacgaatgcctcggaaccactcggcccgtggtgcctatagatagttcagattttgccctggacattcggatgcctggagttaccccaaaacagagtgacacttatttctgcatgtctatgcgcatcccggtagacgaagaggctttcgtgattgacttcaaaccacgggcctctatggatacagtccaccatatgctgctgtttggctgtaacatgcccagcagtacgggtagctattggttttgcgacgaaggtacatgtactgacaaggccaacatcctgtacgcctgggccagaaatgcccctccaacaaggttgcccaaaggagtgggcttccgcgtgggcggtgagaccggaagcaagtacttcgtgctccaggtgcactatggcgacattagcgccttccgcgacaataacaaagactgctctggtgtctccctccatctgacacggctgccacagccactcatcgcagggatgtacctcatgatgtcggtggacactgtgatcccagcgggagagaaggtggtaaattcagacattagctgccattataagaattatcccatgcatgtgtttgcctatagagtgcacacgcaccacctcggaaaggttgtttcagggtatagggtaagaaacggccagtggaccctcattgggaggcagtcgccccagctgccgcaagctttctacccggtgggacacccagtagacgtcagtttcggcgatcttttggctgctcgttgcgttttcaccggagaggggcgcaccgaggcaacccacatcggtggaacctcaagcgatgagatgtgtaacctttacatcatgtactatatggaagctaaacatgctgtgtcattcatgacttgcacgcagaatgttgcccccgatatgtttagaaccattccaccggaagcaaacatcccgattcccgtcaagagcgacatggtgatgatgcacgaacatcacaaagagactgagtacaaggataaaatccccctgctacagcagcccaaaagagaggaggaggaggtgctcgatcaaggcgatttctactccctgctgagcaagttacttggggaacgcgaagacgtggtgcatgtgcacaagtacaaccccaccgaaaaagcagagagtgagagcgacctcgtggctgaaatcgccaatgtggtccagaaaaaggatctggggaggtcagacgcaagagaaggcgctgaacatgaaaggggcaacgctatcctcgtgcgagacaggatccacaaatttcataggttagttagtactttgagaccccctgagagtcgggtattctcgctgcagcagccccctcctggagaaggaacatgggagcctgagcacactggagacttccacatggaggaagcgctcgactggcccggggtctatctgctgcccggccaggtatccggcgtggccctcgatcctaaaaacaatttggttatttttcacaggggggaccacgtgtgggatggcaacagctttgacagcaaatttgtgtaccaacaaatcgggctgggtccaatcgaggaggatactatcctagtgatagaccccaataacgccgctgttctgcagagcagcggcaagaatttattctacctgccgcatggcctaagcatcgacaaagatgggaactactgggtcacagatgttgcccttcatcaagtcttcaaactagatccgaacaacaaagaggggcccgttctgattctgggtcgatccatgcagcccgggagcgatcagaatcacttttgccagccgacagatgtggccgtggatcccgggacaggagctatctacgtgtcagacggatactgtaacagcaggattgtgcagttcagtccttctggaaagtttatcacacagtggggcgaagaatcatccgggtcttcccctctgcccgggcaatttaccgtgcctcactcgctcgctctcgtgcccctgctggggcagctctgcgttgctgacagggagaatggaaggatccagtgctttaagacggatactaaggaatttgttcgtgaaattaaacattcgtctttcggtaggaatgtatttgctatttcctacatacctggactgctgtttgccgtgaacgggaagcctcatttcggcgatcaggaaccggtacaggggtttgtaatgaacttttccaacggcgagatcatcgacatctttaaacccgtgcgaaagcacttcgatatgccgcacgacatcgtggccagcgaggacgggaccgtgtatattggcgatgcccataccaacactgtgtggaaatttaccctgacagagaaactggagcaccggtctgttaaaaaagcaggcatcgaagtccaagaaatcaaagactctgagcataaactcgagacaagcagcgggagggtgttaggacgctttcgcggaaagggaagcggcgggctgaacttgggcaatttttttgcttcacgcaaaggatactctcgcaagggtttcgatcgtctcagtaccgaaggaagcgaccaagaaaaagaagatgatggaagtgaaagcgaagaggagtatagcgccccactcccagctctcgccccttcctctagttag

SEQ ID NO: 198887 - DNA, 90 bp, synthetic construct
  misc_feature 1..90: note = Description of Artificial Sequence: Synthetic coding sequence
  source 1..90: mol_type = other DNA
atggccggccgggtgcccagcctgctggtgctgctggtgttccccagcagttgcctcgcctttaggtctcccctgtcagtgtttaagtag

SEQ ID NO: 198888 - DNA, 87 bp, synthetic construct
  misc_feature 1..87: note = Description of Artificial Sequence: Synthetic coding sequence
  source 1..87: mol_type = other DNA
atggccggccgggtgcccagcctgctggtgctgctggtgttcccctccagctgtctggccttccgatctcccctgtccgtgttttag

SEQ ID NO: 198889 - DNA, 162 bp, synthetic construct
  misc_feature 1..162: note = Description of Artificial Sequence: Synthetic coding sequence
  source 1..162: mol_type = other DNA
atggccggccgggtgcccagcctgctggtgctgctggtgttcccctcctcatgtctggcttttcggagccccttatccgtcttcaaaagatttaaagagaccacccgcccattttcaaatgagtgtctaggtacaaccagaccagtcgtcccaattgactag

SEQ ID NO: 198890 - DNA, 129 bp, synthetic construct
  misc_feature 1..129: note = Description of Artificial Sequence: Synthetic coding sequence
  source 1..129: mol_type = other DNA
atggccggccgggtgcccagcctgctggtgctgctggtgttcccctctagctgcctcgcctttcgaagtcctttgagcgtatttaagagattcaaggaaaccacgagaccattttccaatgagtgctag

SEQ ID NO: 198891 - DNA, 207 bp, synthetic construct
  misc_feature 1..207: note = Description of Artificial Sequence: Synthetic coding sequence
  source 1..207: mol_type = other DNA
atggccggccgggtgcccagcctgctggtgctgctggtgttcccctcctcctgtctggctttccgctctcctttgagcgttttcaaaagatttaaagaaacaacgcggcctttcagcaacgagtgtctgggtacaactaggccggttgtgcctatagattctagcgatttcgctctggacatacgaatgcccggtgtaacaccatag

SEQ ID NO: 198892 - DNA, 78 bp, synthetic construct
  misc_feature 1..78: note = Description of Artificial Sequence: Synthetic coding sequence
  source 1..78: mol_type = other DNA
atggccggccgggtgcccagcctgctggtgctgctggtgttcccctcttcctgcttagctttcaggagcccgctgtag

SEQ ID NO: 198893 - DNA, 501 bp, synthetic construct
  misc_feature 1..501: note = Description of Artificial Sequence: Synthetic coding sequence
  source 1..501: mol_type = other DNA
atggccgccatcccccccgacagctggcagccccccaacgtgtacctggagacgagcatgggtataatagtcctagagctgtattggaagcacgctcctaagacgtgcaaaaatttcgcagagctagcacgtaggggctattataacggaactaagtttcacagaatcatcaaagacttcatgatacagggtggggatccaactggaaccggaaggggaggcgctagcatctacggcaaacagtttgaggacgaactgcaccctgacctgaaattcacaggggccggaatcctcgccatggctaatgccggacccgatactaatgggtcccaattctttgttaccctggctcccactcagtggttggacggcaaacacactatctttggtcgggtctgccagggcatcggcatggttaatcgcgtgggcatggtagagacaaatagccaagatcgccctgtagacgacgtgaagattattaaggcctacccatctgggtag

SEQ ID NO: 198894 - DNA, 1563 bp, synthetic construct
  misc_feature 1..1563: note = Description of Artificial Sequence: Synthetic coding sequence
  source 1..1563: mol_type = other DNA
atgggcaagcggcagcaccagaaggacaagatgtacatcacctgcgccgaatacacacatttttatggaggaaaaaagccagaccttcctcagacgaactttcgaagacttcccttcgaccattgctcactgtcactacagccttttgtctatcctgtgtgcactcccgacggcatcgtatttgacttgctcaatatcgtgccatggctcaagaagtacgggaccaacccgagtaacggcgaaaaactcgatggacgctctctgattaagctcaacttcagcaaaaactccgaaggcaagtaccattgccctgtgctttttaccgttttcactaacaacactcatattgtggctgtgagaacgacagggaatgtgtacgcatatgaagccgtggagcagctcaatatcaaggccaagaattttagggacctacttacagatgagcctttttccaggcaggatattatcactcttcaggatcccactaatctcgataaatttaacgtgagcaatttttatcatgtgaaaaacaacatgaaaatcattgatcctgatgaagaaaaagcaaaacaagacccatcttactatctcaagaacacaaacgccgagacacgggaaaccttacaggaactctacaaggaatttaagggagatgagattttggcagccaccatgaaagcccctgaaaagaaaaaggtggacaagctgaacgcagcccactattccacgggaaaagtgtcagccagttttacatccaccgccatggtgccggaaacaacacatgaagccgcagccatagatgaggacgtcctgcgataccagttcgtcaaaaaaaagggttacgttcgcctgcacactaataagggtgatcttaatctagagttacattgtgaccttacacctaagacctgcgagaattttatccgcctgtgcaaaaaacattactacgatggcaccatctttcacagatctataaggaactttgttatacagggtggtgacccaacgggtacaggaacaggcggcgagtcttattggggcaaaccgttcaaagacgagttcagaccaaacctatctcacactgggcggggcattctgtcgatggccaattccggacccaactccaatcggagccaattcttcatcaccttccgcagctgcgcttatctggacaagaagcatactattttcgggagagtcgttgggggcttcgatgtgttgactgccatggagaacgtggaaagtgaccccaaaacagaccgccccaaggaggaaattcgaattgacgccaccacagtgtttgtggacccttacgaggaagctgacgctcagatcgctcaagagcggaagacgcagctcaaggtggcgcctgagacgaaagttaaaagctctcagccccaagcaggatctcaggggcctcagactttccggcagggggttggcaagtacattaacccagctgctaccaagcgcgccgcagaggaagaacctagtaccagcgccaccgtcccaatgagcaagaaaaagccgagcaggggctttggggacttttcctcttggtag

SEQ ID NO: 198895 - DNA, 1563 bp, synthetic construct
  misc_feature 1..1563: note = Description of Artificial Sequence: Synthetic coding sequence
  source 1..1563: mol_type = other DNA
atgggcaagcggcagcaccagaaggacaagatgtacatcacctgcgctgaatatacccatttttatgggggcaaaaagccagacctgccccagacaaacttcaggagactgccattcgaccactgttctctgagtcttcagcccttcgtgtacccagtttgtactccagatggaatagtcttcgacctgttgaacatcgtgccttggctgaagaaatatgggacgaatccctctaacggcgagaaactcgacggccgaagtctcatcaagctaaatttctctaagaactccgagggtaagtaccactgccccgtgcttttcaccgtttttaccaataatacccacatcgtggcagtgcgcaccacgggcaacgtgtatgcctatgaggctgttgagcagctgaacatcaaggctaagaatttccgggatcttctaacagacgaaccttttagccgacaagacatcattaccctccaagaccctaccaatctggacaagtttaatgtgagtaacttctatcacgttaagaacaacatgaaaatcatcgaccctgacgaagagaaagctaagcaggatccctcttattatcttaaaaatacgaatgccgaaacgagagaaacactacaagaactttacaaggagtttaagggcgatgaaatcctggccgccactatgaaagccccagagaaaaagaaggtggataagctaaatgcggctcactactcaaccggaaaagtgtctgcaagcttcaccagcaccgccatggtgccggagaccactcacgaggcagccgccatcgacgaggacgtgctgcggtaccaattcgtcaagaaaaagggatacgttagactccacacaaataagggagatttgaacctcgagctgcattgcgacttaacaccaaagacctgcgagaattttattcggttatgcaaaaaacactactatgacgggacaattttccatcggtctattaggaacttcgttatccaaggcggggaccctaccggaacggggactggaggcgagtcatactggggcaaaccttttaaagacgagtttcgccctaatctgtcacacactgggagagggatcctatccatggctaactccgggccaaactcaaatagaagccagttttttatcacattcagatcctgcgcgtatctggataagaaacataccatattcggccgagttgtgggcggtttcgatgtgcttactgccatggagaacgtggaatccgatcctaaaactgaccgacctaaggaggagatcagaatcgacgccactacagtttttgtggatccgtatgaagaagctgatgctcagattgctcaagagcgcaagacccagttgaaggtcgcgccagagaccaaagtcaaaagttcccagccacaggcggggtcacagggaccgcagaccttccgtcaaggtgtcgggaagtatatcaaccctgccgccactaagcgggcagccgaagaggaaccctccacctcggccacagttcctatgagcaaaaagaagcccagcagaggctttggcgacttcagctcctggtag

SEQ ID NO: 198896 - DNA, 1563 bp, synthetic construct
  misc_feature 1..1563: note = Description of Artificial Sequence: Synthetic coding sequence
  source 1..1563: mol_type = other DNA
atgggcaagcggcagcaccagaaggacaagatgtacatcacctgcgccgaatatacccatttttatggaggcaagaagcctgaccttcctcaaaccaactttagaaggctcccttttgaccactgtagcctgagtcttcagcccttcgtctatcctgtctgcacccctgatgggatcgtgtttgatctgctgaacatcgtgccctggctgaagaaatatgggaccaacccatctaatggcgagaaactggatggccgaagccttatcaagctgaacttctctaagaacagcgaagggaaatatcactgccccgttctgttcacggtttttaccaataacacacatatcgtggctgtgcgtactacaggcaatgtgtacgcctatgaggcagtcgagcagctgaacatcaaagcgaagaacttccgggacctactcaccgatgagccttttagccgccaagacatcatcactcttcaggaccctaccaatctggataagttcaatgtaagcaatttttaccacgttaaaaataacatgaagataattgacccagacgaggaaaaagctaaacaagacccatcatactatctgaagaatacaaacgcggagacaagagaaacgctgcaagaactttataaggagttcaaaggagacgaaatactggctgcgacaatgaaggcacccgaaaaaaagaaggtagataagctcaacgcagctcactattctactggcaaggtaagtgccagtttcacttctacagcaatggtgcccgagacaacccacgaggccgctgctatcgacgaggatgttctaaggtaccagtttgtgaaaaagaagggctacgtgagacttcatacgaataaaggagacctcaacctggagctgcattgcgatctcactcccaagacctgcgaaaactttatccggctgtgcaagaagcattattacgacggcacaatctttcacagatcaatcaggaactttgtgatccagggcggtgacccaaccggaaccgggaccggaggtgagagctactggggcaagccgtttaaggatgagtttcggcccaatctctcccataccggacgaggcattctgtccatggcaaacagcggtcctaattctaatagatcacaatttttcattacgtttaggtcttgcgcttacctggacaaaaaacacaccatatttggccgcgtggtgggtggatttgatgtgctcaccgccatggagaacgtggagagcgaccctaagaccgacagaccgaaggaggaaatccggatcgacgccaccacagtatttgtggatccctacgaagaggctgatgcccagatcgcccaagagaggaagacccagcttaaagtggccccagagacaaaagtcaagagcagtcaaccccaggcaggcagtcaagggccccagacgttccgacaaggggtcggaaagtatattaatccggcagccacaaaaagagccgcggaagaagagccatcaacctcagcgaccgtccctatgtcaaagaagaaacctagtcgcggatttggagacttcagctcatggtag

SEQ ID NO: 198897 - DNA, 1584 bp, synthetic construct
  misc_feature 1..1584: note = Description of Artificial Sequence: Synthetic coding sequence
  source 1..1584: mol_type = other DNA
atgggcaagcggcagcaccagaaggacaagatgtacatcacctgcgcagaatacacccatttctatggcggcaagaaaccagacctcccacaaacaaatttccgtcgtctgcccttcgatcattgcagcctctccctgcagccctttgtctatcccgtatgcacaccagatggaatcgtcttcgatctgctgaatatcgtaccatggctgaaaaaatacgggacaaacccgagcaacggggagaaattggatggccgtagtctgattaaattaaatttctccaagaacagcgagggcaaataccattgcccagtgctctttaccgtgttcactaacaatacccatattgtagctgtgagaaccaccggcaatgtctatgcttatgaggcggtagaacaactgaatatcaaagccaaaaatttccgagaccttttgaccgacgagccattttctcgccaagatatcattaccctccaggatccaactaacctagacaagttcaatgtttctaacttttaccacgtcaaaaataatatgaaaatcatcgaccctgatgaggagaaagctaagcaagatccaagctactatctgaagaacacaaatgcagagacgagggagacccttcaagaactctacaaagagtttaagggcgacgaaatcttggcagccactatgaaagccccagagaaaaagaaggttgacaaactgaatgccgctcactatagcactggaaaggtgtcagcttctttcacctcaaccgcaatggtacctgagactactcatgaggcagccgccatcgacgaggacgtgcttcgataccagtttgtgaagaaaaagggctatgtaaggctgcataccaataaaggggatttgaatctggagttgcactgcgacctaaccccgaaaacatgtgagaacttcattcgcttgtgtaagaaacactactatgatggaaccattttccataggagcatacgtaactttgtcatccagggaggggatcctacagggactggcaccgggggcgagtcctattggggaaagcccttcaaggacgagtttcgcccaaacctttcacacacagggcgcggcatactatctatggcaaactctggccctaacagcaaccggtcacaattctttatcaccttccgtagttgcgcctatctggataagaagcacaccatttttggtcgggttgtcggcgggtttgacgtgctcaccgccatggaaaatgtcgaatcagaccctaagactgaccggcccaaagaggagatacggattgacgctacaacagtgttcgtggatccctacgaggaggcagatgctcagattgcccaggagcgtaagacccagctgaaagtggcacccgagaccaaggtgaaatcatctcaaccgcaggctggtagccagggcccccaaacattccggcagggggttgggaagtacattaaccctgcggccactgaacagcaaagaaagtctccccagccagtccctctgtccccatgtccgcgacgaagccccgtcggagtccttggtacgagcgcgcctggcagctccaggctgccagacgaccactag

SEQ ID NO: 198898 - DNA, 1470 bp, synthetic construct
  misc_feature 1..1470: note = Description of Artificial Sequence: Synthetic coding sequence
  source 1..1470: mol_type = other DNA
atgggcaagcggcagcaccagaaggacaagatgtacatcacctgcgctgaatatacccatttctacggcggtaagaagcccgacctgcctcagacaaatttcagacgcttgcccttcgaccactgtaggaatatcgtaccctggctgaagaagtatggaacaaatccttctaatggcgagaagctggacggccggtcattgatcaagctcaatttctccaaaaattcggagggaaagtatcattgccctgtcctctttactgtttttaccaacaatacgcatattgtggccgtacgtacaactggaaatgtctacgcttacgaagccgtggaacagctaaatatcaaggccaagaacttccgcgatctgttgactgatgaaccattctcacgacaagacatcatcacgcttcaggacccgaccaacttggataaatttaatgtctccaacttttaccatgtgaaaaacaatatgaaaattattgacccggacgaggagaaggcaaaacaggatcccagttactacctcaaaaacacaaacgctgagactcgtgagacacttcaggaactgtacaaggaattcaaaggagatgaaatactggcggccaccatgaaagctcctgagaaaaaaaaagtagataagcttaatgctgcacactactccaccggtaaggtgtctgcctcttttacttctacagctatggtgcccgagactacgcatgaagccgccgccattgatgaagatgtgctgcggtatcagtttgtaaaaaagaaagggtatgtgcgtttacacaccaataagggagacctaaacttggagctgcactgcgatcttacacctaaaacctgcgaaaactttattcgtctctgtaaaaaacattactacgacggcacgattttccacaggtccatccgcaacttcgtgattcaggggggggatcctaccggcacaggcacagggggtgaaagctactggggtaaaccctttaaggacgagttccgacccaatctgtcccacacggggcgggggatcctgtctatggctaattccggtccaaatagtaatcgttcgcagttttttattacattccggtcgtgcgcctacctggacaaaaaacataccatcttcgggcgagttgtcggaggcttcgacgtccttaccgctatggaaaatgtggagtcagaccctaaaacggataggcccaaagaagaaatccgaatagacgccaccaccgtgtttgtcgatccttacgaggaagctgatgctcagatcgcacaggaaagaaagactcagcttaaggaagcttctagccgggggcgcgcattgaatcagtgccactgtccccacgtacaggaagaggcccaatcagggttctgggggctgcaactgctagtcgccgctgcaacctgccgcctgtacctttgtccatctttctcccatcagtccctgatgctgaagctgcaggcatag

SEQ ID NO: 198899 - DNA, 1563 bp, synthetic construct
  misc_feature 1..1563: note = Description of Artificial Sequence: Synthetic coding sequence
  source 1..1563: mol_type = other DNA
atgggcaagcggcagcaccagaaggacaagatgtacatcacctgcgctgaatacacccacttttatggcggaaagaaacccgatctgcctcagacgaattttagacgcctgcccttcgatcactgctccctcagcctgcagccatttgtgtacccggtgtgtactccagacggcatcgtgtttgatctccttaatattgttccatggctgaaaaaatatggcacaaatccaagcaacggcgaaaagttagatggaagaagcttaattaaattgaatttttcgaagaacagcgagggaaaatatcactgccccgtgcttttcacagttttcactaataatacgcatatcgtggcagtgagaactacagggaatgtatatgcctacgaggccgtggagcagcttaatatcaaagccaagaattttagagatctgctaaccgacgagccctttagcagacaggacatcattacattgcaggaccctaccaatctagacaaatttaatgtgtctaatttctatcatgtaaagaacaatatgaagatcattgaccccgacgaagagaaggcgaaacaggatccatcttactacctcaaaaacaccaacgcggagacacgcgagactctgcaggagctgtacaaagaattcaaaggggatgaaatattagcagctacgatgaaagccccggaaaagaagaaagtggataaactgaatgctgcgcactactccaccggaaaggtcagcgcatctttcacctcgacagccatggtgccggaaacgacccatgaggctgccgcaatcgatgaggacgtgctgagataccaattcgtgaagaagaagggatacgtgaggttgcataccaataagggtgacctaaatctggagttacattgcgacctaacaccgaagacttgtgagaacttcatcagactatgtaaaaagcactactacgatggcacgatatttcataggtcgattagaaactttgtaatacaagggggcgacccgaccggtaccggcaccgggggcgagtcctattgggggaagcctttcaaggacgaattccggccgaacctcagtcatacaggtagaggaattctgagtatggcgaactctggcccgaacagtaacaggagccagttcttcatcacctttagatcatgtgcttacttagataaaaagcatacaatttttgggagagtagtggggggtttcgacgttctgacagccatggaaaacgtagaaagcgacccaaagacagatagacctaaagaggaaatacgcatagacgcaaccactgtatttgtggatccatacgaggaggcagatgcccagattgctcaggaacgcaaaacccaactgaaggtggcacccgagactaaggtcaagagttcccagccacaggcgggctcccagggcccacagaccttccgccaaggagtagggaaatacattaaccccgctgcaacaaagcgggccgctgaggaggagccatctacctccgcgacagttccgatgtcaaaaaaaaagccttcccggggcttcggggacttctccagctggtag

SEQ ID NO: 198900 - DNA, 1479 bp, synthetic construct
  misc_feature 1..1479: note = Description of Artificial Sequence: Synthetic coding sequence
  source 1..1479: mol_type = other DNA
atggccgtgctgctggagaccaccctgggcgacgtggtgatcgacctgtataccgaagaacgcccaagagcctgcctgaattttctgaagctgtgtaagatcaagtactataattattgtctcatacacaacgtgcagcgtgacttcatcatacagaccggagatcctactggtacaggacggggcggcgaaagcattttcggccagctgtacggagatcaggctagttttttcgaagcagagaaggtccccaggataaaacataaaaaaaaagggactgtaagtatggtcaacaatggatcagaccagcatgggagtcagttccttatcaccactggggagaacctggactatctcgacggggtgcataccgtattcggggaggtcaccgaagggatggacattatcaagaagattaacgaaacatttgtagataaggactttgtcccatatcaagacatccgcatcaatcacacagtgatcctggacgacccttttgatgaccctcctgacctactcatccccgacagaagccccgagccaacacgcgaacagctcgatagtgggaggattggagctgatgaggaaattgacgacttcaaaggccgatcggcagaagaagtggaagagataaaagcagagaaagaagctaagacacaggccatcttgctggagatggtgggggatctcccggatgccgatatcaaaccaccagagaacgttctgttcgtatgcaagctgaaccctgtcaccaccgacgaggacctggagattatatttagtcggttcggcccaattcgcagctgcgaggtcattagagattggaaaaccggcgaatcactgtgttatgcttttattgaattcgagaaggaagaagattgtgagaaggcctttttcaaaatggacaacgtacttatcgacgatagacggattcacgtggacttttcgcagtctgttgcaaaggtcaagtggaaggggaagggggggaaatataccaaatccgatttcaaggagtacgaaaaggagcaggataagccccctaacctcgtgctcaaagacaaggtaaagcccaagcaagataccaaatacgatctgatcttagatgaacaggccgaggacagcaaaagtagccattctcatacttctaaaaagcacaaaaaaaaaactcaccactgtagcgaggagaaagaagatgaggactacatgccgatcaaaaacactaaccaggatatttaccgggaaatgggattcggccattacgaggaagaagagtcttgctgggaaaaacagaagagcgagaagcgggacaggacccaaaacaggtcccggagtaggtcacgtgagagggatgggcactactccaactctcacaagagcaagtatcaaacggacttgtacgagcgagagagatcaaagaaacgggatagatccagatctcccaagaaaagcaaagacaaggagaaatccaaatatcgttag

SEQ ID NO: 198901 - DNA, 384 bp, synthetic construct
  misc_feature 1..384: note = Description of Artificial Sequence: Synthetic coding sequence
  source 1..384: mol_type = other DNA
atgagccggcccaagacccagaaccaggtgacccacacccaggtgaagaacacaagacggaaacctataaccgtgctgaaacgcaagaagatgagaactacatgccagtccaaaatcctgattaggatctcaatagagaagtggggcctggttacaatgaaaaagaagaaggccgtagggaggaataaaagggtgaaacgtgagactgagctgcgcacagaggtggtcgctgacctcgagagaggaatggccataattgtcatcgttatcaaccaaaacacgaaacaaatcttcatgaaggagaagggagttaagcgagagaccgaggccgaggtccaacgcagccccaaaatcaagaagaatctttcaatcgatgaacgttag

SEQ ID NO: 198902 - DNA, 318 bp, synthetic construct
  misc_feature 1..318: note = Description of Artificial Sequence: Synthetic coding sequence
  source 1..318: mol_type = other DNA
atgtgccagggcggcgacttcacccggcacaacggcaccggcggcaaaagcatttacggagagaaatttgaggatgagaatttcatcctgaagcacacggggcctggtatactgtccatggccaacgcggggccaaacaccaacggctcacagttcttcatttgtacagccaaaactgagtggctcgacgggaaacacgttgtgtttgggaaggtcaaggaggggatgaatatcgtcgaagctatggaaagattcgggagccgcaatggaaaaacatcgaaaaagatcaccatcgcagattgtgggcagctggagtag

SEQ ID NO: 198903 - DNA, 390 bp, synthetic construct
  misc_feature 1..390: note = Description of Artificial Sequence: Synthetic coding sequence
  source 1..390: mol_type = other DNA
atggtgaaccccaccgtgttcttcgacatcgccgtggacggcgagccattgggtagggtgtctttcgaactgttcgctgacaaagtgcccaagacagctgaaaactttcgggccttgtccaccggcgaaaagggatttggttacaagggctcttgtttccacaggatcattcccggctttatgtgtcaggggggggattttaccagacacaatggcaccggaggtaagtctatctgtactgccaagacagagtggctggacggcaaacacgtggttttcggcaaggtcaaggaaggcatgaatatagtggaggccatggaaaggttcgggtccaggaacggaaaaaccagtaagaaaattaccatagccgactgtgggcaactagagtag

SEQ ID NO: 198904 - DNA, 498 bp, synthetic construct
  misc_feature 1..498: note = Description of Artificial Sequence: Synthetic coding sequence
  source 1..498: mol_type = other DNA
atggtgaaccccaccgtgttcttcgacatcgccgtggacggcgagccactgggacgcgtcagctttgaactgtttgcagacaaggtaccaaagacagccgaaaatttccgtgccttgagcaccggggaaaaggggtttggctacaagggctcctgcttccaccggatcatccctggcttcatgtgtcagggaggggatttcacgcgacacaatgggactggtggaaagtccatctacggcgagaaattcgaggacgaaaattttatactgaaacacacaggaccaggcattctctccatggccaatgccggcccaaataccaatggaagccagttttttatttgtaccgctaagacagagtggctagacggtaaacacgtggtcttcggcaaagtgaaggaaggaatgaatattgtggaagccatggagaggtttggttcgcgaaatggtaaaacctcaaaaaagataacaatagctgattgcggccagctcgagtag

SEQ ID NO: 198905 - DNA, 495 bp, synthetic construct
  misc_feature 1..495: note = Description of Artificial Sequence: Synthetic coding sequence
  source 1..495: mol_type = other DNA
atggtgaacagcgtggtgttcttcgacatcaccgtggacggcaagcccttaggacgtatcagtatcaaattatttgcggataaaatcctgaagacagcggaaaactttcgtgcgttatcaaccggcgaaaagggtttcaggtacaagggaagttgctttcaccgaattattccaggcttcatgtgtcaggggggagattttaccagacataatgggaccggagataaaagtatatatggtgaaaagttcgatgatgaaaacctgatcagaaagcacacgggctccggtatattgtctatggctaatgctggcccaaacacaaatggatcccaattcttcatatgtgcggcaaagacagagtggcttgacgggaaacatgttgcatttgggaaggtcaaggagagagttaacatcgtggaggccatggagcactttgggtacagaaacagcaagacctccaaaaaaataaccatagcagattgcgggcaattctag

SEQ ID NO: 198906 - DNA, 651 bp, synthetic construct
  misc_feature 1..651: note = Description of Artificial Sequence: Synthetic coding sequence
  source 1..651: mol_type = other DNA
atgctgcggctgagcgagcggaacatgaaggtgctgctggccgccgctctgatcgctgggtcagtgttcttcctcctgctacccggaccctccgcggccgatgaaaagaagaaaggtcccaaggtcaccgttaaggtgtacttcgacctaaggataggcgatgaagatgtcggaagggtgatctttggtttatttggaaaaactgtcccgaaaacggtagacaactttgtggccctggcaactggcgaaaagggattcggctacaagaatagcaagtttcatcgggtgatcaaagacttcatgatccagggaggtgatttcactagaggggatgggacaggcggtaaatctatctacggggagcggtttccagatgaaaacttcaagctgaaacattacggtccgggatgggtcagcatggccaacgcaggtaaagacactaatggttctcagttcttcatcacgacggtgaagactgcatggctggatgggaaacacgttgtgtttggcaaggtactggaggggatggaggtggtgaggaaagtcgaatcaaccaagacagactcacgggacaaaccgctcaaagacgtgataattgccgattgtggtaagattgaagtggaaaaacctttcgctatagccaaggaatag

SEQ ID NO: 198907 - DNA, 639 bp, synthetic construct
  misc_feature 1..639: note = Description of Artificial Sequence: Synthetic coding sequence
  source 1..639: mol_type = other DNA
atgggccccggcccccggctgctgctgcccctggtgctgtgcgtgggccttggagcacttgtgttctctagtggtgctgaagggttcaggaagaggggtccttccgtcacagcaaaggtgtttttcgacgtcaggatcggagataaagacgtcgggcggatcgtgatcggcctgtttggtaaggtcgtgcctaagaccgtcgagaattttgtggctctcgcgaccggcgaaaaaggatacggttacaaaggcagcaaattccatagagtaatcaaagatttcatgatccaggggggtgacatcacaaccggggatggaaccggcggcgtctccatttatggcgagacttttccggacgaaaacttcaagttaaaacattatggaattgggtgggtgtcaatggcgaatgcgggccccgacacaaatggaagccagttttttattactttgaccaagcccacgtggttggacggcaagcatgtggtgttcggcaaagtgatcgatggaatgacagtggtgcactccatcgagctccaggctaccgatggtcacgaccggcctctgacgaactgctcaatcatcaacagcggcaaaattgacgttaagaccccctttgtggtggagattgccgactggtag

SEQ ID NO: 198908 - DNA, 1113 bp, synthetic construct
  misc_feature 1..1113: note = Description of Artificial Sequence: Synthetic coding sequence
  source 1..1113: mol_type = other DNA
atgagccaccccagcccccaggccaagcccagcaaccccagcaacccaagggtgttttttgatgtagatataggcggggaaagggtaggccggattgtgcttgagctcttcgcagatatcgtccctaagactgcagagaattttcgcgcactctgcacaggggagaaggggattggccatacaaccggcaagcccctgcatttcaaaggttgtccttttcatcgcattatcaagaaattcatgatccagggcggcgacttctcaaaccagaatgggaccgggggggaaagcatatatggggagaaatttgaggatgagaactttcactataaacacgatagagaaggactgttgtccatggcgaacgccggacgcaataccaacggatctcaattcttcattacaaccgtgccaacaccacacttggacgggaagcatgttgtctttggacaagtgatcaaaggcattggcgtcgctcgtattctggaaaatgtcgaggtgaagggcgagaaacccgcgaagctgtgcgtaatcgccgagtgtggggagttgaaagagggtgacgacggggggatcttccctaaggacggttccggtgactcacaccccgactttcctgaggacgcggacatcgacctgaaggacgtggacaaaattctattgataacagaggatctgaaaaatattggcaacacctttttcaaatctcagaattgggagatggccatcaaaaagtacgcagaggtcctgcgctatgtggattcctcaaaagcggtgatcgagacggcagacagagcaaagctgcagcctatcgcattgagctgtgtactgaatataggggcctgtaagttaaagatgtctaattggcagggagcaatagacagctgtctggaggcccttgaattggacccaagcaacactaaagcgctctacaggagggctcagggctggcaaggacttaaggagtatgatcaggctctggccgaccttaagaaagcacaaggcattgcaccagaagacaaggccattcaggcagagctgctgaaggtgaagcagaaaatcaaagcacagaaggacaaagaaaaggccgtgtacgctaagatgtttgcctag

SEQ ID NO: 198909 - DNA, 597 bp, synthetic construct
  misc_feature 1..597: note = Description of Artificial Sequence: Synthetic coding sequence
  source 1..597: mol_type = other DNA
atggacgccatcctgaactaccggagcgaggacaccgaggactactacactctgttaggatgtgacgagctctcgtccgttgagcagattttggccgagtttaaggtaagggcgcttgagtgccacccagacaagcacccagaaaacccaaaagccgtggagacctttcagaagctccagaaggccaaggagatactgacaaacgaggagagtcgcgcacgttacgaccattggcgtaggagccagatgagtatgccattccaacaatgggaggctctaaatgattccgtaaagacttctatgcattgggtggttagagggaaaaaagatcttatgcttgaggaatcggataagacccacacaaccaaaatggagaacgaggaatgcaacgaacagcgtgaacgaaagaaggaagagctggcctccacagccgagaaaaccgagcagaaagaaccaaagcccctggaaaaatctgtgtctccacagaattctgattcgtccggctttgcggatgtgaacggctggcacctgcgctttaggtggtcaaaagatgcaccaagtgagctgttaagaaagtttagaaactatgagatctag

SEQ ID NO: 198910 - DNA, 468 bp, synthetic construct
  misc_feature 1..468: note = Description of Artificial Sequence: Synthetic coding sequence
  source 1..468: mol_type = other DNA
atgctggccctgcggtgcggcagccggtggctgggcctgctgagcgtgccccggagtgtacctctgaggctgccggctgccagagcatgctccaaggggagcggcgacccaagctcgagcagctcgtctgggaaccctctggtctatctcgacgtcgatgccaacggtaagcccctgggacgggtggttttagaactgaaggccgatgttgttcccaagacggctgaaaactttcgggccttatgcactggagaaaagggatttggctacaaagggtcaacgtttcacagggtcatcccctccttcatgtgtcaggccggggatttcactaatcacaatggtacgggcggtaagtcaatttatggaagtcgtttcccggacgagaactttactttgaagcatgtcgggcccggatggatggctagcatgctgtgtagtgtgacaagcaagagagcgtggacctcctag

SEQ ID NO: 198911 - DNA, 498 bp, synthetic construct
  misc_feature 1..498: note = Description of Artificial Sequence: Synthetic coding sequence
  source 1..498: mol_type = other DNA
tgaagcagcagcagcagcagcggcaaccccctggtgtacctggacgtcgatgcgaacggaaaaccactgggccgggttgtgctcgaactcaaagccgatgtggtcccgaaaacggctgaaaactttcgggccctgtgcacaggtgaaaaagggtttgggtacaaggggtcaacattccacagagtgatccccagctttatgtgccaagccggtgactttacgaatcacaacggcacaggcggcaagagtatctatgggagccggtttccagacgaaaactttacgcttaagcatgtcggacctggcgttctctcgatggcgaatgccggccccaacactaatggttcgcagttcttcatctgtactatcaaaactgactggtccatggccctcgacgatatcgctttgcactgttgttctcctgggtcaccagttcttaccggatggatggctagcatgctgtgctcagtcacttccaaaagagcctggacaagttag

SEQ ID NO: 198912 - DNA, 2265 bp, synthetic construct
  misc_feature 1..2265: note = Description of Artificial Sequence: Synthetic coding sequence
  source 1..2265: mol_type = other DNA
atgggcatcaaggtgcagcggccccggtgcttcttcgacatcgccatcaacaaccagccagctgggcgcgtggtttttgagctgttcagcgatgtgtgccctaaaacctgtgagaactttcgatgcctgtgtaccggagagaaagggactgggaagagcactcagaaacctcttcactacaagagttgccttttccacagggtcgtaaaggacttcatggtgcagggcggagacttctctgaagggaacggcaggggcggtgaatccatctacggtgggttttttgaagacgagtccttcgctgtgaaacataacaaggaattcttgctgagtatggctaatagaggcaaggatactaacggatcacagttttttatcacaactaagcctactcctcacctagacggccatcatgtggtctttggacaggtcatttccggccaagaggttgtccgcgagatcgaaaaccaaaagactgatgccgcctcgaaaccttttgcagaagttcggatactgagttgtggcgaactgatccctaaaagcaaagtcaaaaaagaggagaagaaacgacacaagagctcctcgagttccagcagctctagttctgacagcgacagtagttcagacagccagtcttcaagtgattctagcgatagcgagagcgccacagaggaaaagtctaagaaacgcaaaaaaaagcataggaagaattctagaaaacacaagaaggagaagaagaaaaggaagaagtcaaagaaaagcgcatctagcgagagtgaagccgaaaacctcgaggctcagcctcagtcaacagtcagaccagaagagatccctccaatccccgagaatcggttcttgatgcgtaaatctccccctaaggcggacgagaaggaaaggaaaaaccgagaaagagagcgagaacgcgaatgtaatccccccaattcgcagcctgcttcctatcagagaaggctgctagtgaccagatctggtagaaaaatcaaagggagaggaccaagaaggtatcgtacccctagtcggagccgaagtcgcgaccgattcagaaggtcagaaacccctccgcactggcggcaagaaatgcagcgcgcccagcggatgcgcgttagcagcggagaacgctggatcaagggcgacaagtcagaactcaacgaaatcaaggaaaatcaacgatctcctgtgcgcgtgaaagagcgcaagatcaccgaccacaggaacgtgtctgaaagcccaaacaggaagaacgagaaagagaaaaaagtgaaagatcacaaatccaatagtaaggagcgcgatatcaggcgaaatagtgaaaaggacgacaagtataaaaataaagtgaagaagagggcgaaatctaaaagtcgcagtaagagcaaagaaaagtctaagagcaaggaacgggactccaagcacaataggaatgaggagaagcgtatgaggagccggagtaaaggaagggatcatgagaatgtaaaagaaaaggaaaagcagtctgactcaaaaggcaaggaccaggaaaggagccggtctaaggagaaaagcaaacagcttgaaagcaaaagcaatgaacacgaccatagcaagtccaaagagaaggatcgccgggcgcagagccggagtagggagtgcgatattacaaaaggcaaacatagttacaacagtcgaaccagagaaagaagtaggtccagagaccgctcaaggagggtaagaagccgcacacacgacagggacaggagccggtctaaggagtaccaccgctatcgggaacaggagtacaggaggcgagggaggagccggtctcgagagaggaggaccccaccggggcgttcccgaagcaaggaccgtaggagacggagaagagatagcagatcatctgagcgagaggagagccagtctcgtaataaagataagtatcgcaatcaggagagtaagagcagccacaggaaagagaattctgagtccgaaaagcggatgtacagcaaatcgagagatcacaactcatcaaataatagtcgcgagaaaaaggccgatagagaccagagccccttctccaaaatcaagcagagtagccaagataatgagctcaaaagcagcatgctgaagaacaaggaggacgaaaagatacgctcaagcgtggaaaaggagaaccagaaatccaaagggcaggagaatgaccatgtgcatgagaagaacaagaaatttgatcacgagtcctccccggggaccgacgaagataaaagtggctag

SEQ ID NO: 198913 - DNA, 741 bp, synthetic construct
  misc_feature 1..741: note = Description of Artificial Sequence: Synthetic coding sequence
  source 1..741: mol_type = other DNA
atgggcatcaaggtgcagcggccccggtgcttcttcgacatcgccataaataaccaacctgccggccgggtagtcttcgaactgttttctgatgtctgccccaagacctgcgaaaatttcaggtgtctgtgtactggcgaaaaagggacaggaaagagcacccagaagcccctgcactataagagctgcttgttccacagagtcgtgaaagatttcatggtgcaggggggagattttagcgaaggaaacggcaggggtggcgaatctatctacggaggctttttcgaagacgaaagcttcgctgtcaaacataataaggaattcctcttgagcatggcaaaccgcggtaaagacaccaacggaagccaattttttatcactactaagcccactccccatctcgacggtcaccacgtagtgtttggccaggtgatatcaggtcaggaggtcgtcagagagattgaaaaccagaaaaccgacgccgcgtcaaagccttttgcggaggtgaggatccttagctgcggcgagctcatcccaaagtcaaaggtcaagaaagaagaaaagaagcgccacaaatcaagctcttcatccagctcttctagtagcgatagcgactcctctagcgacagtcaaagtagctcagattctagcgattcggaaagtgccacagaagaaaagagtaagaaaaggaagaaaaagcacaggaaaaattcgaggaaacacaaaaaggagaagaagtag

SEQ ID NO: 198914 - DNA, 180 bp, synthetic construct
  misc_feature 1..180: note = Description of Artificial Sequence: Synthetic coding sequence
  source 1..180: mol_type = other DNA
atgggcatcaaggtgcagcggccccggtgcttcttcgacatcgccattaataatcagcccgccggtcgcgtggtgttcgagctcttcagcgatgtctgcccaaaaacatgcgagaactttagatgtctatgcaccggggagaagggcaccgggaaatcgacccaaaagcccctccactag

SEQ ID NO: 198915 - DNA, 2265 bp, synthetic construct
  misc_feature 1..2265: note = Description of Artificial Sequence: Synthetic coding sequence
  source 1..2265: mol_type = other DNA
atgggcatcaaggtgcagcggccccggtgcttcttcgacatcgccatcaacaatcaacccgctggccgcgtggtgttcgaattatttagcgacgtttgccctaagacctgcgagaacttcaggtgcctgtgtacgggcgaaaaggggacagggaagtctacccaaaaaccactccactataagtcgtgtcttttccacagagtggttaaggacttcatggtacagggtggagacttttctgagggcaacggccgcggaggtgagtccatatacggcggtttctttgaggacgaatcatttgccgtgaagcataacaaggagttcctcttgtctatggctaatagaggaaaagataccaacgggtcccagtttttcatcaccacaaagccaacccctcacttggatggacaccacgtggtctttggtcaggtcatctcgggacaggaagtggtgagggagatcgaaaatcagaagaccgacgccgccagtaaaccgtttgcagaggtgcgcatcttgtcttgcggagaactgatcccaaaaagcaaagtcaagaaggaggaaaagaaacgccacaagtcaagctcctcttcctccagcagcagttccgactcagatagctctagcgatagccagtcaagtagtgacagcagcgactcggaaagtgccaccgaagaaaagagcaagaagagaaagaagaagcaccggaaaaactccagaaaacataagaaggagaagaagaaaaggaaaaaaagcaaaaaatctgcgagtagtgagtccgaagcggagaatctggaagcacagcctcagagcaccgtgcgtcccgaagaaataccaccgatacccgagaacaggttccttatgcggaagtccccacctaaggcagacgagaaagagcggaaaaacagagagcgggaacgggagagagagtgcaacccccctaactctcagcctgcatcgtaccaaaggaggttgctcgtcactcgaagtggcaggaagatcaaagggcggggcccgcggcgctatagaactcctagtcgctcccgctcccgggatcgattcagacgttcggaaactcccccgcattggcggcaggagatgcagagagcccaacgtatgcgggtgagctccggcgagaggtggattaagggggacaagtccgaactgaacgagatcaaagaaaaccagcggagtccagtacgcgtgaaagagcggaagatcactgatcatcggaatgtctctgagagccccaaccgcaagaacgaaaaagagaagaaagttaaggaccacaagtctaactccaaggagcgtgatataagaaggaatagtgaaaaggatgacaaatataagaataaggtgaagaaaagagcaaaaagtaaatctagaagtaaatccaaggaaaaatcaaagtccaaagaacgtgacagtaaacataataggaatgaagaaaaaagaatgcgcagcagatcaaagggaagggaccacgaaaatgtaaaggagaaggaaaagcagagcgattctaagggcaaagaccaggaaagatccagatctaaagaaaaatcaaaacagctcgagtcaaaaagcaacgaacatgaccactctaagagcaaagagaaagaccggagagcacaaagcaggtcgagagagtgcgatattaccaagggaaagcactcatataatagccggacccgggagcgatctagatcccgggaccggtcacgcagagtgcgctcccgtacgcacgaccgcgatagaagcaggagtaaggagtatcatagatacagagaacaagagtaccgcaggcgaggccggtcacggtccagagagcgtaggacccctccaggtaggagtagatcaaaagacaggagacgccggcgaagagatagtcgctcttccgaaagggaagagtcccagagtagaaataaagataagtacagaaatcaagagtctaagagctcacaccgcaaagaaaactccgagagcgagaagcgcatgtatagtaaaagcagagatcacaatagcagtaacaatagccgtgagaagaaagctgacagagaccaatctccatttagtaagataaagcagagctcacaagacaacgaactgaagagcagtatgttaaaaaataaggaggacgagaagattagaagttctgtagaaaaggagaaccagaagagcaagggccaggaaaacgaccatgtgcacgaaaagaacaaaaaattcgaccacgagagcagtccgggtacagacgaggataaatccggctag

SEQ ID NO: 198916 - DNA, 1347 bp, synthetic construct
  misc_feature 1..1347: note = Description of Artificial Sequence: Synthetic coding sequence
  source 1..1347: mol_type = other DNA
atgggcatcaaggtgcagcggccccggtgcttcttcgacatcgccatcaacaatcagccagcggggagagttgtattcgaactctttagcgacgtctgtcccaaaacttgcgagaactttcgctgcctatgcactggagaaaagggaaccgggaagtcaactcagaaaccactccattacaagtcgtgcctatttcaccgggtggtgaaggacttcatggtccagggaggagactttagcgagggaaacggtagaggtggtgagtcgatatatgggggcttcttcgaggacgagagctttgctgtgaaacataacaaggaattccttctaagtatggccaatagaggaaaggataccaacgggtctcagttctttattacaacaaaaccgacaccccatctagacggacatcatgtagtatttgggcaggtaatctcgggacaagaggttgttcgggaaatcgagaaccagaagaccgacgctgcttcaaagcccttcgcagaggtcaggatactgtcctgcggcgagctcatccctaaatctaaggtaaagaaggaggagaagaagaggcacaaatcatcctccagttctagctcctcttcctccgattcggactccagttcggattctcagtctagctctgattcttctgatagcgaatccgctacagaagaaaagtctaaaaagcggaagaagaagcacagaaagaatagccgcaaacataaaaaggagaaaaaaaagaggaaaaagagtaaaaaatccgcctcctccgagtccgaggctgaaaaccttgaggctcagccccagagtacggtgcggcctgaagagatcccaccaataccggagaacaggttcctgatgagaaagagccctcccaaggctgacgagaaggagaggaaaaatcgtgagcgcgagcgtgagcgcgaatgcaacccccctaacagccagcccgcaagttaccaaagacgactcctggtgacgcgcagcggtcggaaaatcaaggggcgcggccctcgccgataccgcaccccttcgcgcagtaggtctagggatcgattccgcaggagtgagacaccaccacattggcggcaggagatgcaacgggcccagcgtatgagggttagctcaggcgaacggtggattaaaggagacaaatctgaactgaatgagattaaggagaaccaaaggtctcccgtgcgagtgaaagagcgcaagataactgaccaccggaatgtgagcgaatctccgaaccgtaagaatgagaaggagaaaaaggtgaaagatcacaaaagcaattctaaagaaagagacattcggcggaagaagaaaaaaaaaaagaagaagtag

SEQ ID NO: 198917 - DNA, 534 bp, synthetic construct
  misc_feature 1..534: note = Description of Artificial Sequence: Synthetic coding sequence
  source 1..534: mol_type = other DNA
atggccgtggccaacagcagccccgtgaaccccgtggtgttcttcgatgtcagcatcggcggacaggaagtcggccgcatgaagatcgaactgtttgccgatgtggttcccaaaacggctgagaatttcagacaattctgcactggcgagtttcgtaaggacggtgtccctatcggatacaaaggctctactttccatcgtgtgatcaaggattttatgatccaaggcggtgatttcgtaaacggcgatggaacgggagttgcgtcaatttataggggccccttcgccgatgagaattttaaactgaggcactcagctccagggctcctgagcatggcgaactcaggcccatcaaccaacggatgccaattctttatcacgtgttctaagtgcgattggctcgacggaaaacacgttgtttttggtaaaatcattgatggtctgctggtcatgcgaaaaattgagaacgtcccgacgggacccaacaacaagccaaagctgccagtggtgatcagccagtgcggcgagatgtag

SEQ ID NO: 198918 - DNA, 174 bp, synthetic construct
  misc_feature 1..174: note = Description of Artificial Sequence: Synthetic coding sequence
  source 1..174: mol_type = other DNA
atgaagatcgagctgttcgccgacgtggtgcccaagaccgccgagaacttccgccaattctgcaccggggagtttcgctcagtctccgatgttttcgatttctttgcatgtagccgcggcgtgttttggggttgtagcgagggaatcggagaacccccggcaggactcgagtag

SEQ ID NO: 198919 - DNA, 405 bp, synthetic construct
  misc_feature 1..405: note = Description of Artificial Sequence: Synthetic coding sequence
  source 1..405: mol_type = other DNA
atgatcgccggcgacagcgaccggcggaaggacggcgtgcccatcggctacaaagggagcacctttcacagggtaatcaaagactttatgatccagggtggggatttcgtgaatggtgatggcacaggggtggcgagcatctatcgcggacctttcgccgatgaaaactttaaattaagacacagcgcgcctggtcttttgagcatggccaactccgggccttccaccaatgggtgtcagtttttcatcacttgttccaagtgtgattggctcgatgggaaacacgtcgtgttcggaaaaattatcgacgggttacttgttatgagaaagatcgagaacgtacctaccggccccaataataagcccaaactgccggtagtgatttcccagtgcggcgaaatgtag

SEQ ID NO: 198920 - DNA, 207 bp, synthetic construct
  misc_feature 1..207: note = Description of Artificial Sequence: Synthetic coding sequence
  source 1..207: mol_type = other DNA
atggtgaactggaagggcctggtgctgcccgccgtgacccccagcttgtttctgtttggctaccggaaagatggggtacccatcggttacaaaggaagtacattccaccgtgtaattaaagatttcatgattcagggtggtgactttgttaacgtttcaacaataccgttcctgtctaagacaagaagcttcagtttttgttgctag

SEQ ID NO: 198921 - DNA, 435 bp, synthetic construct
  misc_feature 1..435: note = Description of Artificial Sequence: Synthetic coding sequence
  source 1..435: mol_type = other DNA
atgaagatcgagctgttcgccgacgtggtgcccaagaccgccgagaatttccggcagttctgtaccggggaatttcgcaaggacggagtccctattgggtataaaggcagcaccttccatcgggtcatcaaagactttatgattcaggggggtgacttcgtgaatggagacggtaccggcgttgcgtctatataccgcggtccatttgccgacgagaatttcaaattgcgacactctgcacccgggctactgagcatggccaacagcggccccagtactaacggctgccagtttttcattacgtgcagcaagtgtgactggctcgacggcaagcacgttgtgtttggtaaaatcatagacggactgctggtgatgagaaaaatagagaatgtcccaaccggccccaacaataagcctaagctccctgtggtctag

SEQ ID NO: 198922 - DNA, 405 bp, synthetic construct
  misc_feature 1..405: note = Description of Artificial Sequence: Synthetic coding sequence
  source 1..405: mol_type = other DNA
atgatcgccggcgacagcgaccggcggaaggacggcgtgcccatcgggtataagggatcgacgttccaccgggtaatcaaagactttatgatccagggtggagattttgtgaacggtgatggcacaggcgtcgcttcaatctacaggggccctttcgccgacgaaaattttaaactccgccacagtgctcccggccttctgagcatggctaactccggtcctagtactaacggttgtcagtttttcatcacctgttctaagtgtgattggctggacgggaagcacgtggtgttcggcaaaattattgatgggctcctggtgatgaggaaaatcgagaacgtgccgaccggccctaacaataaacctaagttacctgtggtgatttcccaatgtggtgagatgtag

SEQ ID NO: 198923 - DNA, 540 bp, synthetic construct
  misc_feature 1..540: note = Description of Artificial Sequence: Synthetic coding sequence
  source 1..540: mol_type = other DNA
atgcccagcaagagcctggtgatggagtacctggcccaccccagcaccttgggcttggcggtaggcgttgcttgtgggatgtgtttggggtggagcctccgggtttgtttcggaatgctgcctaaaagcaagacctctaaaacccacaccgataccgagagcgaggctagcattctgggagatagcggggagtataaaatgatacttgttgtgagaaatgatctgaagatgggcaagggaaaagtggctgcccagtgttcccacgcagcagtgtccgcttacaagcagatccaaaggaggaaccccgagatgctgaaacagtgggagtattgtgggcagccgaaagtggtagttaaggcacctgacgaggagacactgatcgctctgttggcccatgcaaaaatgctcgggctcaccgtcagcctgattcaggatgccggaaggacacagatcgctcccggttcacaaacagttcttggcattggccctggtccggcagaccttatcgacaaggtcaccgggcacctcaagctttactag

SEQ ID NO: 198924 - DNA, 543 bp, synthetic construct
  misc_feature 1..543: note = Description of Artificial Sequence: Synthetic coding sequence
  source 1..543: mol_type = other DNA
atgatgcccagcaagagcctggtgatggagtacctggcccacccctctactctggggcttgccgtaggcgtcgcctgcggaatgtgcctaggttggagcctccgggtttgctttggtatgctcccaaagtctaaaacatctaagacacatacagatacagagtctgaagcctccattctgggggactccggggagtataaaatgatcctggtggtgaggaacgacctgaagatggggaaaggcaaagtcgcagcccagtgttctcacgctgcggtgtcagcttacaagcagatccagcgaaggaatccagagatgctgaagcaatgggagtactgcggacagccgaaagtagttgtgaaagctcctgacgaggagactctcatcgcattgctggcgcatgccaagatgttaggtctaacagtctctctgatccaggacgcgggccggactcagattgctccgggcagccagacagtgctgggaatcggcccagggccagcagacctcattgacaaggtgaccgggcatttaaaactatactag

SEQ ID NO: 198925 - DNA, 540 bp, synthetic construct
  misc_feature 1..540: note = Description of Artificial Sequence: Synthetic coding sequence
  source 1..540: mol_type = other DNA
atgcccagcaagagcctggtgatggagtacctggcccaccccagcactctcggcctcgccgtgggcgtcgcatgtggcatgtgtctcgggtggagcctgagggtctgcttcggaatgctgccaaaatctaagacatcgaagacacacaccgacacagaatcagaggcatcaatcctgggcgacagtggcgaatacaaaatgatactggtggtacggaatgacttaaagatgggcaagggcaaagtggctgcccaatgctcgcacgctgcagtctccgcatataaacaaatccaaagacggaacccagaaatgctgaaacagtgggaatactgcggacaacctaaggtcgtggtcaaggcgcccgatgaggagactctgattgccctgttggcacacgccaaaatgttaggactgacggtatccctaatccaggatgcgggaaggactcagatagcccctggcagccagacagtgctgggcatcggaccggggcccgccgatctaatagacaaggttacaggccatcttaaactatactag

SEQ ID NO: 198926 - DNA, 1668 bp, synthetic construct
  misc_feature 1..1668: note = Description of Artificial Sequence: Synthetic coding sequence
  source 1..1668: mol_type = other DNA
atggccgcccggctgctgctgctgggcatcctgctgctgctgctgccgttacccgtgcctgctccatgccatacagccgcgaggtcggagtgtaagaggtcccacaaatttgtgcccggcgcatggctggccggggagggcgtggatgtgaccagcctccgccgttccggatcattccccgtggacacgcagcgcttcttacgacctgatggcacttgtactttgtgcgaaaatgcgcttcaggaagggacactacaaaggctgccgctggcattgaccaattggcgcgctcagggttccgggtgtcaacgccacgtgacgcgtgccaaggtcagctccacagaggctgttgcccgagatgcggcccggtctatccgcaatgattggaaggtcggcttagatgttacgcccaaacccacgagtaacgtgcacgtaagcgttgcggggtcccactcacaggccgccaactttgcggcacaaaagacacaccaggaccagtatagctttagcacagatacagtggagtgtagattttacagcttccacgttgtgcacacacctcctctgcaccccgatttcaaacgggccctcggcgatctccctcatcacttcaacgccagcactcagccagcatacctcagattgatttccaattacggaacccacttcatccgggcagtggagctgggcggccggatttccgccctcacagccctgcgtacctgcgagctggcattagaaggactgacagataatgaagtggaagattgccttactgtggaagcccaagtcaacataggtatccatgggagcatttcggctgaagcaaaggcttgcgaagagaagaaaaaaaagcacaagatgactgcaagtttccatcagacgtacagggaaaggcatagtgaggtggtaggtggacatcatacgtctatcaacgaccttctgtttggcattcaagcaggacctgaacagtacagcgcatgggtcaactctctgccaggcagcccaggcctggttgattataccctggagccgttgcatgtcctgctggactcccaagacccgcgcagggaggcactccggcgcgctctgtcacaatacttaacggaccgggcgcgctggcgggattgctcccgaccctgccccccaggtcgtcagaagagcccacgcgacccctgtcagtgtgtttgtcacggaagcgccgtcactacacaagactgctgccccaggcagaggggcctcgcccaattagaagtgacgttcatccaggcgtggggcctgtggggggattggtttacagcaactgacgcctatgtgaaattattctttgggggccaggagctaagaacaagcacagtgtgggataacaataatccaatttggagtgtgaggctcgatttcggggatgtgctgctagctaccggcggcccgttgaggctgcaagtgtgggaccaagactccgggagggatgatgacctgctgggaacctgcgaccaagcacctaagtcagggagccacgaagtccggtgtaatctcaatcatggccacctcaagttccggtatcacgcacgttgcttaccccacttgggcgggggaacctgcctcgattacgtgccacaaatgttactgggggagcccccgggcaatcggtccggggctgtgtggtag

SEQ ID NO: 198927 - DNA, 1668 bp, synthetic construct
  misc_feature 1..1668: note = Description of Artificial Sequence: Synthetic coding sequence
  source 1..1668: mol_type = other DNA
atggccgcccggctgctgctgctgggcatcctgctgctgctgctgccactccccgtccccgcaccatgccatactgccgccaggtctgagtgcaagcgctcacacaagttcgtccctggcgcatggctagcaggcgagggtgtggatgtcacttcactacggcgatctggctcattcccagtggatacacagcgctttttaagacccgacgggacatgcaccctgtgcgagaacgctctccaagagggcacactacaacgcctgcctctcgctttaaccaattggcgagcccaaggttctggatgccagcggcatgtgacaagggcgaaggtgtcatccacagaagccgtggcgagggacgccgcccgaagcatccgtaatgattggaaagtggggctcgatgttacaccaaagcccacgagtaacgttcacgtgagtgtcgctggttctcatagccaggccgccaattttgccgcccaaaagactcaccaggaccagtacagtttctcaactgataccgtggagtgtcgattctattccttccacgtcgttcacacacctcctctgcacccagactttaagagagctcttggcgatctcccccaccatttcaacgcctcgactcaaccagcttacctacgtctgatatcaaattatggcacgcacttcataagggccgtcgagctcggaggacgcatttccgctctcactgctctgaggacatgtgaactcgccctggagggcctgacggataacgaggtggaagattgtctgacagttgaggcacaggtcaatataggcattcacggcagtatctcagcagaagccaaggcctgcgaagaaaaaaagaaaaaacataaaatgacagctagtttccatcagacctatcgtgagcgtcactcagaagtggtcgggggacaccacacgtcaattaatgacctattgtttgggatacaggccggaccggagcagtattcagcttgggtgaatagcctgccagggtccccgggattggtagattacacactcgagcctctgcatgtattacttgacagccaggatccacgcagagaagcactccgccgtgctttaagccagtatcttacggatagagcccgctggcgggactgcagtcgaccttgcccgcctgggcgccagaaatctcctcgggacccttgtcagtgcgtgtgccacggatccgcagtgacaacacaggattgttgcccaagacagagaggccttgcccagttagaagttacattcatccaggcctggggactctggggcgactggtttacagccacagatgcttatgtaaaactgtttttcggagggcaggaacttcggacaagtacggtgtgggacaacaacaacccaatatggtccgtgcgcttggacttcggcgacgtgctgctggctactggaggtccattaagattgcaagtgtgggaccaagatagtggacgggatgatgacttattgggcacctgcgatcaggcgccgaaatccggcagccatgaagttcgctgcaatctgaatcatggacatttaaaatttagatatcacgcgagatgccttccacatctcgggggtggcacatgccttgattatgtaccccagatgcttctgggggaacccccaggtaatcgctccggtgcagtgtggtag

SEQ ID NO: 198928 - DNA, 1668 bp, synthetic construct
  misc_feature 1..1668: note = Description of Artificial Sequence: Synthetic coding sequence
  source 1..1668: mol_type = other DNA
atggccgcccggctgctgctgctgggcatcctgctgctgctgctgccgctccccgtcccggcaccgtgccacacggcagcccgctctgaatgtaaacgctctcacaagtttgtccctggcgcatggttggcaggagagggtgtggacgtcacttcactccgtagatcgggctcatttccggtggacacacagcgatttcttcggccagatggcacctgcactctgtgcgagaacgcactacaagagggaaccctccagcggctcccactggcactaactaattggcgcgcacagggcagcggctgtcagcgacacgtcacaagagcaaaggtcagctctactgaggcagtggcgcgggacgcggccaggtccattagaaatgattggaaggtgggactagacgtcacacctaaaccaacctctaatgtgcacgtatcagtggctggaagccacagccaggctgccaattttgctgcccagaagactcatcaggaccagtacagcttttccaccgacacagtggagtgccgattctacagtttccacgttgttcatacccccccgctgcacccagatttcaaaagggcactgggtgacctccctcaccactttaacgcctctacacagccagcctacctgcggctgatcagtaactacgggacacatttcatcagggccgtggagctgggtggacggatctccgcccttaccgccttgcggacatgcgagcttgctctggagggattgactgacaacgaagtggaagattgcctcaccgtggaagcccaggtcaatatcggcatccatggcagcatcagtgcagaagccaaggcctgcgaggagaagaaaaaaaagcacaagatgacagcctcctttcatcagacctaccgcgagcggcattctgaagtcgtaggcggccatcacacgtccatcaatgacctcttattcggaatccaggccggtcccgagcagtattcagcatgggtcaacagtcttccaggcagcccgggtcttgtggactacactctggaacctcttcacgtcctgctggatagtcaggatcccaggcgggaggccctccgaagagcactgtcacagtatctgaccgatcgcgcccgctggcgggattgtagccgcccgtgcccccctggacggcagaagtccccaagggacccgtgccaatgcgtctgtcatgggagcgcggtgacaacccaagattgctgtcccaggcaaaggggactggcgcaacttgaagtgacatttatacaggcatggggtctttggggcgactggtttacagctaccgacgcctacgttaaactgttttttgggggccaggagctgagaacttccaccgtctgggataataacaatccgatatggtccgtgaggctcgatttcggcgacgttcttctcgcaacaggggggcccttacggctccaggtatgggatcaggattccggccgcgacgatgatcttctcggtacgtgcgaccaggcaccaaaatccggatctcacgaggttagatgcaatttgaaccacggccacctgaaattccgatatcatgctagatgccttccccacctgggtgggggcacgtgcctcgactatgtaccccagatgttactgggggaaccccctggaaacaggtcaggagcggtttggtag

SEQ ID NO: 198929 - DNA, 444 bp, synthetic construct
  misc_feature 1..444: note = Description of Artificial Sequence: Synthetic coding sequence
  source 1..444: mol_type = other DNA
atggaggcccggagccggagcgccgaggagctgcggcgggccgagttagtcgaaatcatagtggaaactgaagcccagacgggtgtgtccggaatcaatgttgccggcggcggcaaagaaggtattttcgtgcgcgaactgcgggaggattctccagccgctcgctctctaagcttgcaggaaggggaccagctcctttcagccagagtattttttgaaaatttcaagtacgaagacgcccttcgcctccttcagtgtgctgagccatacaaagtgagcttctgtctgaagcggactgtgcctactggggacctggcccttcgtccagggacagtctccggctacgagattaaagggccacgcgccaaggttgccaagctggtgcgagtcctgtcgccggctcctgcattggattgtccgagcgatcccgtctccgccccttag

SEQ ID NO: 198930 - DNA, 4386 bp, synthetic construct
  misc_feature 1..4386: note = Description of Artificial Sequence: Synthetic coding sequence
  source 1..4386: mol_type = other DNA
atggaggcccggagccggagcgccgaggagctgcggcgggccgagctggtcgagataatagtggagacggaggcccaaacgggcgtgagcggtataaatgtagcgggcggcggaaaagagggaattttcgtgagagagctccgagaagatagccccgccgcgagaagcttgtcgctacaggaaggcgaccagttgctcagcgcgagggtgttttttgaaaattttaaatacgaagatgctctgcgcctgctgcagtgtgccgagccttacaaagtgtccttctgtctgaaacggaccgtcccgactggcgacttggctctcaggccgggcacagtgtccgggtatgagataaaaggccccagggctaaggtggctaagctcaacatccaatctctctctcctgtcaaaaaaaagaaaatggtgcccggggcccttggtgtgcctgctgacctggcaccagtggacgtagagttctcttttcccaagttttcacgtctaagacgggggttgaaggctgaggccgttaaaggtccagtgcctgctgcacctgccagaagaaggctgcagctgcccagacttagagtccgggaggtcgctgaagaggcccaggctgcccgtctggccgctgccgctccaccaccccggaaagccaaggttgaggccgaagtagcagcgggagctcgatttacggcccctcaggttgaactggttggtcccagacttccaggggcagaggtaggcgtgccgcaggtgtcggcccctaaggcagccccctcggccgaagccgctggagggtttgccctgcacttgccaaccttgggacttggcgctcctgctcctccagcggtggaagcccctgcagtcgggattcaagtgccccaggtggaactgccggctctgccatcgttgcctactctgcccacactgccctgtctggaaactagggagggggctgttagcgttgttgtgcccaccctcgacgtggctgcaccaaccgtgggagtggatctcgccttgcctggcgcagaggtagaagcccgaggtgaagccccagaggtggctctgaagatgccaaggctctcatttcctcgattcggagctcgcgccaaagaagtggcagaggccaaagtagctaaggtgtctccagaagctagggtgaaggggccaaggctgaggatgcccaccttcgggctctctctcttggaaccccggcccgctgcccctgaagtggtggagagtaaattaaaattgcccaccatcaagatgccctctctgggtataggcgtgagtggccccgaggtgaaggtccccaagggtccggaggtgaagttgcccaaggcacctgaggtgaaactgccaaaggtgccggaggctgcgctaccagaagtgagactgccagaggtcgaactaccaaaggtgagcgagatgaagcttccaaaggtgcctgaaatggcagtgccagaggtccgcctcccagaggtggagcttcccaaagtgtctgagatgaagcttccaaaagtgccagagatggctgtccccgaagtgagacttccggaggtacagttgcttaaagtttcagaaatgaagctgccgaaggttccagaaatggccgtgccggaagtcaggctgcctgaggtgcaactcccaaaagtatctgagatgaaactgcctgaagtcagcgaggtagccgtcccggaagtccgtctgcctgaggtgcagctccctaaagtccccgagatgaaagtacctgaaatgaagctcccgaaagtgcccgaaatgaagcttcctgagatgaaattgcctgaggtgcaattgccgaaagtgcctgagatggccgtgccagacgtccacctccccgaagtgcagttgcccaaagtacccgaaatgaagctgccagagatgaagctaccggaggtcaagcttccaaaagtaccggaaatggcagtgccagatgtgcatctgcccgaggtccagctcccaaaggtgcccgagatgaagctccccaagatgccggaaatggccgtaccagaagttcgcctgcccgaagtccagctccctaaggtctccgaaatgaaactccccaaagtgcccgagatggcagtcccagatgtccacttacccgaagtgcagctgccaaaggtgtgtgagatgaaggtgccagacatgaaactacccgaaattaagttgccaaaagtgcctgagatggcagtccctgatgtgcatttgcccgaggtccagttacccaaggtttctgagatcagactccccgagatgcaggttccaaaggtacctgacgtccatctgccaaaagccccagaggttaagctgccgcgggccccagaagtacaacttaaggccaccaaagcagaacaggccgaggggatggaattcggctttaagatgcctaagatgactatgccaaagcttggccgagcagagagtccatcccgtggcaaacctggtgaggctggggcagaggtatccggcaagctggtgacactgccttgtctacaaccagaggtagacggcgaagcacatgtaggcgttccctcgctgacacttccatctgtggaactggatctaccaggcgctctgggtcttcagggccaagtgcctgccgccaagatgggaaagggtgagagagttgaaggtcctgaagttgctgctggcgtaagggaagtgggcttcagggtgccaagtgttgagatcgtgacccctcagcttcccgccgtggaaatagaggaaggcagactagaaatgatcgaaactaaagtgaaacctagctctaagttcagcctaccaaagttcggcttaagtggcccgaaggtcgctaaggctgaggctgagggggccggccgggccaccaagttaaaagtgtcaaagtttgccatctcgctgcccaaagctcgggtgggggcggaggcagaagcaaagggcgccggcgaggcaggactgctgccagccctcgacttgtccattcctcaactgtctcttgacgcccatttgccttcaggaaaggtggaggtagccggagcagatctgaagttcaaaggtcctaggtttgcattacctaagtttggtgtgcgcggcagagatactgaggccgctgaactcgtcccaggagtggccgaactggaaggcaaagggtggggctgggacggaagggtcaaaatgcccaagcttaagatgcccagcttcggccttgcgagaggaaaagaagccgaggtgcagggagaccgagcatctcccggtgagaaagccgaaagtaccgccgtgcagctgaaaattcccgaggtggaactggtcactctcggcgcacaggaagagggtcgtgccgagggcgcggtagccgtgtccggaatgcaactgagcgggctgaaagtgagcacagcaggccaggtcgtaactgaggggcatgatgctggcttgaggatgccgccactaggcatttccctgcctcaggtggagctgacagggttcggcgaagccggcacacctggccaacaggcccaatcgacggttccttctgccgaaggaacggccggatatagggtgcaagtccctcaggtcaccttgagcttgcccggcgcgcaggttgcgggaggagagttactggtcggcgaaggagtctttaaaatgccgacagtaactgtgccccagctggaactggatgttggcctaagccgagaagcacaagcaggcgaagctgcgactggggaaggaggactcagattgaagctcccaactctcggggcacgggcacgcgtgggcggagaaggggctgaggagcagccccctggagccgaacgtacattttgtctgagtctgcccgatgtagaattatctccgtcaggggggaaccatgctgaatatcaggtggctgagggtgagggtgaggccgggcacaaacttaaggttagactcccccggttcggcttagttcgcgcgaaggagggtgcagaagagggagaaaaggctaagtcccctaaacttcgattaccgagagtgggcttttctcagtccgaaatggtgaccggcgagggatcaccatctcctgaagaagaggaggaggaggaagaagaagggtctggggaaggggcctccggacgaagggggcgggtgcgtgtccgtctgccacgggttggtttggcggcaccctccaaagcctctcgagggcaggaaggagacgccgcaccaaagagccctgtgcgagaaaaatctcctaagttccgcttccccagagtgtccctgagccccaaggctcggtcagggtcaggggatcaggaggaaggtggcttgagagttcggctgccctcagtaggcttctctgaaacaggggcccctgggcccgctcggatggagggcgcccaggccgccgcagtgtag

SEQ ID NO: 198931 - DNA, 4191 bp, synthetic construct
  misc_feature 1..4191: note = Description of Artificial Sequence: Synthetic coding sequence
  source 1..4191: mol_type = other DNA
atggaggcccggagccggagcgccgaggagctgcggcgggccgagctggtcgagataatcgtggagaccgaagcccagactggcgtcagtggcatcaacgtggcaggcggaggcaaggagggcatttttgtgagagagttgcgggaggattcccctgcagccaggagcctgagtcttcaggaaggggatcagctgttatccgctagagtttttttcgagaatttcaagtatgaggatgctctccggttgctgcagtgcgcagagccctacaaggtcagtttttgtctgaagagaaccgtccctaccggtgatttagctctgaggcctggaaccgtgagcggatacgaaatcaaagggcctagggctaaggttgcaaagttgaatatccaaagcctcagccccgtaaaaaaaaagaaaatggtcccaggcgcattaggcgtgcctgcagatctcgcccctgtcgacgtggagttcagtttccccaagtttagccggttgcgcagggggctcaaagctgaggccgtgaagggccccgtgcctgctgccccggcgcggcgcaggctccaacttccccggctgcgagtgcgggaagtggccgaagaagctcaggccgctaggcttgccgcagctgctcctcccccacggaaagctaaggtcgaggcagaggtggctgctggcgctaggttcactgcccctcaagtagagttggtgggcccgcgcttgcctggagcagaggtgggcgtccctcaagttagtgcccctaaggctgccccttccgctgaggcagcaggaggctttgcattacacctgcctactctcggacttggcgccccagcaccacccgcagtagaggcccctgcagtcggtattcaggttccccaggtggagctaccagccctaccatctctgcccacgctgccgacactgccctgtttggaaacccgagagggggctgtttctgtagtggtgcctaccctggacgtggcggcacctaccgtgggtgttgacctggctctgcccggggccgaggttgaagccaggggtgaagcgcctgaagtggctttgaagatgccccgattaagcttcccccgattcggcgcacgcgctaaagaggtggccgaggcaaaggtagccaaggtgagtcccgaggccagggtcaaaggcccaagacttagaatgccgactttcgggctgagcctcctagaacccagacccgccgctcccgaagttgttgagagtaaacttaagctacccactataaaaatgccttccctggggatcggagtgtcaggtcccgaagtgaaagttcctaaggggccagaagtgaaactgccaaaagcccctgaagttaagctgcctaaggtccccgaagctgcgctgcctgaagtgaggctgccagaagtcgaactgccaaaagtctctgagatgaaactcccgaaggtgccagaaatggcggtgccggaggttcgactgcccgaagtagagctaccaaaagtgtccgaaatgaaactgcctaaagtcccagaaatggcagttccagaggttaggttacccgaggtgcaactcctcaaggtctccgaaatgaagttgcccaaggttcccgagatggccgtgcctgaggtgcgactgccagaggtgcaattgcccaaggtctctgaaatgaaacttccagaggtgtccgaggtggccgtgccagaagttcggctgccagaggtccagctgcctaaggttcctgagatgaaagtgccagagatgaagctccctaaggtgcccgagatgaaactaccagagatgaagttaccagaggtgcagctacccaaagtgcccgaaatggctgtgccagacgtgcacctccctgaggtgcagcttccaaaagttcccgagatgaagctgcccgagatgaaattacctgaagtcaaactgcctaaagtgccagagatggcagtgcccgatgtacacctgcctgaagtgcagcttcccaaagtccccgaaatgaaactaccaaaaatgccagagatggctgtcccagaggttcgtctgccggaagtccagcttcctaaagtcagtgagatgaaattgcctaaggtgcccgaaatggcagtgccagacgttcacctgcctgaggtgcagttacccaaggtatgtgagatgaaggtgccggacatgaaactgccagagattaaactgcccaaagtcccagagatggcagtccctgacgtccatctgccagaggtgcagctgcccaaggtttcggagatcaggctaccagagatgcaggtaccaaaggtgccggatgtgcatttgcctaaggcacctgaagtgaaactccctagagctccagaggtgcagctcaaagcgacaaaggcagagcaggcggagggcatggagttcgggttcaagatgccaaagatgaccatgccaaaactcggtagagccgagtctccctctcgggggaagcccggggaagccggcgctgaagtctctggcaagctggtcacactgccgtgcctacaacctgaagttgatggtgaagctcacgtcggcgtaccatcactgaccttaccaagtgtagagcttgatctgcccggcgccctgggactccagggacaagtgcccgctgccaagatgggcaagggagagagagtggagggccccgaggtggccgctggagtacgcgaagtgggttttcgggttccgtcagttgagatcgtaacaccgcagctgccggccgtggagatcgaagagggaaggctggaaatgatcgagaccaaagttaaaccgtcctctaagttcagccttcccaaattcggtctatcgggtccaaaggttgcgaaggcagaagccgagggcgctggaagagccaccaaactgaaagtctccaaattcgccatcagcctgccgaaggcccgggtgggagctgaggctgaagctaaaggagctggcgaggccggccttctccctgctctggacctgtccataccccaactttctctggacgcgcacctgccgtccggaaaggtggaggtggccggcgccgaccttaagttcaaggggccaaggttcgctttgcctaaatttggagtgcgcggccgggatactgaagccgccgaactggttcccggggtcgctgagctggagggcaaaggctggggctgggatgggagagtcaaaatgcctaaacttaaggtgtcaaccgctggtcaggtcgtgactgaagggcatgacgcagggcttcggatgccaccactgggtatttctctgcctcaggtggaactcacgggatttggtgaggcgggcaccccaggccaacaggcccagagcacggtgccctcagcggaggggaccgctgggtaccgggtacaagttccgcaggtaaccctcagcttacccggagcccaggtggcgggcggcgaattgctggttggagaaggagtgttcaaaatgcctacagtgaccgtcccacagctggaacttgacgttggactgagcagagaagctcaggccggagaggccgccaccggggaaggggggctgcggctcaagctgccaacgctgggtgcacgtgccagggtggggggcgagggggccgaagagcagccgccgggtgctgaacggactttctgtctgtccctcccggatgtcgaactgtctccttccgggggcaatcatgcagagtaccaggtggccgaaggcgagggcgaggctggccataaattaaaggttcgtttgcccaggttcggactggtacgcgcaaaagaaggggctgaagaaggagagaaggccaaaagtccaaaattacggctgccaagggtgggattctcccagtcagagatggtgaccggtgaaggaagccctagcccagaggaggaagaagaagaagaagaggaaggcagtggagagggcgctagtggccggagaggccgcgtacgggtgcggctgcctcgtgtgggcctggcagccccatccaaggcaagccgcgggcaggagggtgatgccgctccaaagtccccagtcagggagaaatctcctaagttcagatttccgagagtttcactaagtccaaaagcacgttctggctctggcgatcaggaagagggggggctccgggtgaggctgcccagcgtgggctttagtgagacaggtgctcctgggccagcaagaatggagggggctcaggcagcggccgtgtag

SEQ ID NO: 198932 - DNA, 2214 bp, synthetic construct
  misc_feature 1..2214: note = Description of Artificial Sequence: Synthetic coding sequence
  source 1..2214: mol_type = other DNA
atggaggtggagcaggagcagcggcggcggaaggtggaggccggcagaactaaactggcccactttaggcagaggaaaaccaagggggacagcagccactcggagaagaagaccgccaaaagaaaggggtctgcagtggacgctagcgtgcaggaggagtcacccgttactaaagaggacagcgcactgtgtggggggggggacatttgtaagagcacttcatgcgacgacacccccgatggggcgggcggggcctttgccgctcagcctgaggattgcgatggagagaagcgggaggacttggagcagctacagcagaaacaagtgaacgatcaccccccagagcagtgcgggatgtttaccgtgagtgatcacccaccggagcagcacggcatgttcaccgtcggggaccacccacccgagcagaggggcatgtttactgtctctgatcacccccccgaacagcgagggatgtttaccatttctgatcatcaaccggaacaacggggcatgtttacggtctccgatcatacgcccgagcagcgcggaattttcacaatcagcgaccatcctgccgaacaaagggggatgttcacgaaggaatgcgaacaagaatgtgaacttgctattactgacttagagagtgggagagaagatgaggcgggtctacatcagagccaagccgtgcatggcctcgagcttgaggccctgagattgagtctctccaacatgcacactgcacagctggagctgacacaggcaaacctccagaaagagaaggagactgctttaacggaacttcgcgagatgcttaactcaagacgcgctcaagaattggcactgctccagagccggcagcagcatgaacttgaactgctgcgcgagcagcacgctcgcgaaaaagaggaagtcgtgctgcgctgcggacaggaagccgctgagctgaaggagaagctgcagtctgagatggagaagaacgctcagattgttaagacactaaaggaagactgggaaagtgaaaaagacctttgccttgagaacctcagaaaggaactgagcgccaaacaccagagtgagatggaagatctccaaaaccagtttcagaaggagctcgccgagcagcgcgcagaactggagaagatctttcaagacaagaaccaggctgagcgcgccttaaggaatctggagagccaccatcaggccgccatcgaaaagttaagggaggacttgcaatccgagcatggcaggtgtcttgaagacttggaattcaagttcaaggagtcagagaaagagaagcagcttgaactggagaatttgcaggcctcctacgaggatctgaaggcacagtctcaggaggagatcagaagactgtggtcacagctcgattccgcgaggacctctaggcaggagctatccgaactgcatgagcagctgttggctcgcacctccagagtcgaggatcttgagcagcttaaacagcgtgaaaagacacaacacgagagcgaacttgagcagctaagaatatatttcgaaaaaaagctccgggatgccgagaagacatatcaggaagacctgaccctgctgcaacagcgcttgcagggcgccagggaggatgctctgctggatagcgtcgaggtgggcctgtcatgtgttggactcgaggaaaagccagagaagggccgtaaagaccatgtcgatgaactggagcccgaaaggcataaggagagcctgcctagatttcaagccgaactggaggagagccataggcaccagctcgaagctttggaaagtccgctgtgtatccagcacgagggccacgtatccgaccggtgctgcgttgagaccagtgccctcggccatgaatggcgccttgaacctagtgagggccatagtcaggagctgccttgggtgcacctgcagggcgtgcaggacggtgacctggaggccgatacggagcgcgcggcacgagtactgggtctggaaacggagcacaaggtgcagctcagccttctgcaaacagagctgaaagaggaaattgagctcctcaagatcgagaaccggaatctgtacggtaagctgcagcatgaaacaaggcttaaggacgatttggagaaggtcaagcataaccttatcgaagatcaccagaaagaacttaacaatgccaagcagaaaactgagctcatgaagcaagagttccagcgcaaagagacctag

SEQ ID NO: 198933 - DNA, 10011 bp, synthetic construct
  misc_feature 1..10011: note = Description of Artificial Sequence: Synthetic coding sequence
  source 1..10011: mol_type = other DNA
atggaggtggagcaggagcagcggcggcggaaggtggaggccggcagaacgaaattggcccatttccgacagcgtaaaacgaaaggggacagttctcattcagaaaaaaaaaccgctaagaggaagggcagcgccgtcgacgcatcggtgcaggaggagtcccccgtgacgaaggaggatagtgcactgtgtggaggaggtgacatatgcaaatctacaagctgcgacgacactccagacggagctggaggggctttcgcagcacagcccgaagactgtgatggtgagaaacgggaagatctggaacaactgcagcagaagcaggttaacgaccatccacctgagcagtgcggcatgtttacagtgagcgaccacccccctgaacagcacggcatgttcacagtgggagatcacccccccgagcagagaggtatgttcacagtctccgatcacccacctgagcagcacgggatgttcaccgtgagcgaccaccccccagagcaaagagggatgttcacaatctctgatcatcagccggagcagcgtggaatgttcacagtgagtgatcatacacctgagcagaggggcatcttcaccatttccgaccaccccgctgaacagcgcggtatgttcactaaagagtgcgaacaggagtgtgagctagccattaccgacctggaatcaggtcgcgaggatgaagccggactgcatcaaagccaagcagtccacggtctcgagcttgaagctttaaggctttcattgtctaacatgcataccgcgcaactggagctgacacaggcgaaccttcagaaggaaaaggagaccgcgctgactgagctccgagaaatgcttaacagtcgacgcgcacaggagctcgccctgctgcaaagccgccagcagcacgagctggagcttcttcgcgagcagcacgcacgcgagaaagaagaagtggtgctgagatgtggccaagaggctgccgagctgaaggaaaaactccagtccgagatggaaaaaaacgcacagatcgtcaaaacactaaaggaggattgggagtctgagaaggacttgtgtctggagaacctgcggaaagagctgtccgcaaagcatcagagtgaaatggaggatttgcagaatcagtttcagaaagagcttgctgagcagagagcagaactcgaaaaaatttttcaggacaaaaaccaggccgaacgagctctccgcaatcttgaatcgcaccaccaagccgccattgagaagcttcgggaagacctacaaagtgaacatggaaggtgcctcgaggacttggagtttaagtttaaggagagcgagaaagagaagcaactcgagctggaaaatctgcaggcctcgtatgaggatttaaaagctcaatctcaggaggaaattagacgtctttggagccagttggatagtgccaggactagccggcaggaattaagtgaactgcacgagcagctcctggccagaacctcgagggtggaggatctagaacagctaaaacagcgcgagaagacacagcatgaatcagagctcgaacaactccggatctacttcgagaaaaagctacgggacgccgaaaaaacctatcaagaggacctgaccctcctgcagcagaggctgcagggagcgcgcgaagacgcactgctagactcagtggaggtcggactctcatgtgtgggactcgaagagaagccggaaaaggggcggaaggatcatgtggacgagctggagccggagagacataaggagagcctccctcgcttccaggccgaactggaggaaagccacagacaccagctggaagcgctggagagccctctctgcattcaacacgagggccacgttagcgatcgatgttgcgtagaaactagtgcgctaggacatgaatggcggcttgagccatcagagggccattcacaagaacttccttgggtacaccttcagggggtacaggacggagatttggaggccgacacagagagagccgccagagtgctcggcctggaaactgagcataaggtgcagctgagcctcctccaaaccgagctgaaggaggaaattgaactgctgaaaatcgagaacagaaacctatacggaaaactgcaacacgagacccgactgaaagatgatctcgagaaggtgaaacataacctgatcgaggatcatcagaaagagctgaacaatgccaaacagaaaacagagctgatgaagcaagaattccagcgaaaagaaaccgattggaaagttatgaaggaggaactccagcgggaggctgaagagaaactgactctgatgctcctcgaactcagagagaaagcagagtcagaaaagcagactatcataaacaagttcgaactgcgtgaggccgagatgaggcagttgcaggaccaacaggctgcacaaatattggatctggagcgctccctgaccgagcaacagggccgtcttcaacagcttgagcaggatctgaccagcgatgacgctctgcattgtagtcagtgcggtagggagcctccaactgcccaagacggagagttagccgcacttcacgtaaaggaggactgtgctttacagctgatgttagcccgctctagattcctcgaagagagaaaagagataactgaaaagttctcggccgaacaggacgcatttctgcaagaggcccaggagcagcatgcgcgcgagctccagcttctccaggaacggcaccaacagcagctgctgtccgtgaccgcagagctggaggcccggcaccaggccgccctcggggagcttactgcctccctggagtcgaagcagggcgccttgctggctgcgagagtggctgaacttcaaaccaagcacgctgccgatttgggcgctctggagactcgccacttgagcagccttgattccctggagagttgctacctaagcgagttccagaccattagggaagagcaccggcaggcactggaactgcttagagcagactttgaggaacagctgtggaaaaaggattctctgcaccagaccatacttacacaggaactggagaagctgaaacgcaagcacgaaggggaattacagtccgtacgggatcacctgcgtactgaagtgtcaaccgagctggcaggaaccgtggcccatgaactgcaaggggtgcaccagggcgaatttgggagtgaaaagaagaccgctctccacgagaaggaggagactctgagattgcagtctgctcaggcccagcccttccatcaagaagagaaggagagcctgagcctccaactgcaaaaaaagaaccatcaggttcagcagctgaaggaccaagttctgtcactgtcacatgagattgaagaatgcaggtccgaactggaggtgttacagcagaggcgcgaacgagaaaatagggagggggccaaccttttgagtatgctcaaagcagatgtgaatctgagccactcagagagaggcgcactgcaggacgcactgagacggctgcttgggttgtttggagagaccctgagggctgccgtcactctgcgatctcgcatcggcgaacgggtagggctgtgtctggacgacgccggcgccggtttggcactcagtacggctcctgcactcgaagagacttggtctgacgtagcactgccagagctcgacaggactctttcagaatgcgcggagatgtcaagcgtggcagagatttcttctcacatgcgagaatctttcctgatgagtcctgagtccgttcgcgaatgtgaacagcccattcggcgagttttccagagcttatcccttgccgtggatggactgatggagatggcgctcgactccagccggcagcttgaggaggcccgacagatacatagtagatttgagaaagagttctccttcaaaaatgaggaaacagcccaggttgtccgcaagcatcaggagctcctggagtgcttgaaggaagagtcggccgcaaaggctgagctcgccttggaactgcacaagactcaggggacactagaggggtttaaggtggagacagccgaccttaaagaggtcctggccgggaaagaagatagcgagcacagattggtgctggagctagagtcactgaggagacagttacagcaggccgcccaggagcaggcagccctgagggaggagtgtactagactgtggagccgcggtgaagcaacagcgactgacgccgaagctcgagaggccgcgctcaggaaagaggtcgaagatctaacaaaagagcagagcgaaacccgcaagcaggcagagaaagataggagcgctttactctcccagatgaagattcttgaaagtgagctcgaggagcagctgagccagcatcgtggatgcgcgaagcaagctgaggcagtaaccgccttggaacagcaggtcgcatccctcgataagcaccttaggaaccagcgccagttcatggatgagcaggctgctgaaagggaacacgaaagggaggagtttcaacaggagatccagcgcctggagggtcaattgcggcaggcggcaaagccccagccctggggacccagggacagtcaacaggcgcctctagatggcgaggtcgagctcctgcagcagaaactgagggaaaaacttgacgagttcaacgaactggcaatccaaaaggagagcgccgatcgccaagtcctgatgcaggaggaggaaattaaaagactggaagagatgaatatcaacatcaggaaaaaggtggcacagttacaagaagaagtcgagaagcaaaaaaatatagttaagggcctcgaacaggacaaagaagtgttgaagaaacagcagatgtctagtttgcttttagccagcacgctccagagcactctggatgctggtcgatgtcccgagcctccatccgggtccccaccggagggtccagaaattcagctcgaagtgacgcagcgcgccctgttgcgtagggagtcagaggtcctcgacttgaaggaacagctggaaaagatgaagggcgatctcgagtccaagaatgaagaaattcttcacctgaacctcaaactggacatgcagaattcacagactgccgtaagtctccgggagctcgaggaggagaatacctcactgaaagtgatttacacacggtcttcggagatagaggagctgaaagccactatcgagaatttacaagaaaaccagaagcgcctgcagaaagaaaaagcagaggagattgagcagttacatgaggtgattgaaaagctacaacacgaactctctcttatggggcccgtggtacacgaagtgtctgacagtcaggcagggtctctccagtctgaattactgtgttcacaggctgggggccctcgcggacaggccttgcagggcgagctggaggctgcgcttgaagcaaaagaggccctttctagactgcttgccgaccaggagaggaggcactcacaggccctggaagccctgcagcagagactccagggcgctgaggaggcggcagaattacagctggctgaacttgagcgcaatgtcgctctgcgtgaggcagaagtcgaagatatggcatcacgaatccaggagttcgaggcagctctgaaggccaaggaagccaccattgccgaaaggaacctggaaattgatgccttgaatcaacgcaaggccgcgcactctgccgagctcgaggccgtgctgctcgcgctggcgagaatcagacgcgcccttgaacaacagcccctggccgccggagctgcgcctccagagctgcagtggctccgggctcaatgcgcacgcctaagtagacagctacaggtgcttcaccagagattcctgaggtgtcaggttgagctagaccgacgtcaagcccgtcgcgcaaccgcacacaccagagtaccaggagcacatcctcagcctcgcatggacggaggcgccaaggcacaggttaccggagacgtcgaggccagccacgacgcggcattggaaccagtcgtacccgacccccaaggagacctgcagcctgtgctggttaccctcaaagacgcgccgctatgtaagcaggagggtgttatgtccgtgctgaccgtgtgtcagcggcagttgcagtctgaactcttgttagtgaagaacgagatgagactttccctagaggacggcggcaagggcaaggagaaggtgcttgaggactgtcagttacccaaggtggatctagtcgcacaagttaagcaactgcaagagaagttaaaccggctactttatagcatgacctttcagaatgttgatgccgcggacaccaagagcctgtggccgatggccagcgcgcatttgctcgagagctcttggtcggatgacagttgcgatggtgaagaaccagatatatcgccccacatcgatacctgtgatgccaacacggccacagggggcgtgaccgatgtgataaagaatcaagccatcgacgcgtgcgacgcgaatacaactcccggaggagtgactgacgtaattaagaattgggattctctcatacccgacgagatgccggattccccgatccaagagaaaagcgaatgtcaggatatgagcctctccagtccaacttccgtcctcgggggctcacgccaccagtctcatacagcagaagccgggcctcgcaaatcccccgtgggcatgcttgatctctctagttggagcagcccagaagtcctcaggaaagattggacactggagccatggcctagcttgccagtgacaccgcatagcggggctctttctctctgttcagctgacacaagtctgggtgaccgggccgacacaagtttgccacagacacagggacccgggcttctctgttctccaggggtcagtgctgcagctctagccttgcagtgggcagaatctcctcccgccgacgatcaccacgtgcagagaaccgccgtggaaaaagacgtggaagatttcatcacaaccagctttgatagccaggagaccctttccagcccaccaccgggtctcgaggggaaggcagataggtcagaaaagtccgacggctcgggatttggggcacgcctttctccgggcagcggtgggcccgaagcacagacggccggccctgtgacccctgcttccatttctgggcggttccagcccctgcccgaggcgatgaaggaaaaagaggttaggcctaagcatgtgaaagcgcttctgcagatggttagggatgaaagccaccagatcttggccctctcagaagggctggcccccccatccggcgagccgcatcccccacgtaaggaagatgagatccaggacatcagcctccatggggggaaaacccaagaggtccctaccgcctgtcccgattggcggggggacttgctacaggtcgtccaggaggccttcgagaaggagcaggaaatgcagggggtggagctacagccccgacttagtgggagtgatctgggtgggcacagcagtctgttagaaaggttagagaagattatccgggaacagggagatttgcaggagaagagccttgagcacctgagactccccgatagatcatcccttttaagcgaaattcaggcactgcgcgcccagctcaggatgacacatctacagaatcaggagaaattacagcatctacgcaccgccctcacctccgccgaagcccggggctctcagcaggaacatcagctgaggcggcaggttgagttgctggcgtacaaagtagaacaggagaaatgcatagcaggtgatttgcaaaagactcttagcgaggaacaggaaaaagctaacagcgtgcagaagctactcgctgccgaacagactgtagtgagagacctgaagagtgacctgtgtgagtcccggcagaaaagtgaacagctgagcagatctctgtgcgaggtacagcaggaggtcttgcagctgcggtctatgcttagcagcaaggaaaacgaacttaaggctgctctgcaggagctcgagagcgaacagggcaaaggcagagcgttgcagtcacagctggaagaagaacagctcagacatctgcaaagggagtcacagtctgctaaggccctcgaggagctgcgcgcctctctggagactcagagagcccagagcagccgcctgtgtgtggccctcaagcatgagcagactgcaaaggataacttgcagaaagagctaaggatcgaacactctcgatgcgaagcactcctggctcaggaaagatcacaactgagcgagctccagaaagatttagccgcagaaaagtccagaactcttgaactttcggaggctctgcgtcacgaacgattgctcaccgagcagttatctcaacgaacccaggaagcgtgcgtgcatcaggacacacaggcgcatcacgctctccttcagaaacttaaagaagaaaagtctagggtagtggatctgcaggccatgctcgaaaaggtgcagcagcaggccttgcatagccagcagcaactggaggctgaggcgcaaaaacactgcgaggcgctgaggagggagaaggaagtttccgccaccctcaagtcaacagtggaggctctgcacacccaaaagagggagctccggtgttcacttgaacgtgaaagagaaaaacccgcttggctgcaggccgagcttgagcaaagccatccacgcctgaaagagcaggaaggtcgcaaagctgcccggcgctcagccgaggccaggcaaagtccagccgctgccgagcagtggcgaaaatggcagcgtgacaaggagaagctaagggagctggagctacaaagacagagggacctccacaaaataaaacaattgcagcagaccgtgcgggacctggagtccaaggacgaagtccctggatcccgcttacatctgggttccgcacgccgcgccgcaggaagtgacgctgaccatttacgagagcagcagcgagaattggaagctatgcgacagagattactcagcgccgcccgactgctaacatcctttacttcacaggccgttgataggaccgtcaatgattggacctcctccaatgaaaaggctgtaatgagcctccttcacaccctggaagagctgaagtcggatctgtctcgccctacttccagtcagaagaaaatggctgctgaattacaattccagttcgttgacgtgctgctgaaagacaacgtatccctgacgaaagctttaagcacggtcacacaggagaaattggagctgtccagagctgtgagcaaactggaaaagctgctcaagcaccacctccagaaggggtgctcaccaagcagatcagagcggtctgcttggaaacctgatgagaccgctccacagtcgagtcttcgccggcctgaccccggaaggcttccccctgccgcaagcgaggaagcgcacacgagcaacgtgaaaatggaaaaactgtacttacattacctcagggcggagagctttcgaaaagctctcatttatcagaagaagtacttactattgttgattggcgggttccaggactctgaacaagagactctctcaatgattgctcatctgggcgtttttccgtcaaaggccgaacggaagattacctctaggcccttcacccggtttcgtaccgctgtgcgtgtagttattgctattctacgactgcgttttctcgtcaagaaatggcaagaagtggaccgcaagggagcgctagcccagggcaaggcacccagacccgggccacgggctcgtcagccccagtcaccacctcggacccgcgaatcccctccaacccgcgacgtgccatctggccacacgcgagatccagcccggggtaggcggctagccgccgccgcgagcccacactcaggcggccgggctaccccctctcccaacagcaggttggagcgtagcctgacggcaagccaggaccccgagcactcattgacagaatatattcaccatctggaggtcatacagcaacggctggggggagtgctcccagactccacaagtaagaaatcttgtcatcccatgatcaaacagtag

SEQ ID NO: 198934 - DNA, 6075 bp, synthetic construct
  misc_feature 1..6075: note = Description of Artificial Sequence: Synthetic coding sequence
  source 1..6075: mol_type = other DNA
atggccaccggcggcggccccttcgaggacggcatgaacgaccaggatctacctaattggtctaatgagaacgtggatgaccggctgaataatatggactggggggcacagcagaaaaaggccaatcgctcttccgaaaaaaacaaaaagaaatttggcgttgagagcgacaagcgggtgactaatgacatctccccagagtcctcacctggcgttggaagaaggcggacaaagaccccgcatacctttccccacagtagatatatgagccaaatgtccgtgccagagcaagcagagttagagaaactgaagcagagaatcaacttctctgatttagatcagaggagtataggaagcgattcccagggacgcgccaccgctgccaacaataaacgacaattgagcgagaaccggaagccatttaatttcctgccaatgcagattaacaccaacaaatccaaagacgcctctacaaacccacccaatagagaaacgataggttctgcccaatgtaaagagttgttcgcgtccgccctctctaatgatcttctgcagaactgccaagtttctgaagaggatggaaggggtgagcctgccatggagagctctcaaatcgtttcacgcttggtgcagattagggactacatcacaaaagctagctccatgagggaggacctcgtcgagaagaacgagcggagcgccaacgtggaacgacttacccacctgatagaccacctgaaagaacaggaaaagtcgtacatgaaattcctgaaaaaaatcctagctagggaccctcagcaggagcccatggaggagatagagaatctgaagaaacagcacgaccttctgaagcgaatgctgcagcagcaggaacagctgcgggcactccagggccgacaggcggctctgctggcactgcagcataaagccgaacaggcaatagctgtgatggatgattctgtggtagccgagaccgcaggttctctgagtggcgtcagcattaccagcgagctgaacgaggaattgaatgatctgatccagagattccataaccagttgagagactctcagcccccggccgtgccagataatcgtagacaggcggaatccctatccctgacaagggaggtatcgcaatctcggaagccatctgcgtcagagcgattgcctgacgagaaagtggagcttttttcaaagatgagagttctccaagagaaaaagcagaagatggacaagctcctcggagagctgcataccctgcgggatcagcatcttaataactcctccagttctccacaacgttctgtggatcagaggagcacctctgctccttcggcgtccgttgggctcgcccctgtggtcaatggagaatccaattccctcactagtagtgtgccttatccaaccgccagtcttgtgagccagaacgaaagcgaaaacgaaggacacctgaaccccagcgagaagctgcaaaagctgaacgaagtgaggaagaggcttaatgagttgcgggagctcgtccactactatgagcagacctccgacatgatgaccgatgccgtcaatgaaaatcgtaaagatgaagagaccgaggaatcagagtatgatagtgagcatgaaaatagtgaacccgttaccaatattaggaacccgcaggtggccagtacatggaatgaggtgaatagccactcgaatgcacagtgtgtgtcaaataaccgagacgggaggaccgtgaacagcaactgcgagattaataaccgctcagctgccaacataagggcactgaatatgccacctagcctcgactgtagatacaatagggagggcgagcaggaaattcacgtggcacagggtgaggacgatgaggaagaggaagaagaagctgaagaggaaggggtgtcaggcgcatctttgtccagtcatcgctctagcctggttgacgaacaccccgaagatgcagaattcgagcaaaaaattaacagacttatggctgccaagcagaaactgagacagttgcaagatctcgttgccatggttcaggatgacgacgccgcacaaggcgtgattagtgctagtgcaagcaatcttgacgacttttacccggctgaagaagacaccaaacagaatagcaacaacaccagaggaaacgccaacaaaacccaaaaggacaccggcgtgaatgaaaaggccagagaaaagttttacgaggccaaactgcagcagcagcagcgtgagctcaaacaattacaggaggaacgaaaaaagctcattgatatacaggagaagatccaagccctgcagaccgcctgcccagatctgcagctcagcgctgccagcgtggggaattgccctacaaaaaagtatatgccagcagtcacaagtacccccactgttaaccagcacgagacaagcacgagcaaaagcgtatttgagccggaggacagttcaattgtcgataatgagctgtggagtgaaatgcggcgacatgagatgctgagggaagaattaaggcagcgtcgtaaacagttggaggctctcatggccgaacatcaaaggaggcagggactagctgagaccgccagccccgtcgcggtatctctgcggtccgatgggagcgagaatctatgcacgcctcaacagtcccggacagaaaagacaatggcaacctggggcggctccactcagtgcgctctcgatgaagagggcgacgaagacgggtatcttagcgaaggaattgtgcggacagacgaggaagaagaagaggagcaggacgcctctagtaacgacaacttctcagtttgcccgagtaactcagtgaatcataacagttacaatggcaaggagactaagaacagatggaagaacaattgtccgtttagcgcagacgaaaactatagacccttggctaagactaggcaacaaaatatttcaatgcagagacaggaaaatctcaggtgggtttcagagctaagctatgtagaggagaaggagcagtggcaggagcagataaatcagctgaagaaacaactggatttctccgtttctatttgtcagaccctaatgcaggatcaacagaccctcagctgtcttcttcagaccctcctcacaggcccctactccgtgatgccgtcaaatgttgcctctccacaggtgcacttcatcatgcaccaattgaatcagtgctatacccagctgacgtggcagcaaaataatgtgcaaagactgaagcaaatgctcaatgagctgatgcggcagcagaaccaacacccagaaaagcctggtggaaaagaacggggctctagtgcctcacacccccctagcccctcccttttttgcccctttagtttccctactcagcctgtgaatctttttaatattcctggcttcacgaactttagcagcttcgcgcctgggatgaatttctcccccctttttccatccaatttcggagacttctctcagaatatatccactccttctgaacagcagcagccacttgctcagaatagttccgggaaaacggaatatatggcatttccgaagccattcgaatcgagctctagcataggggccgaaaaaccaaggaacaaaaagctgccagaagaagaggtcgagagttcccgcacaccctggctctatgagcaagaaggggaagtggagaagccctttatcaagacgggttttagcgtgtcggttgaaaagtccacatctagcaatcggaagaaccagcttgataccaacgggcggcggaggcagtttgacgaagagtctctggagtccttctcatccatgcccgaccccgtggatcccaccaccgtcactaagaccttcaagactcgcaaagccagcgcacaggcatctctggccagcaaagacaagactcctaaaagtaaaagcaaaaaacgcaatagcacacaactcaaatcacgtgtcaagaatatacgatatgaatcagcttcaatgtcttctacatgtgagccttgcaagtcgcggaataggcattcagcccaaactgaggaacctgtgcaggctaaggtgttcagtcgcaagaaccatgagcagctcgaaaagattattaagtgcaacaggagcactgagatcagctctgagacggggtctgacttttcaatgttcgaggcactgcgcgataccatatactccgaagtcgccacccttataagccaaaacgaaagcaggcctcatttcctgatagagctgttccacgagcttcagttgctgaacactgattatctgcgccagcgggccctctacgcactccaagacatcgttagccgacacatttccgaaagccatgaaaagggcgagaatgtcaagagtgtgaactctgggacatggattgccagtaacagtgagctgaccccaagcgagtccctcgcaacaacagacgatgagacatttgagaaaaactttgaaagggaaactcataagattagtgagcagaatgatgcagacaacgccagcgtgctgagcgtgtcctccaattttgagccattcgccactgatgacctcggcaacaccgtgattcacctggaccaggcactcgctcggatgcgcgagtacgaaagaatgaagacagaggccgaaagcaattccaacatgcggtgtacttgtcgaataatcgaggacggggacggcgctggggccggaaccaccgtgaataatctggaagagacccccgtgatcgaaaaccgctccagccaacagccagtgtccgaggtctcaaccattccgtgtccccgaattgacactcagcagttggatcgtcaaatcaaggctataatgaaggaagttatccctttcttaaaggaacatatggacgaagtctgctcctcccagctgctcacttcggtgcgccgcatggtcctgacccttacccagcagaacgatgaatctaaggagttcgtcaaattctttcacaagcagcttggtagcatccttcaagattctttagcgaagttcgctggaaggaaactgaaagactgtggagaggacttgcttgtggagatctccgaagtcctatttaacgaactcgccttctttaaactcatgcaggacttggacaataatagcatcaccgtcaagcagcgatgtaaaaggaaaatcgaggctacaggcgtgattcagtcttgtgcaaaggaagctaaacgaattctggaagatcacggcagtcccgccggcgaaattgacgatgaggataaggacaaggatgaaacagaaacagtgaagcagactcaaacctccgaagtctatgacggacccaaaaatgtacgctctgacattagcgaccaggaagaagacgaggaaagtgagggatgtccagtaagcataaatctcagcaaggcggagacgcaggcactcaccaactatggatctggagaggatgaaaacgaagacgaagaaatggaggaatttgaggaaggcccggttgacgtacagactagtctgcaggctaataccgaggctaccgaagaaaatgaacacgatgagcaggtgcttcagcgagattttaagaagaccgccgaatcaaaaaatgtgccgctcgaaagagaggctaccagcaagaatgaccagaataattgccccgtgaaaccttgctacctgaacatcttagaagacgagcaacccttgaatagtgccgcccataaggaatcaccgccaactgtggattccacacaacagcctaatccccttccgctgcgacttcctgagatggagccactagtcccccgagtgaaagaagtcaagtccgcgcaagaaacccctgaaagttctctggccgggtctccggacacagagagccctgttctggtgaacgactatgaggccgagtcaggaaatatcagccaaaagtccgatgaagaggacttcgtcaaggtggaagacctacctctgaagctcacaatatattcagaggccgacctgcggaagaaaatggtagaggaagagcaaaaaaatcacctcagcggcgaaatatgtgaaatgcagacggaggagttggccggaaactctgaaactttgaaagagcctgagactgttggcgcccagagcatttag

SEQ ID NO: 198935 - DNA, 1590 bp, synthetic construct
  misc_feature 1..1590: note = Description of Artificial Sequence: Synthetic coding sequence
  source 1..1590: mol_type = other DNA
atggccaccggcggcggccccttcgaggacggcatgaacgaccaggatctccctaactggtctaacgagaacgtggatgataggctgaataacatggattggggcgcccagcagaagaaggcaaaccgcagcagcgaaaagaacaaaaagaaatttggagtggagtccgacaagcgggttaccaacgacatttcacccgagtcttcgcccggggtgggacgacggcgaacgaaaacacctcacacttttccgcactcccgctacatgtctcagatgtccgtccccgagcaagccgaacttgaaaagttgaagcagagaataaatttcagcgatctggatcagagatcaattggttccgatagccagggccgggcaacggccgccaataacaagagacagctatcagagaaccgtaagccctttaatttcctgcctatgcagattaacactaataagtccaaggatgcatctaccaatccacctaatcgggagaccataggcagcgctcagtgcaaggaattattcgcgagcgctctgtcgaacgatctgctccagaactgtcaggtctccgaggaagatgggcggggcgagcctgctatggaatctagccagatagtctctcggttagtacagatccgggactacattaccaaggctagcagtatgcgcgaggatctggttgagaagaatgagcgcagcgcaaatgttgaacgactgacccacctgatcgaccatctaaaagagcaggagaaatcttatatgaagtttctgaaaaagattctggcaagggagaacgaggaggaggacgtgagaaccatagacagcgccgttggcagcggcagcgttgcggagtccacatccctgaatattgacgttcaatcagaggcatccgatacaacggctcgggacccgcagcaggaaccaatggaggaaatagaaaacctgaaaaagcagcatgatttgctgaagaggatgcttcagcagcaagaacagctacgggctttgcagggcagacaggccgcactgctcgccctgcagcacaaagcagagcaagccatagcagtcatggatgactcagtggtagctgaaactgccggctcactgtctggagtgtctattacctccgaactgaacgaggagctgaatgatctgatccagcgctttcataaccagctgagggattcccaacctcctgctgtgcccgataacaggcgccaggctgagagcttgagcctaacacgagaagtctctcagtcaaggaaaccttccgctagcgagcggctgcctgacgagaaagtggaacttttctccaagatgcgtgttttgcaggagaagaaacagaagatggacaaacttctgggtgaactgcacacccttcgggaccagcacctgaacaattcctctagtagccctcagcggagcgtcgaccagcgctctaccagcgccccaagtgcctccgttgggcttgctccagtggttaatggtgaaagcaacagcctgacatctagtgtgccttatccgactgcaagcctggtgtcccaaaacgaatccgaaaacgagggccacttgaacccttccgagaaattatag

SEQ ID NO: 198936 - DNA, 2172 bp, synthetic construct
  misc_feature 1..2172: note = Description of Artificial Sequence: Synthetic coding sequence
  source 1..2172: mol_type = other DNA
atgagcagcacctgcgagccctgcaagagccggaaccggcacagcgcccaaacagaggagcctgtgcaggctaaggtattcagcagaaagaaccatgagcagctggaaaaaataattaaatgtaacagatctaccgaaatcagtagcgctcatgcgcgtaggattcttcagcagtccaatcgaaacgcctgcaacgaagcccccgagaccggcagtgatttcagcatgtttgaagcattgcgagatactatatatagcgaggtggccacactgatctctcagaacgaatctaggcctcattttctgatcgaactgtttcatgaactccagctgctcaacacagattacttaagacaaagggccctgtacgccctccaagacattgtgagccggcatataagtgagtcacacgagaagggcgagaacgttaagagcgttaattctgggacttggatcgcaagcaattctgaactaacaccctccgaatctctggccaccaccgacgacgagacatttgagaaaaattttgaacgggagacccacaagataagcgaacaaaacgacgcggacaatgcatctgtcttatccgtctcatcaaatttcgagcctttcgcgaccgatgatctgggcaacactgtaattcacctggaccaggccctcgctagaatgagagagtacgagcgaatgaaaacagaggccgagtccaattcgaacatgcggtgcacctgccgcatcattgaagacggcgatggcgccggtgctgggacgacagtgaacaatctggaggagactccagtcatcgaaaaccgatccagccagcagcctgttagtgaagtgtctacaatcccctgtcctcgtatagatacccaacagctcgaccggcagataaaagccataatgaaagaagtgattccgttcctaaaggaacatatggacgaggtgtgctcctctcaactgctaacatcagtgcggcggatggtgcttactctcacccagcaaaatgatgaaagcaaagagtttgtgaaattctttcacaaacagctcggctcaattttacaggattccctggctaaatttgctggacggaagctgaaagactgcggcgaagatttgctagttgagatcagtgaggtgcttttcaatgagttagcctttttcaagctcatgcaggaccttgataataattcaattaccgtaaaacagcgttgcaaaagaaaaatcgaggctacaggagtaattcagtcctgcgccaaagaggcaaagcgaatcctggaggaccacggatcccctgcaggcgagattgacgacgaggataaggacaaggacgagacagagacagttaagcagactcagacatccgaagtttacgatggccccaaaaacgtgcgctcagacatctcagaccaggaagaggacgaagaatctgaaggatgccccgtttctattaacctttccaaggctgaaacacaggctctgaccaattacgggagcggcgaggacgaaaatgaagacgaagaaatggaggaattcgaggagggtcccgtcgatgtgcagaccagcctgcaggcaaatactgaagcaaccgaggagaacgaacatgatgagcaagtattgcagagggacttcaagaaaacagccgaatcaaaaaatgtgcctctggaacgggaggcgacatcgaagaatgatcagaacaattgcccagtaaagccgtgttatttgaatatcctggaagacgagcagccgctgaattcagccgcccacaaggaaagcccaccaacggtggactccactcagcagcccaatccgctacctcttcgcctccctgaaatggagcccctggttcctcgcgtgaaagaagtcaaaagtgcgcaggagacaccagagtcatccctggctggatcccctgatacggaaagcccggtacttgtgaatgattacgaagcagaaagtggcaacatatctcagaagtccgatgaggaggactttgtgaaggtggaggacctgcccttgaaactgacaatatattctgaggccgatctgaggaagaagatggtggaggaagagcagaagaaccacctcagcggagaaatctgtgagatgcagaccgaggagcttgccggcaatagcgaaacactgaaggaaccagagacagtgggcgcccagagtatttag

SEQ ID NO: 198937 - DNA, 2295 bp, synthetic construct
  misc_feature 1..2295: note = Description of Artificial Sequence: Synthetic coding sequence
  source 1..2295: mol_type = other DNA
tgaaaggccagcgcccaggccagcctggccagcaaggacaagacccccaagtcaaaatcaaaaaagagaaactcgactcagttgaagtcccgcgtcaagaacataagatatgaatcagcaagcatgtctagtacttgtgagccttgtaaaagcaggaacaggcacagcgcccagactgaggagccagtgcaggctaaagtctttagccggaaaaatcacgagcagctggagaaaattatcaaatgtaacaggtcaacagagatttccagcgcccatgccaggcggatcctacagcagagcaaccgcaacgcatgcaatgaggcacctgagaccggttccgacttttcaatgttcgaggcactcagggacaccatctattcagaggtcgcaaccctcatctctcagaatgagtcgcggcctcattttttgattgaactgttccatgaattacaactcctcaacactgattatttgagacaaagagccctgtacgcccttcaggacattgtcagccgtcatatttctgagtcacatgaaaagggtgagaatgttaagagtgtaaatagcggtacctggattgccagcaattctgaactgacccccagcgaatctctcgccaccactgatgacgagaccttcgagaagaacttcgagcgggagactcacaaaatcagcgaacagaacgatgcagacaacgcctctgttctgtcagtctcctctaatttcgaaccattcgctacggacgacctcggaaatacggtgatccacctcgatcaggcactcgccagaatgcgcgagtacgaacgcatgaagacagaggccgaatctaactccaacatgcgttgtacctgcaggattatcgaggatggtgacggtgctggggccggtacaacggtgaataatctggaagagactccagtgatcgaaaacaggtccagtcagcaacccgttagtgaagtcagcactatcccctgtccaagaatagatacacaacagctggaccgacaaattaaggctatcatgaaggaagtcatcccttttcttaaagagcatatggacgaggtgtgtagcagccagttacttaccagcgtgcggagaatggtcctgacactgacacaacagaatgacgaatcaaaagaattcgttaagttctttcacaagcagttggggtctatccttcaagactccttggcgaagtttgccggtcgcaagctcaaggactgtggggaggatcttctcgttgagatatccgaggttttgttcaatgagctcgccttttttaaactgatgcaagatctggacaataactcaattacggttaaacaaaggtgcaagcggaagatagaagcaacaggcgtcatccagtcatgcgctaaggaggcgaagagaatcctagaagaccatggctccccagccggagagatcgatgatgaagataaggacaaagatgaaaccgaaaccgtcaaacagactcaaaccagtgaggtctacgacggccccaagaatgtacggtctgacattagtgaccaggaagaggatgaggagagcgaaggctgtccggtgagcataaatctgagcaaagctgaaactcaggcgctgactaactatggatccggggaagatgaaaatgaagacgaggaaatggaggagttcgaggagggccccgtggacgtacagaccagcctgcaggctaacaccgaagccacagaagaaaatgagcacgatgaacaggttttgcagagggattttaagaaaacggcggagtctaagaatgtaccattggaacgtgaggccacttcaaaaaacgatcagaataattgccctgtgaagccatgttatctcaacatcctggaagacgagcagccattgaactccgcggctcacaaagagagcccgcccacggtcgactctactcagcagcccaatccactcccactcaggctccctgaaatggagccactggtgccaagagtcaaagaggtgaagagcgcgcaggagacccctgagagctctctggcgggatcccctgatacagagagtccggttctggttaacgactacgaggcggaatcaggcaacatatcacagaaaagcgacgaagaggacttcgtcaaggtcgaagatctccccctcaaactgacaatctattccgaagccgacctcaggaagaaaatggtcgaagaagaacagaagaaccatctttccggcgagatctgtgaaatgcagacggaggagctggcaggcaactcagaaacgctgaaggaacccgaaacagtgggcgcccagtccatctag

SEQ ID NO: 198938 - DNA, 1227 bp, synthetic construct
  misc_feature 1..1227: note = Description of Artificial Sequence: Synthetic coding sequence
  source 1..1227: mol_type = other DNA
atggccaccggcggcggccccttcgaggacggcatgaacgaccaggacctccccaattggtccaacgaaaatgtggatgaccggctcaataacatggactggggcgcgcagcagaaaaaggccaatcgctccagtgaaaagaacaagaaaaaatttggagtcgagtccgataaacgcgtgacgaacgacattagtccggagagtagccccggtgtaggccgtcgacgcacaaagacgccacacactttcccacacagccggtacatgtcacagatgtctgtacctgaacaggctgaactggagaaattgaaacagcgaatcaacttctcggatctggatcaacgctcgattggatccgactctcagggtagagctacagctgctaacaacaagcggcaactatctgagaatcgaaagccttttaacttcttgcctatgcagatcaacaccaacaaaagtaaggacgcgagcacaaacccacccaaccgggaaactatcggaagcgcgcagtgcaaggaactgttcgcttccgcattgagtaacgaccttctgcaaaattgtcaggtgagcgaagaagatgggaggggcgagcccgctatggagtcctcccagatcgtctcccgtctggtgcagataagggattacattaccaaggcttctagtatgagggaggatctggtggaaaagaacgaaagaagcgccaacgtcgagagactgacccacctaatcgatcacttaaaggagcaggaaaagtcctacatgaagttccttaagaaaatattagccagggaccctcaacaggaaccaatggaagaaatagagaacttgaagaaacagcatgatctcctgaagcgaatgttgcagcagcaagaacagctgcgggccctgcagggtaggcaggccgcactactggctctccagcacaaagccgagcaggctattgccgtcatggacgactctgtcgttgcggagacggcaggtagtctgtcgggagtgagcattacatctgagctcaatgaggagctgaacgatttaattcaaaggtttcataatcagttgcgtgactcccagccacctgcagttcctgataaccgtcgccaagcagaaagtctgagcctgacccgggaagtgtcccagtcacggaagccgagcgccagcgagcgcttaccggacgaaaaggtggagctgtttagtaagatgcgcgtgttgcaggagaagaagcagtag

SEQ ID NO: 198939 - DNA, 1569 bp, synthetic construct
  misc_feature 1..1569: note = Description of Artificial Sequence: Synthetic coding sequence
  source 1..1569: mol_type = other DNA
atggccgtgaacaagggcctgaccctgctggacggcgacctgcccgagcaagaaaatgtattacagagagttctccagctgcccgtagtttccggaacttgtgagtgctttcagaagacatatacgtctactaaggaggctcatcctctcgtggcatccgtctgcaatgcctacgagaagggagtgcagtccgccagcagtctcgcagcgtggagcatggaaccagtggtgagacgcctctccacgcaattcacagcagcaaatgaactcgcctgccgcggtttggaccaccttgaagaaaagattcccgctctgcagtatccccctgagaaaatagcttctgaattaaaggacaccatttccacccgtctgagaagcgcccgaaatagcatatctgtccctattgctagcactagcgacaaagtgttaggagcagctctcgcaggatgtgaacttgcctggggagtcgcccgtgacactgccgagttcgccgctaacacacgtgccgggcgcctagcctccggcggtgccgaccttgctctaggatcaatcgagaaggtggtggaatacctcctgccacctgacaaggaagagagcgctccagctcccggacatcaacaagcccagaagtcacccaaggccaagccaagcctcctgagtagagtgggcgccctgactaacactctgagtaggtatacagtgcagactatggcaagggccctggagcaagggcacacggttgcgatgtggatccctggggtcgtgccactctctagtctggcccaatggggcgcgtccgtggccatgcaggcagtgtctagaagaagaagcgaagtgcgtgtgccttggctacactcgctcgcggccgcgcaagaagaagatcacgaagaccaaacagatacagagggtgaagacactgaggaagaggaagagctggaaaccgaagagaataagttctcagaggtagccgctctccctggtcctaggggtctgctgggcggcgtggctcacaccctacagaagacactgcagaccactattagcgctgtgacctgggcacccgcagccgtgctaggaatggccggtagagtgctgcacctcactccagccccggccgtctctagtacgaaaggacgggccatgtccctgagcgacgccctcaagggggtaacagacaacgttgtagatactgttgttcattatgtgcccctcccgagactgtcgctcatggagccagagagcgagttccgtgatattgacaatccgcctgcagaagtggaaaggagagaagcggagcggagagcaagtggagccccatctgcgggaccagaacccgccccccggcttgcacagccccgtcgctctctgcgtagcgcacagtcgcccggagccccaccaggccccgggctcgaagacgaagtcgccacccccgctgcacccagaccaggattccctgccgtgccccgggagaaaccaaaaaggcgggtaagtgatagtttttttcgaccgtctgttatggagcccattctcggaagaactcactactcacagctgcggaaaaaatcttag

SEQ ID NO: 198940 - DNA, 1569 bp, synthetic construct
  misc_feature 1..1569: note = Description of Artificial Sequence: Synthetic coding sequence
  source 1..1569: mol_type = other DNA
atggccgtgaacaagggcctgaccctgctggacggcgacctgcccgaacaggagaatgtgttacagcgcgtcctccagctgcccgtggtttcaggcacttgcgaatgcttccagaaaacttacaccagtaccaaagaggcccaccctctagtggccagcgtgtgcaacgcttatgagaagggggttcagtctgcatcttcacttgcggcctggtctatggagccagtggttcgcagactcagcacccagttcactgcggctaatgaactggcttgcaggggcctggaccacctcgaagaaaagattcccgctctccagtatccacctgagaaaatagcgtctgaactgaaagatactatctctacacggctgcgatcagctcgcaactccatttccgtccccattgcatctacatccgataaagtactgggcgcagctctggctggatgcgagctggcatggggagtagcccgcgacacagccgaatttgccgccaacacgagggccggcaggctggccagcgggggtgctgacctcgcgctgggaagcatcgaaaaggtcgtggagtatctgctgcctccagataaagaagaatctgcccccgcacctgggcatcagcaggcccagaagagtcctaaggcaaagcccagcctgctgagcagggttggggctctgaccaataccctgtccaggtatacagtgcagactatggctagagccttggaacaaggccacactgtcgccatgtggattcccggggttgttcccctgagctcattggcccagtggggcgctagtgtggccatgcaggcagtatctagacggcgctccgaggttcgtgtcccatggttgcatagcctggcagctgcacaggaggaagaccacgaggatcagactgacacggagggggaggatactgaagaagaggaagagctggagaccgaggaaaacaaattctcggaagttgcagccctgccagggcccaggggtttacttgggggcgtcgcccacaccctgcagaagaccctccagacaaccatctcagcggtcacttgggctcctgctgccgtactcggcatggcgggacgggtgctacacctgaccccggcaccagccgtcagctcaacaaaaggtagggcaatgtctctgtctgatgccctgaaaggagtcactgataacgttgttgacactgtggttcactacgtgcccttgccccgcctgagtctcatggagcctgaaagcgagtttagagatatcgacaaccctccagccgaagtggagcggcgggaggctgaaagacgtgcctctggagctccctctgctggaccagaacccgccccccgcctcgctcagccccgacggagccttcgctcagctcagtctccaggggcaccaccaggaccaggcttagaagacgaggtggccactcctgccgcgcctcgcccagggttccctgccgtcccacgggagaaaccgaagagaagagtaagcgactccttttttcgccctagcgtgatggaaccaattctgggcagaacccattactcccaactcaggaagaagtcttag

SEQ ID NO: 198941 - DNA, 1314 bp, synthetic construct
  misc_feature 1..1314: note = Description of Artificial Sequence: Synthetic coding sequence
  source 1..1314: mol_type = other DNA
atggccagcgtggccgtggacccccagcccagcgtggtgacccgggtggttaacctccctctggtaagctcaacatacgacctgatgagctcagcctacctgagcaccaaagaccagtatccatatctgaaaagcgtgtgcgaaatggccgagaatggcgtgaaaacaattacatccgtggccatgacatccgcccttcccatcatccagaagctggaaccacagatcgctgtggccaatacttacgcttgtaagggactcgacagaattgaggagagattgcccatcctgaaccagccatccacgcaaatcgttgcaaatgcaaagggtgctgtcaccggagcaaaggacgcagtcacgacgaccgtgacgggcgctaaagattccgtcgcctctacaatcactggagttatggacaagactaagggtgctgtgacagggagcgtggaaaagacaaaaagcgttgtctccggaagcataaatacagtgctcggcagccgaatgatgcaacttgtatctagcggcgtggagaacgcattaactaaatctgaactccttgtggagcagtacctcccattaacagaagaggaactagaaaaggaggccaaaaaggttgagggttttgatctggtgcagaagcctagctactacgtacggttgggaagcctgtccaccaaactacactccagagcttaccaacaggccctgagtcgcgttaaagaagccaagcagaagtctcagcagaccatctcccaattacattccacggtgcaccttattgaatttgccagaaaaaacgtctactccgctaatcagaaaatccaggatgctcaggacaaactttatctttcatgggtggaatggaaaagatctataggctacgatgacaccgatgaaagccattgtgctgagcatatcgagtcaaggaccctggcaattgctcggaaccttactcagcagttacagacaacctgccacaccctcttgagcaacattcagggtgtcccacagaacatccaggaccaggcgaaacacatgggcgtcatggcaggcgatatctactccgtgttcagaaacgcagcttccttcaaagaggtgtctgactcactcttaacatcctctaagggacaactccagaaaatgaaagagtcccttgacgacgtgatggattatttggtgaataacacccccctgaactggctcgtggggccattttatcctcaactcacagagtcgcagaacgctcaggatcagggagccgaaatggataaaagttctcaagagacccagaggtccgaacacaagacccactag

SEQ ID NO: 198942 - DNA, 333 bp, synthetic construct
  misc_feature 1..333: note = Description of Artificial Sequence: Synthetic coding sequence
  source 1..333: mol_type = other DNA
atggccagcgtggccgtggacccccagcccagcgtggtgacccgggtagttaacctgcccctggtctctagcacgtatgacctgatgagctccgcttacctttctaccaaagaccagtatccctatctgaaaagcgtatgtgagatggctgagaacggtgtcaagacaattacttcggtcgccatgaccagtgccttgccaatcatccagaagctcgagcctcaaatcgcggtggccaacacatacgcatgtaaaggccttgaccggatcgaagaaaggcttcctattctaaaccagcccagtactcaggtttcattaggacaaaagtgctag

SEQ ID NO: 198943 - DNA, 381 bp, synthetic construct
  misc_feature 1..381: note = Description of Artificial Sequence: Synthetic coding sequence
  source 1..381: mol_type = other DNA
atggccagcgtggccgtggacccccagcccagcgtggtgacccgggtcgtgaatcttcccttagtatcgtctacatacgatttgatgagttcagcttatctttctactaaggaccagtacccgtacttgaaatccgtgtgcgagatggccgagaacggagtgaagaccatcacttctgtcgcaatgaccagtgcgctgccgataattcagaagcttgagcctcaaatagccgttgcgaatacatacgcttgcaaaggattagacaggatagaagaaagactgcccattctcaaccagccgtcaacccaggctaatacctgctttcctaatctcgatcttgatgtatgtctgaagaataacggacacttcttgactagttag

SEQ ID NO: 198944 - DNA, 1071 bp, synthetic construct
  misc_feature 1..1071: note = Description of Artificial Sequence: Synthetic coding sequence
  source 1..1071: mol_type = other DNA
atggccagcgtggccgtggacccccagcccagcgtggtgacccgggtcgtgaacttgcccctggtgtctagcacctatgacctaatgtcgtcagcgtacctctccactaaagaccagtacccctatctgaagtcagtctgcgaaatggccgaaaacggcgttaaaactatcactagcgtggctatgacaagcgccctgccgattatccagaaactggagccacaaattgccgttgcaaacacttacgcttgtaagggcctggatcgtattgaggaacgcctcccaatcctcaaccaaccgtccactcagatcgttgccaacgccaagggggccgtcacaggcgcaaaagacgcagtgactacgactgttacaggggccaaggattccgtagcctctaccattacaggcgtgatggataaaacaaagggagctgtgacgggtagtgtcgaaaaaacaaaaagcgtcaagaagaaacagaagaaattgaaggatctaatctggtttcgcagccagcttcactctactgtccacctcattgagttcgctcgcaagaatgtgtacagtgccaaccagaaaatccaggatgcgcaggacaagctgtacctgtcctgggtggagtggaagagaagcatcggttatgatgacactgacgagtcccactgtgccgagcacattgagagtcgcacgttagccatagccaggaatctgacgcagcagctgcagaccacctgtcacaccctgctgtcaaatatacaaggggtaccacagaatattcaggatcaagcaaagcacatgggcgtcatggctggcgacatctattctgtgtttcgcaatgcagcctcctttaaggaagtgtccgacagcttgctcacatcttctaaaggccagttgcaaaaaatgaaggagagcctggacgacgtaatggattacttggtgaacaataccccattaaattggcttgtgggcccgttttaccctcagctaacagaatctcagaatgcacaggaccagggggcagagatggacaagagtagtcaggagactcaacgatccgagcacaaaacccactag

SEQ ID NO: 198945 - DNA, 378 bp, synthetic construct
  misc_feature 1..378: note = Description of Artificial Sequence: Synthetic coding sequence
  source 1..378: mol_type = other DNA
atggccagcgtggccgtggacccccagcccagcgtggtgacccgggttgtcaacctcccattagtctcgtccacatacgacctgatgtcatctgcctacctatccactaaagatcaatacccatacctgaagagtgtgtgtgagatggccgagaacggggttaaaactatcacttctgtggctatgacctccgcgttacctataatccaaaaattagaaccgcagatagccgtggcaaacacttatgcctgtaagggactggacaggattgaggagaggctgccaatcctaaaccaaccgagtacccagatcgttgcaaacgccaagggggccgtgactggagcaaaggacgctgttaccacgaccgtaactggatag

SEQ ID NO: 198946 - DNA, 735 bp, synthetic construct
  misc_feature 1..735: note = Description of Artificial Sequence: Synthetic coding sequence
  source 1..735: mol_type = other DNA
atgggcccccccagcgccgccccccggggcggccaccggccctggcagggcttactgataactgcatcactcctgacgttctggcatcctcctaccacagttcagtttaccattgaggccctgccatcttccgccgccgagggcaaagacgtcctgctgcttgcatgcaacatatcagagacaattcaggcatactattggcataaggggaagacagcggagggcagcccattgatagctggctacattactgacatccaggccaacatcccaggcgccgcttattcgggtagggagacggtttacccaaacggatctctgctgtttcagaatattaccctcgaggatgcaggctcgtataccctaaggactattaacgcttcttacgacagtgaccaggcaaccggacagctgcacgtgcaccagaacaatgttccaggcttgcccgtaggcgccgtggccggaatagtgactggcgtgctcgtgggagtggcactagttgcagccctcgtttgtttcctgttgctgtctagaaccggacgagcaagcattcagcgggatctgagagagcaaccaccgcccgcctccactccaggccacggcccatcgcaccggtctacattctccgcgcctctgccttccccgagaaccgccacacccatttacgaggaattattatattccgacgctaatatctattgccaaatcgaccataaggccgacgtggtatcctag

SEQ ID NO: 198947 - DNA, 1269 bp, synthetic construct
  misc_feature 1..1269: note = Description of Artificial Sequence: Synthetic coding sequence
  source 1..1269: mol_type = other DNA
atgagcgccgacggcgccgaggccgacggcagcacccaggtgaccgtggaggaacccgtgcagcagccttcagtcgttgaccgcgttgcatcaatgcccctgatttcaagcacctgtgatatggttagcgcagcttatgccagtaccaaagaatcataccctcacatcaagaccgtgtgtgacgccgcagagaaaggggtgagaaccctgacagctgcagcagtgtcaggtgctcagccaatcttgtccaagttggagccgcaaattgcatcagccagtgaatacgcccataggggtctcgataaattagaggagaatcttcctatactacagcagccaactgaaaaggtcagtggagcacaagagatggttagtagtgccaaagatactgtggccactcagctcagcgaggccgtcgatgctacccgtggcgccgtccagtctggcgtggacaagaccaaatcagttgtgactggaggcgtgcagtctgtgatgggcagccgattggggcaaatggtcctctctggcgtggacacagtgctggggaaatctgaagagtgggctgataaccatctaccgctcactgacgctgagctagcacgcattgcgacctcactagacgggtttgacgttgcatcagtccagcagcagcggcaggaacagagctactttgttcgcctcggttcactgtcagagcggctcaggcagcacgcctatgaacacagtctaggcaagctgagagccacaaagcagcgtgcccaggaggctcttcttcagttgtcccaggttttgtctttgatggagaccgtgaagcagggtgtcgatcagaagctggtggaaggccaggagaagctccatcaaatgtggctttcatggaaccagaaacagctccagggaccagagaaggaaccccccaagccagaacaggttgaatctagagcgctgacaatgtttagagatatcgcacagcaactgcaagccacttgtacatccctcgggtcctccattcagggcctccctactaatgtgaaggatcaggtccagcaagccaggcgtcaggtggaggatctgcaggctactttttcttcaattcattcattccaagatctgagctcatccatcctggcacagtctcgagagagggtcgccagcgcaagagaggcattggaccatatggttgagtacgttgcccagaacacccccgtcacctggttagtgggtcctttcgctccgggcattactgagaaggccccagaagaaaaaaaatag

SEQ ID NO: 198948 - DNA, 1392 bp, synthetic construct
  misc_feature 1..1392: note = Description of Artificial Sequence: Synthetic coding sequence
  source 1..1392: mol_type = other DNA
atgagcgaggaggaggccgcccagatcccccggagcagcgtgtgggagcaggaccagcaaaacgtggtgcagagggtcgtcgccctcccgctggtgagagctacctgtactgcggtctgcgatgtgtatagcgccgcaaaggaccgccaccctttactcggctcagcttgccgcttggccgagaattgtgtgtgcggcctgactacccgtgccttagaccatgcgcagcctttgctggaacatcttcagcctcaactggccacaatgaacagtctcgcatgtcgcggactcgataaactcgaggagaaacttccatttttacagcagccctccgaaaccgtggttacttcagccaaagacgtggtggctagctctgtgacaggggtcgtcgacctcgccaggcgcggccgccgttggagtgtcgagctaaaaaggtccgtgtcgcatgctgtcgatgttgtgctggagaagtccgaggaactggttgaccattttctcccgatgaccgaggaggaattagccgcactggcggccgaggccgaaggcccagaagtcggtagtgtcgaagaccagaggcgtcaacaaggctacttcgtgcgcctggggtctctctctgcacgaatcagacacctcgcctatgaacactccgttgggaagctgcgacagagtaagcaccgcgctcaagacacgctcgcgcaactccaggagaccctcgaactgatcgaccatatgcagtgcggagtgaccccgacggccccagcttgtcccggtaaggtgcacgaactgtggggcgaatggggtcagcgccctccagaatctaggcgccggtcgcaggccgaactggagacactggtccttagcagatcattgactcaggagctgcagggcaccgtggaggctctcgagtcttcagtgcgtggactgcccgccggcgcccaggagaaagtggccgaagtgaggaggtccgtggacgcccttcaaacagccttcgctgacgcacgatgttttagggacgttcctgcggctgccctggctgaaggtcgagggagggtggcccatgcacatgcctgtgttgacgagctcctcgagcttgtggtccaggcggtgcctttgccatggctggtgggccctttcgctcccattttggtcgagcgtccagagcccctgccagatttagccgacctagtcgatgaggtcattgggggccctgacccacggtgggcccacttagattggcccgctcagcaacgggcctgggaagccgaacacagagacgggagcggtaatggcgatggagatagaatgggcgtggcgggcgatatttgtgagcaggaacccgaaacccctagctgcccggttaagcacacacttatgcccgaactggacttttag

SEQ ID NO: 198949 - DNA, 3768 bp, synthetic construct
  misc_feature 1..3768: note = Description of Artificial Sequence: Synthetic coding sequence
  source 1..3768: mol_type = other DNA
atgaacggctacgccgagttcccccccagccccagcaaccccaccaaagaacccgttgagccccagcctagccaggtcccactgcaggaagatgtggacatgtccagcggctcatccggtcacgagacaaatgagaactgttcaacggggagagattcgcaggggtctgattgcgatgattccgggaaggaactgggcatgttagtcgagcccccagacgctcggcagagccctgatacatttagtctgatgatggccaagtctgaacataacccctctacaagcggatgttcctcagatcagagctcaaaggtggacacccacaaggaactcattaagacgctaaaagagctgaaggtgcatctgcctgcggataaaaaggccaaagggaaagctagtactctggcaactctgaaatatgccttgcgcagcgtcaaacaggtgaaggctaatgaggagtactatcaactgctcatgtcttctgaggggcacccctgcggggccgacgtgccctcttacactgtggaggagatggaaagcgtgaccagtgaacatatagtgaaaaatgctgacatgtttgctgttgccgtgtccctggtgtcaggcaaaattttatacataagcgatcaggttgcaagtatctttcactgtaaacgggacgcctttagcgacgccaagtttgttgagtttttagcaccacacgacgtgggcgtctttcactcatttactagcccatacaaacttccactatggtctatgtgttccggggcagatagctttacccaggagtgcatggaagaaaaatccttcttttgtcgggtgtctgtgaggaaatcacacgaaaatgaaataagatatcaccctttcagaatgaccccatacttggtaaaagtgcgggatcagcagggggcggaaagtcagctgtgctgtctccttttggctgaacgcgtgcatagtggatacgaggctccgaggattccgcccgaaaaacgcatcttcaccaccacccatactcctaactgcctgtttcaggacgtggacgagcgggccgtcccgctgctgggttatttaccccaggatctgattgagacccctgttttagtccagctccacccctccgacaggccactgatgctggccatacataagaaaattctgcagagcggcggacaaccattcgactactcaccgattcggtttagagcacggaacggagaatacatcactctggatacatcctggtcctccttcattaacccatggtcaagaaaaatatcatttatcatcgggcggcataaggtgcgcgtgggtcctctcaacgaggatgtgtttgcagcacatccatgcaccgaggaaaaagccctgcacccaagcatccaggaattgaccgagcagatacacagactgctgctgcaacctgtaccccacagcggatccagtggctacggcagcctcggctccaacggttcacacgagcacctgatgtcacagaccagcagttctgacagtaacggccatgaagattcaagacgacggcgagccgagatctgtaaaaacggcaataaaactaaaaacaggagccactactctcatgagagcggcgaacaaaagaaaaagtctgtgactgagatgcaaactaaccctcccgctgagaagaaggctgtgccagcaatggaaaaggattcactcggcgtctccttccctgaggaactggcgtgcaagaatcaacctacttgcagctaccagcaaatatcctgtctagattcagttatccgttatctggagtcatgtaacgaggctgctacactcaaacgtaaatgcgagtttcccgccaatgtgccagcgttgcgatcttctgataaacgtaaggccactgtgtcccctggaccacatgccggcgaggcagaaccacccagtcgagtgaatagtagaaccggggtgggaacccacttgacgtctctggcactcccgggtaaagcggaatctgtggcgtcgctgacttcccaatgctcatactcttccaccatcgtgcacgtgggcgataagaaaccacaacctgagttagagatggtggaggacgcagccagtgggccagagagccttgattgtctggcaggcccggcgctagcttgcggattatcgcaggaaaaagagccctttaaaaaactggggctgacaaaggaggtgctcgctgctcatactcagaaggaggaacagagtttcctgcagaagttcaaggagatcagaaaattgtcaatctttcagagtcactgccactactatctgcaggagaggagcaagggccagccgagcgagcggactgcacctggattgcgcaatactagcggcatcgattctccctggaagaaaaccgggaagaatagaaagttgaagagtaagcgggtaaaacctagagattcctcagaaagcaccggatcaggaggaccagtgtcagctcggccgccgctggttggactgaacgctactgcctggagcccctccgacacgagccaatcttcctgtccggccgtgccatttcctgctcctgttcctgccgcatactctctcccagtgtttcctgccccaggtaccgtagctgccccacctgccccccctcacgcaagtttcactgtccccgccgtcccagtggatctccagcaccagtttgccgtgcagccgccaccctttccagcccccttggcacctgtgatggcattcatgctgccttcttacagtttcccctcaggcactcccaatctgccccaagccttctttcccagtcaaccacagtttccttctcaccccactctgacgtcagagatggcctcggccagtcagcctgagttcccgtctagaacttccataccacgccagccttgtgcgtgcccggctacccgagccactcccccctccgctatgggaagggcaagccccccccttttccagtcccgaagctcttcccctctccaactgaatctacttcaattagaggaagccccagaaggcggtaccggagccatgggcacaactggcgccacggaaactgcagcagttggagccgattgtaagcctggcacctcccgggatcagcagcccaaggcaccactcaccagggacgagccgagcgatacgcaaaactctgatgccctcagcactagctccgggctgctgaacctcctgcttaatgaagacctatgctccgcctctggctccgctgcctccgaaagtctagggagtggatccctgggatgcgatgcttccccctccggggcaggcagttccgataccagtcatacctcgaagtactttggctcaattgactcctccgaaaataatcacaaggccaaaatgaacacaggaatggaggaatctgaacattttattaaatgcgtgctacaggatcctatttggctgctgatggcggacgcagattcctcagtgatgatgacatatcagctccctagcaggaatctggaagctgttcttaaagaggaccgcgagaagctcaagttactgcaaaaacttcagccccgtttcacagagagccaaaagcaggaattacgtgaggtccaccagtggatgcagactggcgggttacctgcagcaatcgatgtggcagagtgtgtgtattgtgagaacaaagaaaaagggaacatttgcatcccctacgaggaggacattccctccttagggctgtccgaagtgagcgataccaaggaagatgaaaatgggagtccgctgaatcataggattgaagagcagacgtag

SEQ ID NO: 198950 - DNA, 1215 bp, synthetic construct
  misc_feature 1..1215: note = Description of Artificial Sequence: Synthetic coding sequence
  source 1..1215: mol_type = other DNA
atgaacggctacgccgagttcccccccagccccagcaaccccaccaaagagcctgtggagccccaaccttcccaagtccccctgcaagaggatgttgatatgtcgtctgggtcctcaggccacgagactaacgaaaactgcagtaccggacgggatagtcagggcagtgattgcgatgactccggaaaggaactgggtatgctggtggagccccccgatgccagacagtcgcctgacaccttcagcttgatgatggccaagtccgagcacaaccccagcacaagtgggtgttcgagcgatcaaagcagtaaggtggatacgcacaaagagttgattaagaccctaaaagaattgaaagtgcatctgccggccgataaaaaggcaaagggaaaagcttccacactggccaccctgaaatatgcgttgcgctctgtgaaacaggtaaaagcaaacgaagaatattatcagctgctaatgtcctccgaggggcatccctgtggagccgatgttcccagttacactgtggaggagatggagtccgtgacgtccgagcatattgttaaaaacgctgacatgttcgctgtggccgtcagcctcgtctcaggaaagattctttacatcagtgaccaggtcgccagcatcttccattgtaagcgggacgcatttagtgacgccaaattcgttgaatttttggccccccacgacgttggcgtgttccattctttcaccagcccatataagctgccgctgtggagtatgtgcagtggcgccgatagcttcacgcaggaatgcatggaagagaagagtttcttctgcagagtctcagtccgtaagtcccacgagaatgaaataagatatcaccctttcagaatgaccccatacctggttaaggtccgtgaccaacaaggcgcagagagtcagctgtgctgcctgttgctggccgaacgcgtccacagcggttatgaggcacctaggattcctcccgaaaagagaatttttactaccactcacacgccgaattgtctgtttcaggacgtagacgagtcacctgcggtgcggcgagcagctttcagactcttttcacactctgtaagtcggcccgagagaagagtgcaccacgtgggccatcaacttgtgcagctgcatcaaccaatggaacaggaaaatctgttgcaccattgggaggcacagtcacagggaggcccattcgagtag

SEQ ID NO: 198951 - DNA, 1215 bp, synthetic construct
  misc_feature 1..1215: note = Description of Artificial Sequence: Synthetic coding sequence
  source 1..1215: mol_type = other DNA
atgaacggctacgccgagttcccccccagccccagcaaccccaccaaggaaccagtggaaccccagccctcccaggttcctttacaagaagatgtggatatgtcctctggctcatcaggccacgagacaaacgagaattgtagcaccggcagggatagccagggttccgattgcgatgacagcggcaaggaactcgggatgctagtggagcccccagatgcccgacagagtcctgacacattttctttgatgatggctaaaagcgagcataatccttcaacatctggttgttcgtctgatcagtcctcaaaggtggatactcataaggaacttataaagactttgaaggagttgaaggttcacctgccggcagacaaaaaggctaaagggaaagcaagtacactagccaccctgaaatatgcgctgaggtcggtgaaacaggtcaaggccaacgaggaatattaccagttgttaatgagttcggaggggcacccttgcggcgcagatgtaccttcatataccgtggaggaaatggagtccgtcacatcggagcacatagtgaaaaatgccgacatgtttgctgtggcagtgtctctcgtcagtggaaagatcttatatatttccgatcaggtggcgagtatcttccattgcaaaagggacgcgtttagcgacgcgaagtttgtggagttcctcgcgccacatgacgtgggagtctttcactcattcacatccccttacaaactgccattatggtcaatgtgctctggtgcggatagctttacccaggagtgtatggaagagaagtcattcttctgtagggtaagcgtgcggaaatcccatgaaaacgagattcggtaccaccccttccggatgacaccttatctggtgaaggttcgcgatcagcagggtgccgaatcccaactttgttgtctgctgctcgcagagagggttcactccggctacgaagctcctcgcatccctccagagaaacgcatttttacaactacccacacacccaactgtcttttccaggatgtggacgagtccccagcagttaggcgggctgcgttccggctgttttcacactccgtctcccgaccagagaggcgggtgcaccacgtgggacatcagctagtccaactccatcagccgatggagcaggagaatctactccaccattgggaggcgcagtctcagggtggaccattcgagtag

SEQ ID NO: 198952 - DNA, 330 bp, synthetic construct
  misc_feature 1..330: note = Description of Artificial Sequence: Synthetic coding sequence
  source 1..330: mol_type = other DNA
atgaacggctacgccgagttcccccccagccccagcaaccccaccaaagagcccgttgaaccacagccaagtcaggtccctttacaggaggatgtggacatgagttctgggtcctctggtcacgagacaaacgagaactgcagtacagggcgcgattcccagggatctgactgcgatgattcaggtaaagagctgggaatgctcgtcgaaccccctgatgccagacaatcccccgatacattctccctaatgatggctaagtctgagcacaacccctccaccagtggctgttccagcgaccaatcctccaaagtcgacactcataagtag

SEQ ID NO: 198953 - DNA, 1452 bp, synthetic construct
  misc_feature 1..1452: note = Description of Artificial Sequence: Synthetic coding sequence
  source 1..1452: mol_type = other DNA
atgaacggctacgccgagttcccccccagccccagcaaccccaccaaagagcctgtagagccacagcccagccaggtgcctcttcaggaggacgtagatatgtcctcagggagctcaggccatgaaacaaacgaaaattgtagtacaggcagagattcccagggaagtgactgcgacgacagcgggaaggaattgggcatgttagtggagcctcccgatgctcggcagtcccccgacactttcagtctcatgatggccaaatccgaacacaatccaagcacaagtgggtgcagtagcgaccagtcctccaaggttgatacgcataaagaattgattaaaactctgaaggaactgaaggtgcatctaccagctgataagaaggcgaaaggaaaagcgtccaccctggctacattaaaatacgctttacggtccgtaaagcaggtgaaagctaacgaggagtactaccaactgctgatgagttccgaaggccacccttgtggggcggacgtcccatcctacaccgtcgaggagatggaatccgtaactagtgaacatatcgtgaagaatgcagacatgtttgccgtcgccgtctccctggtttcagggaagattctgtacatctcggatcaggtggcgagtattttccactgtaagcgagatgcattttccgatgccaagttcgtggaattcctggcacctcacgatgtgggagtcttccactcgttcaccagcccgtataagctgcctctatggtccatgtgtagcggagcggattctttcacgcaggaatgcatggaagagaagtccttcttttgcagggttagcgtcaggaaatcccacgaaaatgagatccgctaccatccctttcgcatgacaccgtatctcgtcaaagtgcgagatcagcagggagcagagtctcaactgtgctgcctgctcctggccgagagggtccatagcggatacgaggctcctagaataccacccgagaagagaatcttcaccaccacccacacacctaattgcctgtttcaggatgtggatgaacgcgctgtccccttgctgggctatctgcctcaagatctgatcgagacgcccgtcctggttcagttgcaccctagtgaccggcctttaatgctagccatccacaaaaaaattttgcaaagcggcggccagcctttcgattactcccccattcggtttcgcgccaggaacggcgagtacataactctcgatacctcatggtcatcatttatcaacccatggtctcgcaagatttcttttatcatcgggcgccataaagtgcgcgtgggccccctcaatgaagatgtattcgcggcccatccatgtacggaggagaaggccttacatccctccatccaagagctgacagagcagatccaccggctgctgcttcaggtcggagtagtgccggcatgccccccacctcgttag

SEQ ID NO: 198954 - DNA, 2340 bp, synthetic construct
  misc_feature 1..2340: note = Description of Artificial Sequence: Synthetic coding sequence
  source 1..2340: mol_type = other DNA
atgatccccttcctgcccatgttcagcctgctgctgctgctgatcgtgaatcctataaacgccaataaccattacgataaaattctagcgcacagtcgcatacgtggcagagaccagggacccaacgtttgcgcactccagcagattctgggaactaaaaagaagtatttcagtacgtgcaagaattggtataaaaaatctatttgcgggcagaaaacaacagtgctgtacgagtgctgtcccggatatatgagaatggagggcatgaaggggtgccccgccgtcctcccaattgaccacgtatacggcaccctcggcatcgtcggcgctactacaacgcagagatattcagacgcaagcaagctgcgagaagagattgaaggtaaaggctcctttacctatttcgcccctagcaacgaggcctgggacaatctcgattcagacattagaagagggctggaatccaacgtcaacgtcgagctgctgaacgcactacacagccacatgatcaataagcggatgttgaccaaggaccttaagaacgggatgattatacctagcatgtacaacaacctaggactctttatcaatcactaccccaatggagtcgtgaccgtgaattgcgccagaatcattcacggcaatcaaattgctacaaacggcgtagttcacgtgatagatcgagtgttgacacaaatcggtacttcgatacaagattttatcgaggccgaagatgacttgtcaagctttcgcgccgctgccataaccagcgatatacttgaggccctgggaagagacggccacttcacactttttgcccccactaacgaggcatttgaaaaactgccaaggggcgttctggaacgcattatgggcgacaaggtggcctctgaggccctcatgaagtaccatattcttaataccctgcaatgctctgaaagcataatgggcggggcggtcttcgagaccctggaagggaacactatcgagataggctgtgatggcgattctatcactgtgaatgggatcaagatggtaaataagaaggacattgtgaccaataatggggtcatccacctgatcgatcaggtccttatccccgattccgcaaagcaagtaatcgaattggcaggaaagcaacaaaccactttcacggatctggtagcgcagttaggtttggcgagtgccttaaggcctgacggtgaatacaccttgttggcgcccgtcaacaatgccttttccgacgatactctgtccatggatcagaggcttctgaagttgatattgcaaaatcacatcttgaaggtgaaggttggcctgaatgaactgtacaatgggcagattttggagacgattggagggaagcagttgcgagtcttcgtgtatcgaactgccgtgtgcatcgagaattcctgtatggagaagggatctaagcaggggagaaatggcgcgattcatattttcagggagatcattaagcctgcagaaaaaagtctgcacgagaagctgaagcaggataaacgtttttctacatttctctcactcctcgaagccgctgacctcaaagagcttttaactcaacccggggattggaccctcttcgtgcctactaatgatgcattcaaaggcatgacctctgaagaaaaggaaatactaatccgggacaagaatgctctgcagaacatcatcctgtaccacctgacccccggcgttttcataggaaaaggattcgagcccggagttaccaacattctgaagaccactcagggatctaagatattcctgaaggaggtgaacgatacactgctggtcaatgagctgaaaagcaaggagtcagacatcatgactaccaacggtgtgattcacgttgtcgacaaattgttatatcccgctgatacccccgtcgggaatgaccagctgcttgagatactgaataagcttattaaatacatccagatcaagtttgttcggggaagcacctttaaggagatccccgtaaccgtctacaagcctattattaagaagtacactaaaattatcgatggagttcctgtcgagattaccgaaaaagagacgcgcgaagaaagaatcataacaggccccgagattaaatatacacggatctccacaggagggggagagacggaggagaccttgaagaaactcctccaagaggaagtgaccaaagtgaccaaatttattgagggcggggacggacatctgtttgaagatgaggagataaagcgattattacagggtgatacccccgtgcgtaagctgcaggccaacaagaaggtgcagggctcacgtcggcggctgcgcgagggacgatctcagtag

SEQ ID NO: 198955 - DNA, 2430 bp, synthetic construct
  misc_feature 1..2430: note = Description of Artificial Sequence: Synthetic coding sequence
  source 1..2430: mol_type = other DNA
atgatccccttcctgcccatgttcagcctgctgctgctgctgatcgtgaacccaatcaacgccaataatcattatgacaagattcttgctcactctaggattagaggtcgcgaccagggtcctaatgtgtgtgccttacagcagatcttaggcacaaaaaaaaagtacttttccacatgtaagaattggtacaagaaatccatctgtggacagaagaccacggtactatatgagtgctgtcctggatatatgcgcatggagggcatgaaggggtgtcctgccgtactcccaatcgatcacgtctatggcactctgggaatagtaggtgctacgactacacagcgatactccgatgcttccaagctgagggaggagatagaggggaaaggctcatttacatacttcgcccctagcaacgaggcctgggacaatctggactcagatatccgacgggggcttgagtcgaatgttaacgtggaactattaaatgccctccacagccacatgattaacaagcgcatgctcacgaaggaccttaaaaacggtatgataattccgagtatgtataataacttgggcctctttattaatcattatcccaacggtgtggtgacggtcaactgtgcacgaatcattcacggcaaccagatcgctactaacggagtggtgcatgtgattgaccgtgttctgactcaaataggcacatccatccaggacttcattgaggctgaggacgatctgtcttctttcagagccgcagccattacttcagacatcctggaagctctgggacgagatggccactttacacttttcgcgccaacaaacgaagcattcgagaagctgcccaggggggttctcgaaagaatcatgggcgataaagtcgcttcagaggcgctgatgaaataccacatcctgaacacactgcaatgtagcgaaagcataatgggaggtgcggtctttgaaacactcgagggaaataccattgagatagggtgtgatggtgattccataacagtgaatggcattaaaatggtgaacaagaaagacattgtgactaacaacggggtgattcacttaattgatcaggttttgatccctgattctgctaaacaagttatagaactggctgggaaacagcaaactacctttaccgacctggtggctcaactcggcttagcgagcgcccttcggccagatggcgagtacactctcttagcgccagtgaataacgccttttcggacgacaccctgtcgatggaccagagactcctgaagctgatccttcaaaaccatatactaaaggtgaaggtagggctgaatgagctatataacggacagattttggagaccattggcgggaagcaactgcgagtgttcgtgtaccggaccgctgtctgcatcgagaattcctgcatggagaaggggtcaaagcagggaagaaacggagcaatacatatctttcgcgagattattaaacctgctgagaagtctctccacgagaaactcaaacaggacaagaggttttcaacattcctttcgttgttagaggctgccgatctgaaagagctgctgacccagcccggagattggactctgtttgtgcccacaaacgatgccttcaaaggcatgacatctgaagagaaggagatcctgatcagagacaagaatgcgcttcagaacataattctctatcatctgacccctggggtgtttatcggcaaagggtttgaaccaggggtgacaaatatactgaaaacaacccagggaagtaaaatctttctgaaagaagtaaatgatacgttactggtgaatgagcttaagtccaaggaatcagacattatgacgactaatggagtcattcacgttgtggataagcttctttaccccgccgatacgccagtagggaatgatcagctgctggagattttaaataaactgatcaaatacatacagataaaatttgttagagggtccacttttaaagagatacctgttaccgtgtataggccgaccctgacaaaggttaaaattgagggcgagcctgaatttagattgattaaagagggcgagacaatcaccgaggtgatccacggtgagcctattattaaaaagtacacaaagattattgacggagtcccagtggagattacagaaaaagaaacgcgggaggaacgcattatcacaggccccgagattaagtacacccgtatcagcacagggggtggcgaaacggaggagaccctgaagaagctgctgcaggaggaggtgaccaaggtcacgaagtttattgaggggggagacggacacctcttcgaggatgaggagattaagaggttactccagggggataccccagttaggaagctacaggcaaacaaaaaggtgcagggctctaggagacgattgcgggaaggcagaagtcagtag

SEQ ID NO: 198956 - DNA, 2511 bp, synthetic construct
  misc_feature 1..2511: note = Description of Artificial Sequence: Synthetic coding sequence
  source 1..2511: mol_type = other DNA
atgatccccttcctgcccatgttcagcctgctgctgctgctgatcgttaatcctattaacgccaataatcattatgacaagattctcgctcactcgcggattcgtgggcgggaccaaggacctaatgtgtgcgcccttcaacaaattctgggcacaaagaaaaagtatttttccacatgcaagaattggtacaaaaagtcaatctgtggacagaagactactgtcctttatgaatgctgtcccggctatatgagaatggaaggcatgaagggctgccctgctgtgttacccatcgaccacgtctatggcaccctggggatcgtgggagccacgacaacacagaggtactcggatgcatccaagctgcgcgaggagatcgaggggaaaggttctttcacatatttcgccccgagtaacgaagcttgggacaatctggacagcgacatacgacgcggactcgagagcaacgtgaatgttgaattactaaatgccctccactcccacatgatcaacaagaggatgcttactaaggatcttaaaaacggcatgatcatcccctcaatgtacaataacctaggtttattcattaaccactaccccaatggcgtggtaacagttaattgtgcaagaataattcatggtaatcaaatcgccaccaacggcgtcgtgcatgtgatcgacagggtactgacccagataggcacgtccatccaggatttcatcgaagcagaggatgacctgagctccttccgagctgcggctatcacttctgacatcctggaggcactaggtagagacggccacttcactctgttcgcccctacaaacgaggccttcgagaagttgcctagaggagtactcgaaaggattatgggtgacaaagttgctagcgaggcgttgatgaaataccacatcctcaacactctgcaatgctctgagagcattatggggggagctgttttcgagacactggaaggcaacaccatcgagattggatgcgacggagacagcataaccgtgaacgggatcaagatggtgaataaaaaagatatcgtgaccaacaacggcgtcattcacctgattgatcaggtgctgatacctgactcagctaaacaggttatagaactggcaggaaagcagcagactacatttaccgatctcgtggcccagctcgggctggcttctgcccttaggccagatggggaatacaccctcctcgccccagtgaacaatgcttttagtgacgatacactctccatggatcagaggttgctcaaacttatcctgcagaatcatatcctcaaggtcaaagtcggactgaatgagctctataacggacagatactcgagacgattggcggtaaacagctccgtgtgtttgtgtatcggaccgcagtctgcattgagaatagctgcatggaaaagggctctaagcaggggaggaacggtgcgattcacatctttagagaaatcattaaacccgcggagaagtctttgcatgagaagctgaagcaggataagcggttctcgacgttcctcagtcttctcgaagccgcagatctaaaagagctgttgacccaacccggcgactggaccttgttcgtgcctacgaatgacgcttttaaggggatgacctctgaagagaaagagatcctgattcgcgacaagaacgctctccagaatatcatcctgtatcacctgacccctggcgtcttcatcggaaagggcttcgagccgggggtcacgaatatactgaagactactcaggggtcgaagatctttctcaaagaagtgaatgatacgttgctcgtgaacgaactgaaaagcaaggaatccgatataatgactactaacggggtgattcacgtggtggacaaacttctgtatcctgccgatacccccgtgggcaacgatcagctcttggagatcctgaacaagctgattaagtacatacagattaagttcgtcaggggttctacctttaaagaaatccctgttaccgtgtacacgacaaaaatcattacaaaggtagtggaaccgaagattaaggtgatcgaaggaagcttgcagccaatcattaagacagaaggcccaacgctgacaaaggtgaaaatagaaggggagccggagttcagactaatcaaggagggggaaactatcacagaggtgattcacggggaaccaataatcaagaagtacaccaaaatcattgacggcgtaccagtcgagattacagagaaggaaactagggaggaacgcattatcacaggcccagagattaagtacacccgtatttccaccggaggcggcgaaaccgaggagactctgaagaaactgcttcaggaggaagtgaccaaggtcacgaagtttatagaagggggcgatggacacctgttcgaagatgaggagatcaagcgtctgctgcaaggcgacaccccagttcggaaattgcaggcgaataagaaagtccagggatctagaaggcgtcttagagaaggccgctcccagtag

SEQ ID NO: 198957 - DNA, 2427 bp, synthetic construct
  misc_feature 1..2427: note = Description of Artificial Sequence: Synthetic coding sequence
  source 1..2427: mol_type = other DNA
atgatccccttcctgcccatgttcagcctgctgctgctgctgatcgtgaatccaattaatgccaacaaccactatgacaagattcttgcccattcccgaatacgcggcagggatcaggggcctaatgtgtgtgctcttcagcagatcctcggaactaaaaaaaaatacttcagtacttgcaagaattggtataaaaagagtatatgcggtcagaaaacgacagttctatatgagtgctgtcctggctatatgcgcatggaaggtatgaaaggctgccccgccgtgctgcccattgatcatgtatatggaacactgggaatcgttggagctacaactactcagcgttattctgatgctagtaagctcagggaagagattgaaggcaagggcagctttacctactttgcgcccagtaacgaagcctgggacaacctcgatagcgacatcaggaggggtttagaatccaatgtgaatgttgaattactgaacgcactgcactctcacatgatcaacaagcgcatgctgacaaaggatctgaagaatggcatgatcatccctagcatgtataataacttagggttgtttattaatcattatcccaatggcgtggtaacagtcaattgtgctcgtattatccacgggaatcagatagccacaaatggagtcgtacatgtgatagacagagtcctgacccaaatcggcacaagcattcaggattttatagaggcagaggatgacctttcttcttttagagccgccgctattactagcgacattctcgaagctcttggtcgagacggccacttcacattgttcgcccctacgaacgaggctttcgaaaagctcccccgaggagtgctggagaggattatgggagacaaggtcgcctccgaagccctgatgaaataccatattctgaataccctccaatgctccgagtcaatcatggggggtgcggtcttcgaaaccctggaagggaacaccattgaaattggatgcgatggggacagcatcacggtgaatggcatcaaaatggtcaacaagaaagacattgtcacgaataacggagtgatccatcttattgaccaggtgcttatccccgacagcgccaagcaggtgattgaattagccggcaagcagcagactacttttaccgatctcgtagcacagctcgggcttgcctctgcactgaggccagacggagagtatacactcctcgcgcctgtcaacaatgcattctcagatgacacactaagtatggatcagagactgcttaaactgatccttcagaatcacattctgaaggtgaaagttggcctgaatgagctttataatggacagattctggagaccataggaggaaagcagctgcgtgtcttcgtgtatcgtacggctgtttgtattgaaaacagttgtatggaaaagggtagtaaacaggggcgtaacggcgctatccatatttttcgggagataattaagccagcggaaaaatctctgcatgagaaactcaaacaggacaaaagattcagcacctttttatccctgctggaagcagctgatcttaaggagcttctcactcaacctggagactggactctgtttgtgcccacgaacgacgccttcaaaggcatgacatccgaggagaaggaaattctaattagagacaaaaatgcgcttcagaatatcatcctttaccatctgacacccggcgtgttcattggcaagggtttcgaaccaggtgtgacgaacatactcaagacgacccaaggctcaaagattttcctgaaggaggttaacgataccctgcttgtgaacgagctcaagtccaaggagtctgacatcatgaccacaaatggagttatccacgttgttgataagctcttgtacccagccgacacacctgtgggcaacgaccagctcctagaaatactgaacaaactcattaagtatattcaaataaagtttgtgaggggctctacctttaaggagattcctgtgacagtgtatacgacaaagatcatcaccaaggtggttgaaccaaagattaaagtgatcgaaggcagcctgcagcctatcatcaagacagaaggtccaacactcaccaaggtcaagatcgagggcgagcccgagtttcgtttgatcaaggagggcgagactataacagaggtcatacatggcgaacccataatcaaaaagtataccaagatcattgacggggtccccgtggaaatcaccgagaaggagacccgcgaggaacgcattatcaccggcccagaaattaaatatacacgcatctctactggtgggggggagacagaagagaccttaaaaaagctcctccaagaggatactcccgtgcgcaagctgcaggctaataaaaaggttcaggggtcacggaggcgtctgagagaaggaagatcacagtag

SEQ ID NO: 198958 - DNA, 834 bp, synthetic construct
  misc_feature 1..834: note = Description of Artificial Sequence: Synthetic coding sequence
  source 1..834: mol_type = other DNA
atgcggatggagggcatgaagggctgccccgccgtgctgcccatcgatcatgtctatgggaccctgggcatagttggagctacgacaactcaacgttactctgacgcgtccaaactgagagaggagatagaaggaaaggggtcctttacatatttcgcccctagcaatgaggcctgggataatctggatagcgatatcagacggggcctggagtccaatgtgaatgtcgaactcctgaacgctctccatagccacatgataaataagagaatgcttacaaaagacctcaagaacgggatgattatcccctccatgtataacaaccttggcctgttcattaaccactatcctaacggcgtagttactgtcaattgcgctcggataattcatggaaatcagatcgcaacaaacggggtcgtccacgtgattgaccgagtgctgactcagataggcacatctatccaggacttcattgaagctgaggatgacctgagttccttcagagctgctgcaatcacttcggatatcctagaagctctcggacgggatggacacttcacgctcttcgcaccaactaatgaggccttcgagaaactgccgcgtggcgtgctggagcggatcatgggcgacaaggtcgcttcggaagcactgatgaaataccacatcctgaacacactgcaatgcagtgaatctattatgggcggcgccgtttttgaaacactcgaaggcaacacaattgagataggatgcgacggcgactctatcacagttaatggaattaaaatggtaaacaaaaaggacatagtaaccaattggtgcgacccttttgactag

SEQ ID NO: 198959 - DNA, 2346 bp, synthetic construct
  misc_feature 1..2346: note = Description of Artificial Sequence: Synthetic coding sequence
  source 1..2346: mol_type = other DNA
atgatccccttcctgcccatgttcagcctgctgctgctgctgatcgtcaatcccattaatgctaataaccattacgataagatactggcacattcacgaattcggggtagggatcagggcccaaacgtttgcgccctgcagcagattctgggtacaaagaagaaatatttcagcacctgcaagaactggtacaagaaaagcatctgcggacagaagacaacagtgctttacgagtgctgtccaggctatatgagaatggagggcatgaagggctgtcccgccgtcttgcccatagatcacgtgtacggcaccctgggcattgtcggagcaacaaccactcaacggtactccgacgcatccaaactgagagaagagatcgaggggaaagggtcttttacctacttcgcacccagcaatgaagcctgggacaacctggatagcgacattaggcgcggacttgagagtaacgttaatgtcgagctgctaaacgctttgcattcacacatgattaacaaaaggatgctaactaaagatctgaagaacggcatgatcatcccaagcatgtataataacttgggactgtttataaaccattatccaaatggcgtggttaccgtcaattgtgcccggattattcacggtaatcaaatcgccaccaacggggtggtgcatgtgatcgatagagttctgacccagatcgggaccagcatccaagatttcattgaagcagaggatgacctgtcatcctttcgagcagcagctattacaagcgacatcctagaggcattgggacgcgacggccatttcaccttattcgccccaactaacgaagcgtttgagaaactacccagaggcgtcttagagcgcattatgggcgacaaggtcgcctcagaggccctgatgaagtaccacatcttgaacactctccagtgctctgagtctatcatggggggtgccgtgtttgaaacactggaagggaatacaattgaaatcgggtgtgatggggactctatcacagtgaatggaattaaaatggtcaataagaaagatattgttactaataatggagtgattcatttgatcgatcaagtgcttatccctgacagcgccaagcaggtgatcgagttagccggcaaacagcagacaacctttactgaccttgtggcgcagctgggtctggccagtgctctgaggcctgacggagagtatacattgctggcaccggtgaataacgccttttctgacgatactctgtctatggaccagcgcctgctcaaactcattctccagaatcacattctgaaggtgaaagtgggcctcaatgagctgtacaatggtcaaatccttgaaaccatcggtggtaaacaactgcgcgtgttcgtgtacaggacggctgtgtgcatcgagaatagctgcatggagaagggctcaaagcagggccggaacggggcaattcacatttttcgtgaaataattaaaccagccgagaagtctcttcatgagaagctcaaacaggataagcgcttctccacattcctgagtctgctcgaggccgccgacctgaaggagctactaacacagcccggagattggacattgtttgtacctaccaatgacgctttcaaaggtatgacgtccgaggagaaggagatcctcattcgggataaaaacgccttacagaatataattttataccacctcacccctggcgtgtttattgggaagggctttgagcccggagtcactaacattcttaagaccactcagggctccaaaatcttcctcaaggaggtgaatgatacactcctcgtaaacgaacttaagagtaaggaatcagacatcatgaccactaatggagttatccacgtggtggataagcttctttaccctgcagatacccccgtaggcaacgatcaactgcttgaaattttaaataaattaatcaagtatatccagatcaagttcgtccgggggtcgacatttaaggaaatcccagttacagtatataggcccaccctgacgaaagtgaaaatcgaaggagagccggagtttcgactgatcaaggaaggggagaccattactgaggtgattcatggagagccaattattaagaagtatactaagatcattgatggcgtccctgtggagattaccgagaaggagacacgtgaagaacgcattatcaccgggcctgagatcaagtacacacgaatctctacgggcggtggagagacggaggagaccctgaagaagctgctacaggaagacactcctgtaaggaagctccaggcaaataagaaggtccagggttcccgcaggcgcttgcgagaaggacgatcccagtag

SEQ ID NO: 198960 - DNA, 2250 bp, synthetic construct
  misc_feature 1..2250: note = Description of Artificial Sequence: Synthetic coding sequence
  source 1..2250: mol_type = other DNA
atgatccccttcctgcccatgttcagcctgctgctgctgctgatcgtgaatcctatcaatgccaacaaccactatgacaaaatcttagcacatagccgcattcgtggaagagatcaaggtccaaacgtttgcgccttacagcaaattctcggcactaagaaaaaatacttctctacatgtaaaaattggtataagaagtccatatgtgggcaaaagactacagtgctgtacgaatgttgtcctggctatatgagaatggaaggcatgaaaggctgccctgccgtacttcctatcgatcacgtgtacggcaccctcggcattgtgggggccactacaactcagaggtattcggatgcgagtaagctgcgcgaggagatcgaaggtaagggctcttttacatactttgccccatccaacgaggcatgggacaacctggattccgatattcggagaggacttgagtctaatgtcaacgtagaattgctgaatgcactgcacagccacatgattaacaagaggatgttgacgaaagatctcaaaaatgggatgataattccaagcatgtataataatctggggttgtttataaatcactaccccaacggtgtggtgacagtgaattgcgcaaggatcatccacggcaaccagatcgccactaacggtgtggtgcacgtaattgaccgagttttgactcagataggcacctccatacaggattttatcgaagcagaagacgacctctcctcgtttcgggctgcagctatcaccagcgatatcttagaagctctggggcgagacggacatttcaccctgtttgccccgaccaacgaggccttcgagaagctgccaaggggagtcctggagaggattatgggcgacaaggtggcctcagaggcgctcatgaagtatcatatactcaacactcttcagtgcagtgagtccattatggggggagctgtcttcgagaccctggaaggaaatacaattgagataggatgcgatggagactcaatcacagtaaacggaatcaagatggtcaacaaaaaagatatagtcacaaataacggtgtaatccacctgatagaccaggtgcttattcctgatagtgcaaagcaggtaatcgaactagctggcaagcagcagactacatttacagatttggtagcccagctggggctggcgagcgctctgaggcctgatggcgagtatacgctgttggccccagtgaataatgctttttccgacgatactctgtcaatggatcagcggctgctaaagctgatccttcagaaccacattctgaaagtgaaagtggggctaaatgaattgtacaacggtcaaatactggaaacgattggcggtaagcagctccgggtctttgtttaccgtacagccgtttgtatcgaaaactcttgcatggaaaagggcagcaagcaaggacgaaacggtgccatccacatcttccgagagattatcaagcctgccgaaaagtcactacacgaaaagctcaaacaggacaagcgattttcaacatttttatccttgctggaggcagcagacctgaaagagctgcttacacaacctggcgactggacattgttcgtgcccaccaatgatgcctttaaagggatgacgagtgaggaaaaggagatactgattcgcgataaaaatgccttgcagaacataattctgtatcacctcacgcctggcgtctttatcgggaaagggtttgagcctggcgttaccaatattctgaaaaccacacaaggaagcaaaatctttctaaaggaggtcaacgacacgttactggtgaacgaactcaagtccaaggagtctgatatcatgacaactaacggggtgattcatgttgtggacaaacttctctaccccgctgacactccagtgggcaacgatcagctcctggagattctgaacaagctgataaaatacatccagatcaaattcgtgagggggagcacatttaaggagatacccgttaccgtctattcccccgagatcaaatatacgcggatctccactggaggaggtgagacggaggaaacgctcaaaaagcttttgcaggaggaggtcacaaaagtgaccaagttcattgagggcggtgatggacacctattcgaggatgaagagatcaagcggttgttgcagggggatacacccgttaggaagctgcaggccaataagaaagtccaggggagcaggcgccggcttcgggagggtagatctcagtag

SEQ ID NO: 198961 - DNA, 399 bp, synthetic construct
  misc_feature 1..399: note = Description of Artificial Sequence: Synthetic coding sequence
  source 1..399: mol_type = other DNA
atgagcaacaagttcctgggcacctggaagctggtgagcagcgagaatttcgacgattacatgaaggcgcttggggtgggtctggccacacggaaacttgggaacctggccaagccaactgtgattatttcgaagaaaggcgatatcataactatccggacagagtctaccttcaaaaacacagaaattagttttaagctgggtcaggaattcgaggagactacagctgataaccgcaaaacaaagagcatcgtcacattgcagcgcgggtccttgaatcaggtgcagaggtgggatgggaaggaaactacaatcaagaggaagttggtcaacgggaagatggtggcagagtgcaagatgaagggcgtggtctgcacgagaatctatgagaaagtgtag

SEQ ID NO: 198962 - DNA, 483 bp, synthetic construct
  misc_feature 1..483: note = Description of Artificial Sequence: Synthetic coding sequence
  source 1..483: mol_type = other DNA
atgctgctgctgctgctgagcatcatcgtgctgcacgtggccgtgctggtcttgctttttgtttctacaatcgtgtcacaatggatcgttggtaacgggcacgcgaccgacctgtggcaaaattgttcaaccagctctagtggaaatgtgcaccattgtttttcatccagcccaaacgagtggctgcagagcgtccaagccaccatgatcctatccatcattttttcaattctgtcactttttctattcttctgccagctttttacactgaccaaaggtgggcgcttttatatcaccgggatctttcagatcctggctggactttgcgtaatgtcggccgcagctatttataccgtcaggcaccctgagtggcacctcaactctgattacagttacggcttcgcttacattttggcatgggtagcattcccattagcactcttgagcggagttatttacgtaatcctgcgtaagcgggagtag

SEQ ID NO: 198963 - DNA, 357 bp, synthetic construct
  misc_feature 1..357: note = Description of Artificial Sequence: Synthetic coding sequence
  source 1..357: mol_type = other DNA
atgctgctgctgctgctgagcatcatcgtgctgcacgtggccgtgctagtactgctgttcgtgtcaaccattgtctcacagtggatcgtcggaaacgggcacgccactgacctgtggcagaattgctccacctcttcttccggcaatgtacaccattgcttttcctcatctccaaacgagtggctccagtccgtgcaggctactatgatcctttctatcatctttagcattttgagtttattcctcttcttctgccaactgtttaccctgactaagggcggccggttttacatcaccggaatttttcagatcctagcggaatcaaattcctcgcagatgtgtggttatagagactag

SEQ ID NO: 198964 - DNA, 483 bp, synthetic construct
  misc_feature 1..483: note = Description of Artificial Sequence: Synthetic coding sequence
  source 1..483: mol_type = other DNA
atgctgctgctgctgctgagcatcatcgtgctgcacgtggccgtgcttgttttgctgttcgtttcaaccattgtgtcacagtggatcgtgggcaacggtcacgccacggacctgtggcagaattgttcaacttccagtagcggcaacgtccatcactgtttctctagctcccccaatgagtggcttcagagcgtgcaagccacaatgatcctgtcaatcatcttctctatactgtctctattcctgttcttctgtcagctgttcaccctcacaaagggcggaagattttatatcaccgggatctttcagatactggcaggactctgtgttatgtctgctgccgctatttacaccgtgagacatcccgagtggcacctgaatagcgattacagctacggctttgcttatatactcgcttgggttgccttcccgctggcactactgtctggcgtcatttacgtgatcctccggaagcgtgagtag

SEQ ID NO: 198965 - DNA, 450 bp, synthetic construct
  misc_feature 1..450: note = Description of Artificial Sequence: Synthetic coding sequence
  source 1..450: mol_type = other DNA
atgctgctgctgctgctgagcatcatcgtgctgcacgtggccgtgttggtgctgctgttcgtaagcaccattgtttcacagtggatcgtcggcaacggccatgctaccgacctctggcagaattgttccacaagttcatcgggaaatgtgcatcactgcttttccagcagcccaaacgaatggctccaaagtgtacaggcaacaatgattctgtctatcatcttcagtatcctgtccctatttttgtttttttgtcagctctttaccctgaccaagggtggccgattttatatcacagggatcttccagatcctggccggcctgtgcgtgatgtccgccgccgccatttatactgtgcggcatcctgagtggcatctgaattcggactattcttttccattggcacttctgtccggcgttatctatgtgatcctgagaaaacgagaatag

SEQ ID NO: 198966 - DNA, 1413 bp, synthetic construct
  misc_feature 1..1413: note = Description of Artificial Sequence: Synthetic coding sequence
  source 1..1413: mol_type = other DNA
atgagccaccaccccagcggcctgcgggccggcttcagcagcaccagttacaggaggactttcggtcctccaccgtctctgtccccaggagcgttcagctactctagttcttccagatttagtagtagtagattgctggggagtgcatctccgagcagcagtgtgagattgggcagttttaggagccccagagctggcgctggtgctctcctgcgtttgcctagcgagagactggacttttccatggccgaagcactgaaccaggagtttctggccactcgcagtaacgagaagcaagaactgcaggaattgaacgaccggttcgctaattttatcgaaaaggtgagattcttagagcaacagaacgctgccctgcggggggaattatcccaggcaaggggtcaggagcctgctcgggccgaccagctctgccagcaggagctgcgcgagctgaggcgtgagctcgagctgctgggcagggagcgcgatagagtacaggtggaaagggatggcctcgcagaagatttagcagcgctgaagcaacggctggaagaggagactcgcaaaagggaagatgctgagcacaacctggtcttattccgcaaggatgtggacgacgcgactctttctcgcttagagttggaaaggaaaatcgaaagcctcatggacgagattgagttcctcaaaaagttacacgaggaagagctccgcgaccttcaagttagtgttgagtcacagcaagtccaacaagtcgaagtggaggcaactgtaaaaccagagctcactgcggcattgcgggatattcgcgctcagtacgagtcaatcgccgcgaaaaacttacaggaggctgaagaatggtacaaaagtaagtacgctgacctatcagatgccgctaataggaatcatgaggcactgcgccaggcaaagcaggagatgaatgagtcccgccggcagattcagtccctgacgtgcgaggtggacggtctccgagggacaaacgaagccctgttgcgacaattgcgagagctggaggaacagtttgccctggaggccggtggttaccaggccggggccgctagactggaagaagagttacgccagctgaaagaagagatggcaaggcatcttagggagtaccaagaacttttgaatgtgaaaatggctttggacatagagattgcaacgtataggaaattactggagggcgaagagtcccggatcagtgtgcccgtgcacagtttcgccagtttgaatatcaagaccaccgttcccgaggttgaaccgccccaggactctcactctagaaaaaccgtgctgataaaaaccattgaaacgcgcaatggagaagtggtaaccgagtctcaaaaggagcagcggtcagaactggataagtcatctgcccacagctactag

SEQ ID NO: 198967 - DNA, 603 bp, synthetic construct
  misc_feature 1..603: note = Description of Artificial Sequence: Synthetic coding sequence
  source 1..603: mol_type = other DNA
atgggccaggagttcagctgggaggaggccgaggccgccggcgagatcgatgtagccgagttgcaggagtggtacaagaaattcgttatggagtgccccagtggcaccttgtttatgcacgagttcaagagattctttaaggtgaccgacgatgaggaagcatcacagtacgtggaaggaatgtttcgcgcattcgataagaatggggataataccattgactttctggagtacgttgccgcgcttaatctggtgctgcggggaactttagagcataagttaaagtggacttttaaaatttatgacaaagatggcaacggttgcatagatcgcctcgaacttttaaacatcgtcgagggtatctaccagctgaagaaggcatgcaggagagaactgcagacggagcagggccaattattgaccccagaggaggtggtagataggatcttcctactggtggacgagaacggcgatgggcagctctccctgaacgaatttgtggagggtgccagaagggacaaatgggttatgaagatgctgcagatggacatgaatccttcttcctggttagcccagcagaggcgcaaatctgccatgttttag

SEQ ID NO: 198968 - DNA, 1104 bp, synthetic construct
  misc_feature 1..1104: note = Description of Artificial Sequence: Synthetic coding sequence
  source 1..1104: mol_type = other DNA
atgtggagcgagggccggtacgagtacgagcggatcccccgggagcgggctccaccccgtagccacccgagcgatggatataaccgtctggtgaatattgttcccaagaagccccccttgctcgaccgacccggggaggggagttataataggtactacagtcacgtagactatcgggactatgacgaagggaggtccttttcacatgatagaagatccggtcctccacacagaggagatgaaagcggctatcgatggactagagatgatcactcggcaagccggcagcccgaataccgggatatgcgagatggttttagaaggaagtccttctactccagccattatgccagagagaggagcccttataaacgggacaatactttcttcagggaatccccagtcggcaggaaagatagcccgcactctaggtccggcagctccgttagcagtcgctcctactctcctgagaggagtaagtcttatagtttccatcaaagtcaacaccggaaaagtgtgagacccggggcaagttataagaggcagaacgaaggcaacccagaaagggacaaggagcggcccgtgcagtcattaaagacctccagagacacaagtcccagcagcggaagtgcagtgagcagttccaaggtgctggataagccctcaaggctgacagagaaggagcttgccgaggcagcatcaaagtgggcagccgagaaattggaaaagtctgacgaatcgaacctgcccgagattagcgagtacgaagcaggcagcacagccccattattcaccgatcagccggaagaaccagagtccaacacaacacatggcatcgagctttttgaagattctcaactaaccactcgttctaaagccatcgccagcaagacaaaggagatagagcaggtttacaggcaggactgtgagacttttggcatggtcgtgaagatgctaatagagaaagaccctagcctggaaaagtctattcagttcgccctgcgtcagaatctgcacgaaatcggcgaaagatgcgtcgaggaactcaagcatttcatagcagagtacgacacatcaacacaggattttggagagcccttctag

SEQ ID NO: 198969 - DNA, 1377 bp, synthetic construct
  misc_feature 1..1377: note = Description of Artificial Sequence: Synthetic coding sequence
  source 1..1377: mol_type = other DNA
atgtggagcgagggccggtacgagtacgagcggatcccccgggagagagctcctccgcggtcccatccctcagacggctacaaccgcttggtgaatatcgtgcctaaaaagccgcctcttttggacaggccaggagagggttcctataatagatactattcacatgtcgactatagagactacgacgaaggacgctccttcagccatgatcgaagaagtggaccgcctcaccgcggcgatgaaagtggctacaggtggaccagggacgatcattcggcaagtaggcaacctgagtaccgggatatgagggatggtttcagaaggaaatccttttatagttctcactatgcacgcgagcgcagcccttacaaacgtgacaacaccttctttcgcgaaagccccgtcggtagaaaggattctccacactccagaagtggtagcagcgtgagtagtcgcagctattccccggagcgtagcaaaagctacagcttccaccagtcacaacaccggaagagcgtgcgacccggggcctcctataaacgccagaacgaggggaatccggagcgtgataaggaaaggccagtgcaaagtctgaagacttccagggatacttctccttcatcaggctctgcggtcagttcttcaaaagtgctggacaaaccaagccgcctgacagagaaggaattggctgaagctgctagcaagtgggccgctgaaaagctggagaaaagtgacgagagtaacctgcctgagattagcgaatatgaagctggatcaactgctcccttgtttacagatcagccagaggagcccgaatcgaacacaacacacggcatcgagttatttgaggactcacagctgaccaccagatccaaagcgattgcttcaaagactaaagaaatcgagcaggtctacaggcaggactgtgagacatttggaatggtggtaaaaatgctgatcgagaaagacccctctcttgaaaagagcatacaatttgccttacgacagaatttgcacgagattgagagcgccggacaaacttggcaacaggtgccacccgtccggaacacagaaatggatcacgatggcactcctgaaaacgaaggcgaggagacagcccagagcgccccccagcctccacaggcaccacagcctttgcagccacgcaagaagcgtgtgagaaggaccacacagctccgaaggaccaccggagctcctgacattacctgggggatgttgaagaagactacccaagaagcagaaagaatcttgttacgtactcagacaccgttcacgcccgagaacctcttcctggctatgctaagtgtggtccattgcaattctcgcaaagatgtgaagcccgaaaacaaacaatag

SEQ ID NO: 198970 - DNA, 1125 bp, synthetic construct
  misc_feature 1..1125: note = Description of Artificial Sequence: Synthetic coding sequence
  source 1..1125: mol_type = other DNA
atggcctaccggcgggacgagatgtggagcgagggccggtacgagtatgagcgcattcctagggagagggcaccacctcgctcacacccgtctgatggatataatagactcgtaaatatcgtgcccaagaagccaccccttcttgaccgccccggtgagggttcttacaatcgctactacagtcatgtggattatagggattatgacgaaggcagaagctttagccacgaccgtcgatctggccctcctcaccgaggagacgaatcaggttataggtggacccgcgacgatcattcagccagtagacagccagagtacagggacatgcgggacggattcaggaggaagtcattttattcctcccactacgctcgagagcggtctccgtataaaagagacaacacgttttttcgcgagtctccagttggccggaaggacagccctcatagccggtctgggtcctccgtgtcaagcagaagttattccccggagagaagtaaatcctattctttccatcagtcccagcaccgcaaatccgtgaggcccggcgctagttacaaacgtcagaacgaaggcaatcctgaacgcgacaaggagcggcccgtgcaatctcttaaaacgtctcgtgataccagccctagcagcggttccgctgtttcttcttctaaagtcctcgataaaccctctagactgaccgaaaaggagctcgctgaagcagcaagtaagtgggctgcagaaaagctggaaaagtccgacgaatcaaatttacctgagatatctgaatatgaagctggatctacagcgcccctgttcaccgatcaacctgaagaacctgagtctaacaccacccacggaattgaactgtttgaagacagccagttaaccaccagatctaaagccattgcttcaaaaactaaggagatcgagcaggtgtatcgccaggactgcgaaacgtttggcatggtcgtgaagatgctcattgagaaagacccttctctcgagaaatccattcagtttgccctccggcagaacttgcatgagatcggcgagagatgcgtcgaggagttgaaacacttcatcgccgagtacgatacaagcacacaggactttggcgaacccttttag

SEQ ID NO: 198971 - DNA, 1305 bp, synthetic construct
  misc_feature 1..1305: note = Description of Artificial Sequence: Synthetic coding sequence
  source 1..1305: mol_type = other DNA
atgtggagcgagggccggtacgagtacgagcggatcccccgggagcgcgccccccccagatcccatcccagtgatgagagtggttaccggtggactagagacgaccattctgccagtaggcagccggaatatcgagacatgagggacggctttcgtagaaaaagcttctacagctctcactacgcccgggaacgcagcccctacaaacgggataatacctttttcagggaatctcctgtggggaggaaagattctccccactctcggtccgggagctctgtatcaagcaggagctattctccagagcgatcgaagtcctactccttccatcaaagccagcaccggaagagcgtcaggcccggtgccagctacaagcgacaaaacgaggggaaccccgagcgtgataaggagcggccagtgcagtctctgaaaacttcaagagatacttcaccaagctccggatctgcagtcagctcttccaaggtgctggataaaccaagtagactgacggagaaagaactcgctgaagccgcatcgaagtgggccgctgagaaattagaaaaatcagacgagtccaacctgcccgaaattagcgagtacgaggctgggtcaactgctcctctgtttaccgaccagcctgaggaacccgagagcaacaccacccatggtatagagctctttgaggattctcagttaacaactcgcagcaaggctatcgcgtccaaaacaaaagagatcgaacaggtttatcgacaagactgtgagacctttggcatggtggtgaagatgttaattgagaaagatcctagtcttgaaaagagcattcagttcgccctccggcaaaacctgcacgaaattgagtccgccggccagacttggcagcaagtgcctccagttagaaatactgaaatggatcacgatggcacaccggagaatgagggggaggaaacggcccaatctgctttgttcggattccagcacgacgccagcaatcatacaatcgtcggactgggacccaatcaggttccagaaatgaaagagaccaccttgcaggctccccaaccgccccaagcacctcagccactccagcccaggaagaagagggtgcgaagaaccacccagctgcggaggacaaccggggctcctgatatcacctggggaatgttgaagaagaccacacaggaagccgagaggatactgcttcgaacccagactcctttcacacctgaaaacttatttctggcaatgctgtccgtggtgcactgtaacagtcggaaagatgtcaaacccgagaataaacagtag

SEQ ID NO: 198972 - DNA, 1047 bp, synthetic construct
  misc_feature 1..1047: note = Description of Artificial Sequence: Synthetic coding sequence
  source 1..1047: mol_type = other DNA
atgtggagcgagggccggtacgagtacgagcggatcccccgggagagagcacctccccgtagtcacccatcagacgggtacaatcggctggtcaatatcgttccaaaaaaaccaccgctcctggaccgtccaggagagggatcctacaacagatattactctcacgtcgactaccgggattacgacgaaggcagatcattttcacatgacagaaggtcaggtccccctcacaggggcgatgagagtggctataggtggactagagacgaccactctgctagtaggcagccagagtacagagacatgagagacgggttccggcggaagagcttttattcttctcactacgctcgagaacgcagcccgtacaaacgcgataatacctttttcagggagtcacccgtcggcaggaaagactctccccactctcgatcgggatcatctgttagcagtaggtcttacagccccgagcgctccaaaagttactcctttcaccagagtcagcacagaaataaggagagacccgttcaatcactgaaaacctctcgcgacactagccctagctctgggagcgcagtttcctcgagtaaggtactggacaaaccatcaagattgactgaaaaggagctcgccgaggcagccagcaaatgggcggccgagaagctcgagaaatcggatgagtccaacttgccagaaattagcgaatacgaggcagggagtaccgccccgctgtttaccgatcaaccagaggagccagaatctaatacgacgcacggtattgagctatttgaggacagccagcttacgacccggagtaaggctattgcctcaaaaaccaaggagattgagcaggtctaccgtcaggactgtgagaccttcgggatggtggtgaagatgttaatcgagaaggaccccagcctggagaagtccatacagtttgcattgcgccaaaatttgcacgagataggggagcgctgtgtcgaggagctgaagcattttatcgccgagtacgacacctcaactcaggattttggggagccgttttag

SEQ ID NO: 198973 - DNA, 486 bp, synthetic construct
  misc_feature 1..486: note = Description of Artificial Sequence: Synthetic coding sequence
  source 1..486: mol_type = other DNA
atggcctaccggcgggacgagatgtggagcgagggccggtacgagtacgagcggattccaagggaacgtgctccccctcgctcccacccatctgacggctacaacagactggtgaacattgtccctaagaaaccaccactactcgatcgccccggggaggggtcgtacaaccgctattattcacatgtggactatcgggactacgacgagggacgttctttttctcacgaccgccggagtggaccaccacaccgcggcgatgagtcaggctacagatggacaagggacgaccactcggcaagccggcagcctgagtaccgggatatgagggacggcttccggaggaagtccttttactccagccattacgccagggagcgctccccttataaacgtgataataccttcttccgcgagtcacccgtgggaaggaaagacagtccacactctcggtctggaagttccgtgtcctcaagatcctactag

SEQ ID NO: 198974 - DNA, 507 bp, synthetic construct
  misc_feature 1..507: note = Description of Artificial Sequence: Synthetic coding sequence
  source 1..507: mol_type = other DNA
atgtggagcgagggccggtacgagtacgagcggatcccccgggagcgggcccctccaaggtcacacccctctgacggctacaatcggttagtgaacattgtcccgaagaagccaccactgttggataggcctggagaagggtcatataacaggtattactcgcatgtcgactaccgtgactacgacgaaggacggagttttagtcatgatagacggtctggacccccacacagaggagacgagagtggctataggtggaccagagacgaccattccgcgtctagacagcccgaatacagagatatgcgggatgggttccggaggaaaagtttctacagctcacactacgctcgagagcggtccccctataagcgtgataataccttctttagagagtctcctgtggggagaaaggactcgcctcatagtagatccggatctagcgtgagctctcgctcttatagcccagaacggagcaagagctattcattccaccagagccagtag

SEQ ID NO: 198975 - DNA, 960 bp, synthetic construct
  misc_feature 1..960: note = Description of Artificial Sequence: Synthetic coding sequence
  source 1..960: mol_type = other DNA
atggcctaccggcgggacgagatgtggagcgagggccggtacgagtatgaacgtatcccacgtgaaagggcacctcctcggagtcacccgtctgatgagtcaggttaccgttggacccgggatgaccactcagccagccgccaacctgagtatagagatatgagggacggattcaggcggaagtcattctactcctcccattatgctcgggagcgtagcccttataaaagggataatacgttcttcagagagagtcctgtggggagaaaagattccccacactccagatcaggcagctccgtgagtagccgatcttacagccccgagcggtcaaagagctactcatttcatcagtctcagcataggaaaagtgtgagaccaggcgcgtcctacaagcgacagaacgaagggaaccccgaaagggataaagagaggcctgttcaaagcctcaagacgagcagggatacaagcccctcttccggcagcgcagtgtctagctccaaagtgctggacaagccaagccggcttactgagaaagagctcgcggaggcggccagtaaatgggcggctgaaaagttggaaaaatctgatgaaagtaacctgccagaaattagcgaatacgaagccggcagcaccgccccactgtttacagaccagcctgaggaacctgaatccaatacaacacatggcatcgagttatttgaagactcacaactaactacccgtagtaaggccatagcatccaagactaaagagattgaacaagtgtacagacaagactgcgagacctttggtatggtggtgaagatgcttattgagaaagacccttcattggaaaagtccatacagtttgccctccgacaaaacctccacgaaatcggagagcgctgtgtggaagagcttaagcactttattgccgaatacgatacttctactcaggacttcggcgaacccttctag

SEQ ID NO: 198976 - DNA, 5271 bp, synthetic construct
  misc_feature 1..5271: note = Description of Artificial Sequence: Synthetic coding sequence
  source 1..5271: mol_type = other DNA
atgaacagcctgttccggaagcggaacaagggcaagtacagccccaccgtccagaccagaagcatatctaataaggaactctccgaactgatcgaacagctacagaaaaatgccgaccaggtagagaagaacattgtcgatacagaggctaagatgcagtccgatctggctcgccttcaagagggtagacaaccagagcacagagatgtcacactgcagaaggtgttggacagcgagaagcttttgtacgtcttggaagcagacgctgccatcgccaagcacatgaaacatccgcagggcgatatgatcgccgaggacatcagacaactcaaagagcgggtcactaatcttagaggaaaacataagcagatctatcgtcttgcagtcaaagaggtggaccctcaggtgaactgggccgcactcgtcgaggagaaactcgataaattaaacaaccagtcttttggcacagatcttccgctcgttgatcaccaggtggaggaacacaatatcttccataacgaagtgaaggcaatcggcccccacttggcaaaggacggcgacaaagaacaaaactccgagctgagagctaaatatcaaaaactcctcgccgccagtcaggctagacagcaacacctcagcagtctgcaggattatatgcaaagatgtaccaacgaactgtactggctagatcagcaagctaaggggcggatgcaatacgactggagcgacaggaatctcgactaccctagtcgacgtcgtcaatacgagaactttatcaaccgcaacttagaagctaaggaagaacgtatcaataagttgcactccgaaggtgatcagctattagcagctgaacaccccgggcgtaactccatcgaagcacacatggaggccgtccacgccgactggaaagagtacttgaacctactgatatgtgaggagtcccacctgaagtacatggaagactatcaccagtttcacgaggacgtgaaagatgcccaagagctgctgcgtaaagtggattctgacctgaatcagaaatatggacctgattttaaggaccgctaccagatcgagttactcttgcgggagttagacgatcaggagaaggtgctggacaaatacgaggacgttgtccagggcttgcagaaacggggccagcaggtggttccactgaagtacagaagggagacacccttaaagcccattcccgtagaggccctctgcgattttgagggagaacagggcctcattagcagaggttattcgtacactctacaaaagaataatggggagagttgggagcttatggacagtgctggaaacaaactcatcgcacccgctgtgtgtttcgtgattccaccaacagatcccgaggcactcgctctggcagactctcttgggtcccagtacaggtcagtgcgtcagaaagctgcggggtcaaagcgcacactgcagcagcgatatgaagtcctgaagaccgagaatcccggagacgcttccgatctgcaggggcgccagctccttgctggacttgacaaggtggccagcgatctggatagacaggagaaagccatcactggcatcctcaggccccctctcgaacaaggccgagccgtgcaggacagcgccgaacgggccaaggatctgaagaatattaccaacgagctcctgagaattgaacccgaaaaaacgaggtccacagccgaaggggaagcattcatacaagcattgccaggctcaggcacaactccactgctgagaacccgtgtggaggatactaacaggaagtatgaacaccttctgcaactgctggacctggcacaggagaaggtggatgttgccaacagactggagaagagcctccagcagtcttgggaactgctcgctacacacgagaatcatctaaatcaagacgacactgtgccggaaagctcacgcgtcctggacagcaaaggacaagagctggctgctatggcctgtgaacttcaagcgcagaaatccctgctcggagaggtggagcagaatcttcaggctgcaaagcagtgcagtagcacactcgcgtctagatttcaggagcactgccccgatctggagaggcaggaggccgaggtgcataaattgggacagagattcaacaacctccgccaacaggtggagagacgggctcaaagcctgcagagcgctaaggccgcctacgagcacttccatcgtgggcacgatcatgtacttcaattccttgtctcaatcccatcctacgagccccaggagacggactccctgagccagatggagacaaagctcaaaaatcaaaagaatttactcgatgaaatcgcttcccgggagcaggaggttcagaaaatctgcgccaattcccagcagtaccagcaggctgtgaaggattacgagctggaggccgaaaagttgagatcgctgctggatttggaaaatggcagacggtcccacgtgtcaaagagggcccgtctacagagtcccgctactaaagttaaggaagaggaggccgctctcgccgcaaaatttaccgaagtgtatgccatcaacaggcagcgcctgcagaaccttgagttcgccctgaatctgctgaggcagcagcctgaggtggaggtgactcatgagactctgcagcgtaaccggcccgatagtggcgtggaggaagcctggaagatccgcaaggagcttgacgaagaaactgagagacgcaggcaactcgaaaacgaagttaaatccacacaggaggagatttggacactcagaaaccagggacctcaggagagcgtggttagaaaagaagtgctgaagaaagtgcccgatcccgtgctggaggagtcattccagcagctgcaacgcaccctggctgaagagcagcacaagaatcagctgttacaggaggaactggaggccctccaactccagttacgcgcgctggagcaagaaacgcgagacggaggtcaagagtacgtcgtcaaagaagtgctgcggatcgaacctgatcgtgctcaggccgacgaagtgttacagttaagggaggaactagaagccttaaggagacagaaaggtgcacgggaagccgaggtgttactgctccagcagagagtggcagccctggcagaggaaaagtcccgggcgcaggagaaggtgaccgagaaagaagtggtcaagctgcaaaacgacccacagctagaggccgagtatcagcagctgcaggaagatcatcagcgacaggaccagctccgagagaaacaggaggaagagctgagctttttacaggataaattgaaacggcttgagaaagaaagagcaatggccgagggcaagataaccgttaaggaggtgctgaaagtagagaaagacgccgcaaccgaacgagaagttagtgacctgacaagacagtacgaggacgaggccgctaaagccagggcatcccagcgcgagaaaacagaactgctgcgtaaaatttgggctctcgaagaagaaaatgccaaggtggtcgtgcaagaaaaagttagagagatagtgcggcctgaccccaaagccgagtccgaagtggccaacctcaggctagaactagttgaacaagagcggaagtataggggggccgaggaacaactcaggtcttatcagtctgagttggaggccctgcggaggagaggcccacaagtggaagtgaaagaggtcactaaggaggtcattaagtacaaaacagatcccgaaatggagaaggagctacagagactgcgtgaagaaatcgttgacaaaaccagactgatcgaacggtgcgatctggagatttaccaacttaaaaaggaaattcaggccctgaaggacacaaaaccgcaagttcagaccaaggaggttgttcaggagatcctgcaattccaggaagacccgcaaacaaaggaagaggtggcctccttacgggctaagctttcagaagaacagaagaagcaggtcgatctggagcgggagagggcttcacaggaggagcagatagcccgtaaggaggaggagctctctagagtgaaggagcgggtggtccagcaagaggtggtccgctatgaggaggagccaggcctacgcgcagaagccagcgccttcgctgagagcattgatgtggaattacgccagattgataagcttagggccgagcttcggagactgcagcgtagaagaacggagctagagcgtcagctggaagaactggaacgagagcgccaggccagacgggaagcggaacgcgaggtgcaaagattacagcagcggctggctgctctggaacaggaggaagccgaggcgcgagagaaggtgacccacacacagaaagtcgtcctgcaacaggatcctcagcaggcccgggaacacgccctcttaaggctccaactcgaggaagaacaacacagaaggcagttgttggagggtgaactggagacactcaggcgaaaactcgccgctttggagaaggcagaggtcaaggagaaggtggtcctcagcgagtccgttcaagtggaaaagggagatacagaacaggaaatccagaggttaaagtctagcctcgaggaagaatctcggagcaagcgggagcttgacgttgaagtgagcagactggaagctaggctgagcgaactggaatttcacaacagcaagagcagcaaagagctcgatttccttcgggaggagaaccacaaattgcagctggaaagacagaacctccagctggaaacgcgtcggcttcagtctgagatcaacatggcagccacggagacaagggacctgagaaatatgacagtggctgactcgggaaccaaccacgatagtaggctgtggagtctcgagcgggaactggatgatctgaagaggctctctaaagataaggacttagagatcgacgagttgcagaagcggctgggatccgttgccgtcaagagggagcaacgggagaatcaccttagacgaagcatcgtggtgatacatccggacactggcagagaattgtcccccgaggaagcacaccgagccggtcttatcgactggaatatgtttgtgaaattgagatcccaggagtgtgactgggaagaaatctcagtaaaagggcctaatggcgaatcttcagtcatccatgacaggaaatccgggaagaaatttagcatcgaagaagcactacagtctgggcggctcacgcctgcccagtatgaccgttatgtgaacaaggatatgtccattcaggagctggcggtactcgtctccgggcaaaaatag

SEQ ID NO: 198977 - DNA, 4440 bp, synthetic construct
  misc_feature 1..4440: note = Description of Artificial Sequence: Synthetic coding sequence
  source 1..4440: mol_type = other DNA
atggccaagcggagccggggccccggccggcggtgcctgctggccttggtgctcttttgtgcttggggtaccctggcagtcgtggcccagaagcctggtgctggctgcccttctcgctgcctgtgttttaggactaccgtacgatgcatgcacctacttcttgaggcagtccctgccgtcgcgcctcagacctcgattctcgatctgcgctttaacaggatccgggaaatccaaccgggcgccttcaggaggttacggaacctcaatacccttcttctcaataataatcagatcaaaaggattcctagtggcgcgtttgaggatctggagaatctgaagtacctctatctgtataaaaatgaaattcagtctatagaccggcaggccttcaaagggttggccagcctggaacagctgtatctgcactttaatcaaatagagacgttggatcctgattcctttcaacacttaccaaagctcgaaagattgttcttgcacaacaatcggattacccatctggttcctggcacattcaaccatttagaatctatgaagcgactccgcttggactccaatactttacactgcgactgtgagatcttgtggctagcagacctgttaaaaacgtatgccgaatctgggaatgctcaggctgcggctatctgcgaataccctcgccggatacagggccggtccgtggccactatcacacccgaggagctgaactgtgagcgaccccgcattacaagtgagccgcaggacgcggatgtcacttcagggaacacagtgtacttcacctgcagagctgagggtaacccgaaaccagagatcatttggctgagaaacaataatgagctgtctatgaagaccgattctcggctgaatctgctggacgatggaacactaatgattcagaacacgcaagagactgaccagggaatctaccagtgtatggcgaagaatgtggctggcgaagtgaaaacccaggaggtcacgctgagatacttcggctccccagcccgacctacattcgtaattcaaccacaaaataccgaggtactagttggagagtccgtcactttggaatgtagcgccacgggacatcctcctccacggatttcttggacccgaggggatcgcacgcccctgccagtggatccacgggttaatataacaccttctggtggcctctatatccagaatgtcgttcagggggattccggagagtacgcctgcagtgccactaataatatcgattctgtccatgccacggccttcataattgtccaggctttgccacagttcaccgtgactccccaggatcgcgtagttatagaagggcagaccgtcgatttccagtgcgaagctaagggaaacccacctcccgtgatagcatggaccaagggtggctctcagcttagcgtagaccgaagacatttggtgctgtcctctggcacacttagaatctcgggcgtagccctgcacgaccagggacaatacgagtgtcaagctgtgaatattattggtagtcaaaaggtggtcgcccaccttaccgtgcagccccgcgtgacaccagtcttcgcatccattccgagcgacaccacggtagaagtcggcgccaacgtgcaactgccatgctcctcccagggcgagcccgaacccgcaatcacctggaataaggacggggtccaagtgaccgaatctggaaaattccatataagccctgaagggtttctcaccatcaacgacgtggggcctgcagacgctggacggtatgagtgcgtggcacggaatacaataggctctgcctcggtgtccatggtactgtctgtgaacgtgccggatgttagtaggaacggcgacccttttgtagctacgtctatcgtcgaggcgattgccacagtggaccgcgctattaattcgactaggacacacttgttcgatagtcggccccggtcaccgaatgatctgctggcccttttccggtacccgagggatccttatacagtcgaacaggccagagccggcgagattttcgaacgcacccttcagctgattcaggaacacgtgcagcacgggctgatggtggatctgaatggaaccagttaccattataatgatttagtgagcccccagtaccttaacctgattgctaatctatcagggtgcacggcccacaggcgcgttaataactgctcagacatgtgtttccatcagaagtaccgcacacacgatggcacatgtaataacctgcagcacccaatgtggggagcatccttgacagccttcgaacgcctgctcaagtcagtgtatgagaacggttttaataccccccggggtatcaatcctcacaggctttacaacgggcacgccctgcccatgccccgcctggtttctacaaccctaataggtaccgaaactgtgacccctgacgaacaatttacacatatgctgatgcagtggggtcagttcctggatcatgacctggacagtacagtcgtggcactgtctcaggcacgcttctccgatggccaacactgcagcaacgtatgttctaatgatcctccgtgttttagtgtcatgatccctcctaacgactccagagcacggagcggggcccggtgcatgtttttcgttcgaagctcacccgtatgtgggtctggcatgaccagcctcttaatgaattcggtgtatccacgtgaacagattaaccagttgacatcttatattgatgccagcaacgtttacggtagcaccgaacacgaggcacggagtattagggatttggctagtcacagggggctgcttcgccagggaatagtgcagcgatccgggaagccgctgctgccatttgcaaccggacctcctactgagtgtatgagagatgaaaatgagtctccaattccgtgcttcctggccggagatcaccgtgccaacgaacagcttggcttaacttcgatgcataccctgtggttccgagagcataatcgtatcgcgaccgaactactgaagctcaacccgcattgggatggcgacaccatctactacgagacccggaagatagttggagcggagattcagcacatcacctaccaacattggttgcctaaaatcctcggcgaagttggaatgcgaaccttgggggaatatcatggatatgatcctggcatcaacgctggaatcttcaatgctttcgctacagcagcattccggttcggccacaccttggtaaaccccctgctttaccggctcgacgagaatttccagccaatcgctcaagaccaccttcccttgcacaaagcctttttcagccccttcagaattgtgaatgaagggggcattgatccactgctgcgcgggctgtttggcgtagccggtaagatgcgggtcccctctcagcttctcaacacggaactgacggagaggctcttctccatggcccacacagtggcactggacctcgctgctatcaacatacagagaggacgcgatcacgggatccccccctatcacgattacagggtctattgcaacctttcggctgctcatacattcgaagatctgaaaaacgaaattaagaaccccgagatccgcgaaaagttgaaaagactatacgggagtactctgaacatagacctgtttcccgcgttagtggttgaggatctggtgccaggcagcaggctcggacctacactgatgtgtcttcttagcacacagttcaagaggctgcgcgacggagacagactatggtacgagaatccgggtgtattcagccctgcccagctgacccaaatcaagcaaaccagcctagctcgcattctgtgcgataatgcagacaatattaccagggtccagagtgatgtgtttcgagtggccgagtttccgcacgggtacggctcttgtgatgaaattccccgcgtggatctccgcgtctggcaggactgctgtgaagattgcagaacgcggggccagttcaacgccttttcctaccatttccggggccggcggtccctggaattttcttaccaagaggacaaaccaacgaagaaaacacgcccccggaaaattcccagcgtaggtcgtcagggtgagcatctgagtaatagcacctccgcctttagcacgaggtccgacgcatcaggaaccaacgactttcgggagtttgtgctcgagatgcagaaaaccattacagatctgagaacgcagataaagaagctagagagcagactgagcactactgagtgcgtcgacgccggcggcgaaagccatgcaaacaacactaagtggaaaaaagacgcctgcacgatttgcgagtgcaaagatgggcaggttacttgctttgttgaggcctgtcctcctgctacttgcgcagtccccgtgaatattcccggcgcgtgttgcccagtttgcttgcagaaacgggccgaggagaagccctag

SEQ ID NO: 198978 - DNA, 2172 bp, synthetic construct
  misc_feature 1..2172: note = Description of Artificial Sequence: Synthetic coding sequence
  source 1..2172: mol_type = other DNA
tgacggggccccggccggcggtgcctgctggccctggtgctgttctgtgcgtggggaaccctagcggtggtggcccaaaaacctggagctggttgcccgagtcgttgtctttgctttagaacgactgtgaggtgcatgcatctactgctagaggctgttccagcagtcgcccctcagacctccattctcgacttaaggttcaatagaatacgagagatacagcctggcgccttccgtcgtctgcggaatttgaatactctgctgctgaataataaccagattaaaaggattccgagcggggccttcgaagatctggagaacctgaaatatctgtatctctataaaaacgagatccagagtattgaccgccaggcattcaagggtctcgcgtcacttgaacagctgtatcttcactttaatcagatcgagacactggatccggacagttttcagcatcttcctaagctggaacgcctcttcctacacaataacagaattacacacctcgttcccggaacattcaatcacttagaaagcatgaaacgcctgcgactcgacagtaacacattgcactgtgattgcgagatcctgtggttagccgatctgctgaagacatatgcggagtctggaaacgctcaggcagcagctatctgtgagtaccccagacggattcagggacgatctgtcgcaacaattacgcctgaggagttaaactgtgagaggcctcggattaccagcgagccccaggatgcggacgtgacatcagggaacactgtgtacttcacctgtagggccgaaggtaaccccaaaccagaaataatttggttacggaacaataatgagctgtccatgaagaccgattcccggctcaacctgctggatgacggtacactgatgatacagaatacacaggagaccgatcagggtatctatcagtgcatggccaaaaatgtggctggagaggtcaaaactcaagaagttacattacggtactttggcagcccagcacgccctactttcgtcattcaaccgcaaaacaccgaagtgctggttggcgagagtgtaacactggagtgctcagccacagggcatccgcctccaaggatcagttggaccagaggggatcgcacacctctaccagttgaccccagggtgaacatcaccccttccggaggtttgtacattcagaatgtggttcagggcgacagcggagaatatgcatgtagcgcaaccaataacattgacagcgtccacgctaccgcattcattatcgttcaggcattgccgcagttcacggtgaccccacaggaccgggttgtcatagaagggcagaccgttgactttcagtgcgaggctaaagggaatccgccgccagtcatagcctggactaaaggcggctcccagctgagtgtggataggagacacctggtgctcagcagcggtacattgcgcatcagcggcgtcgctttgcatgaccagggccagtacgaatgtcaggcagtgaacatcattggaagtcagaaggtagtggcccatctgactgtgcagccccgcgtgactcctgtcttcgcctccataccatccgacactactgtggaggttggcgctaatgtgcaactgccgtgtagctctcagggtgagcctgagccggccatcacttggaataaggatggtgtccaggtcaccgagtctgggaagttccacatctcccctgaagggttcctgacaataaacgatgtggggcccgcagacgccgggcgttacgagtgcgtggctcgtaacaccatcggctccgcctctgtgagtatggttctgagtgtgaatgtcccagatgtgtcacgaaatggagacccttttgttgctacaagcatagttgaagccatcgcaaccgtagatcgggcgatcaactcaacacgtacacacctattcgactctcgcccccgctcgcccaacgaccttttagctctcttccggtatccaagggacccgtacaccgtcgagcaagctcgcgccggtgaaatcttcgaaaggaccttgcagcttattcaagagcatgtgcaacacggcttgatggttgatctcaatggtacctcacagtgccagagtctgtttttcctcttacacggcctttcaaacggggtggagcacgcctcagtcaaatctcactcatag

SEQ ID NO: 198979 - DNA, 771 bp, synthetic construct
  misc_feature 1..771: note = Description of Artificial Sequence: Synthetic coding sequence
  source 1..771: mol_type = other DNA
atggccgccgccgtgggccggctgctgcgggccagcgtggcccggcacgtgagtgcaatcccttggggaattagcgccacggccgcactgcgccctgcggcttgtggaagaacaagtctgaccaatttactatgttctgggtctagccaggccaaattgttctctacctctagctcctgtcacgcccctgccgtgacccagcatgccccctactttaaagggacagctgttgttaacggtgagttcaaagacttgtccttagacgatttcaaaggtaagtacctggttctatttttttaccctctcgattttacattcgtatgcccaacagagatcgtggctttttctgacaaagccaatgaatttcacgacgtcaattgtgaagtggtggccgtatccgtggattcgcatttcagccacctcgcttggattaacactccccgaaaaaacggaggcctcggtcacatgaatatcgcactgctttctgatctcacgaagcaaatttctcgggactatggggtcctactcgaaggatccggcctggctctgaggggcctctttataatagaccccaatggggttatcaaacatctgagcgtcaatgatctccccgtagggaggagcgtcgaggaaacactcagacttgtgaaggccttccagtacgtggaaacacatggggaggtgtgccccgctaactggacaccagacagtcccaccatcaagcccagcccagcggcctccaaagaatattttcaaaaggtgaatcagtag

SEQ ID NO: 198980 - DNA, 717 bp, synthetic construct
  misc_feature 1..717: note = Description of Artificial Sequence: Synthetic coding sequence
  source 1..717: mol_type = other DNA
atggccgccgccgtgggccggctgctgcgggccagcgtggcccggcacgtaagcgccattccatggggaatctccgctacagcggcactgaggcccgccgcctgcggacgaacatctctgaccaatctgctctgttcgggcagcagccaggctccctacttcaagggcacagccgtggtgaatggcgaattcaaggacttgtccctcgatgactttaaaggcaagtacctggtgctctttttctatcctctggatttcactttcgtgtgccccaccgaaatagtggcattctcagataaggccaacgaatttcatgatgtcaactgcgaagtcgttgcagtgtctgtggacagccatttctctcacctggcatggattaatacccccagaaaaaacggaggacttggccatatgaatattgccctactcagcgatctcacaaagcaaatcagcagggactatggagttcttctggaaggatctggcttggccttgagggggctatttatcatcgatcccaacggcgtcattaagcatttgtctgtcaatgatctacccgtgggccggtctgtggaggagacccttcggctggtgaaggctttccagtatgtcgaaacacacggagaggtgtgccctgccaactggactcctgactctccaaccataaagccatcaccggcagccagcaaagagtatttccagaaggtcaatcaatag

SEQ ID NO: 198981 - DNA, 645 bp, synthetic construct
  misc_feature 1..645: note = Description of Artificial Sequence: Synthetic coding sequence
  source 1..645: mol_type = other DNA
atgggcctggccggcgtgtgcgccctgcggcggagcgccggctacattctggtggggggggcaggcggacagtctgcggccgctgccgctagacgatacagcgagggcgaatgggcttctgggggagttagatcctttagcagggccgcagctgcaatggcccctatcaaagtgggggacgccatccccgcggtggaggttttcgagggcgagcctggcaataaagtgaacctggccgagctcttcaaaggaaaaaaaggcgtgctattcggggtccctggggcttttacgccagggtgtagtaagacccatctcccaggtttcgttgaacaggctgaggctcttaaggcaaagggtgtgcaggtagttgcatgtctttctgtgaatgacgcctttgttactggggagtggggccgcgctcacaaagcggaaggaaaagtcaggttgctcgcggatcccactggggccttcgggaaagaaaccgatcttctccttgacgactcccttgtctcgattttcgggaaccggcgtctgaagcgttttagtatggtcgtccaagacgggattgtaaaagctttgaacgtggagcccgatggcactggccttacctgctcactcgccccgaacattatatctcaactgtag

SEQ ID NO: 198982 - DNA, 378 bp, synthetic construct
  misc_feature 1..378: note = Description of Artificial Sequence: Synthetic coding sequence
  source 1..378: mol_type = other DNA
atgggcctggccggcgtgtgcgccctgcggcggagcgccggctacattctcgtcgggggcgccgggggtcaatcggccgcagctgccgctaggaggtattctgaaggagaatgggcatcggggggggtcagatcatttagccgggctgcagcggccatggcccctatcaaggtccgcctcctggccgatccaacaggcgccttcggcaaagagacagatctgctcctcgatgactctctcgtctctatttttggcaaccggaggctgaaacgtttcagcatggtagtccaggacggcattgtgaaagccctgaatgtggagcctgatgggaccggtctgacgtgttccctcgcccccaacatcatatcacagctatag

SEQ ID NO: 198983 - DNA, 513 bp, synthetic construct
  misc_feature 1..513: note = Description of Artificial Sequence: Synthetic coding sequence
  source 1..513: mol_type = other DNA
atgggcctggccggcgtgtgcgccctgcggcggagcgccggctacatcctggtgggcggtgcggggggtcagagcgccgccgccgccgccaggaggtattctgagggcgagtgggcctccggaggtgtgcgctctttttctcgcgcagcagccgccatggcccctatcaaggtgggggatgctatcccggcggtagaagtgttcgaaggagaaccagggaacaaggtgaatctggccgagttgtttaaggggaagaaaggagtgctgtttggtgtgcctggcgctttcacccccggctgttccaaggtgagactcctggccgatcccactggtgcttttggaaaggaaaccgatcttctcttagacgattccctcgtatcaatcttcgggaacaggcgactaaagaggtttagcatggtcgtccaggacggtatcgttaaggcattaaacgtagaaccggatggcactggcctcacctgttctctcgctcctaacatcatctcccagctatag

SEQ ID NO: 198984 - DNA, 675 bp, synthetic construct
  misc_feature 1..675: note = Description of Artificial Sequence: Synthetic coding sequence
  source 1..675: mol_type = other DNA
atgcccggcggcctgctgctgggcgacgtggcccccaacttcgaggccaatacaacagtgggtagaattcgttttcatgacttccttggggactcctggggcatcctgttttcgcacccccgcgatttcactccagtgtgcacaactgaactgggtagggccgcaaagcttgcccctgagttcgccaagaggaatgtcaaactcatagcactgtccatcgactctgtagaggatcacctagcatggtccaaagacatcaatgcctacaactgtgaggaacccactgagaagcttcccttccctatcatcgacgatagaaacagggaactagcaatcctgctgggcatgctggaccccgccgagaaagatgaaaaggggatgcccgtgaccgcacgtgttgtgttcgtgttcgggcccgataaaaagctcaagctttcaatactctacccggcaaccactggacgcaattttgatgagatcctacgagtggtcatctcgctgcaactgaccgccgaaaaacgagtggctacacctgtagactggaaggacggtgactcagtgatggtccttccgacaatccccgaggaagaggccaagaaactgtttcctaagggcgtgttcactaaagaactgccaagtggcaaaaagtacctgcgatataccccacaaccttag

SEQ ID NO: 198985 - DNA, 3852 bp, synthetic construct
  misc_feature 1..3852: note = Description of Artificial Sequence: Synthetic coding sequence
  source 1..3852: mol_type = other DNA
atgtggggcagcgaccggctggccggcgccggcggcggcggcgccgcagtgaccgtcgcctttactaacgccagggattgttttctccacctgccacggcggctcgtggcccagctgcatctgctccagaaccaggctattgaggttgtctggagccatcagcctgccttcctctcttgggtggaaggaagacacttctctgaccagggagagaatgtagccgaaatcaaccgacaagttggccagaaacttgggttatcaaacggcggccaggtgttcctgaagccttgcagccatgtcgtcagttgtcagcaggtggaggtggaacccctgtctgccgatgactgggaaattctcgaactgcacgcagtttcactcgaacagcatttgctggaccaaatcagaatcgtatttcctaaagctattttcccagtgtgggtcgaccaacagacgtatatatttatccagattgtcgcccttattccagccgcttcctatgggcgactggaaacagacaccaaactgctgatacagcccaagactcgcagagctaaggagaataccttctctaaggctgatgcagaatacaaaaagttacattcttacggccgtgatcagaaaggaatgatgaaggagctgcaaacaaaacagcttcaaagtaataccgtcggaataacagagtcaaatgagaatgagtccgagatcccggttgactcatcctccgtggctagtttatggacaatgataggctccatcttctcatttcagtctgagaagaaacaggagacgagctgggggcttaccgaaatcaacgctttcaagaatatgcaatctaaagtagtcccactcgacaatattttcagagtgtgcaagagtcagcctccgagcatctacaacgccagcgccacctcagttttccacaagcattgtgcgatacacgtgttcccttgggatcaggaatacttcgacgtcgagcctagctttactgtgacctatggcaagctggttaaactcctgtcccccaagcagcagcagtctaaaactaagcagaatgtgctgtcccctgagaaggagaaacaaatgtcagagccactagatcaaaagaaaatcaggtccgaccataatgaagaggatgaaaaagcatgcgtgttacaggtggtgtggaatgggcttgaggaactgaacaacgcgatcaagtatactaagaatgtcgaggtactgcatctcggcaaggtctggatccctgatgatcttaggaagaggctcaatattgaaatgcacgccgttgtgaggattacaccggtcgaggttacaccgaagatcccccgttctctcaaactgcagcctcgggagaatttacctaaagatatctccgaagaagatattaaaacagtcttctatagctggttgcagcagagtacaaccacgatgctgcctctggtgattagtgaggaggagttcatcaaactggaaacaaaggacgggctgaaggaattcagtcttagcattgtgcactcatgggagaaggagaaggacaagaacatttttttgttatctccaaatctcctgcagaagacgacaatccaggtgctcctggacccaatggtgaaggaagagaacagcgaggaaatcgatttcattctgcctttcctcaaactgtcctccctcggaggagtgaacagcctgggagtgagcagcctggaacacatcacccactccttgctcggtagacctctcagccgccaacttatgtccctcgttgctggactgagaaatggagccctccttctgacaggcggcaaaggctccgggaagtcaacactcgctaaggccatttgtaaagaggctttcgacaagctggacgcccatgtggagagggtggattgtaaggctctgaggggcaagagacttgaaaatatccagaagacacttgaggtagccttttcagaggccgtttggatgcagccaagcgtcgtactcctggacgacctcgacttaattgctggtctgccagccgtgcccgaacacgaacactcgcccgacgctgtgcaatcccagcggctggcacacgccttgaacgatatgatcaaagaatttatcagtatgggaagtcttgtcgccttgattgccacgtctcagtcccagcaatccctgcaccctctgctcgtgtctgcccagggggtccacattttccagtgtgtgcaacatatccagccaccaaaccaagagcagcggtgtgagattttgtgcaacgttatcaagaacaagctggactgcgatattaataagttcaccgatttggacttgcagcacgtagcaaaagagaccgggggttttgtggcacgggactttaccgtgttagtcgatagggccatccactcccgcctatctcggcaaagcatctcaacaagggagaagttagtactcactacactcgacttccaaaaagcgctaagagggttcctgcctgccagcctgcgctctgtcaatctccacaagccaagagatctgggatgggataagattgggggattgcacgaagtcagacagatcctgatggacacaattcaactcccagctaagtatccagagctgtttgcaaacctgcccatccgacagcgcaccgggattctgctctacggaccccccggaactgggaaaactctcctcgctggcgtgatcgctcgcgagtcccgcatgaacttcatctcagtgaaggggcctgagctgctctccaagtacattggagcaagcgagcaagctgtgagagacatcttcattagggctcaggccgctaagccctgcatacttttcttcgacgaatttgaaagtatcgcaccacgacggggccatgacaacaccggcgttacagatagggtagtaaatcagttactaactcagctggatggtgtcgagggcctgcagggcgtgtatgtgctggccgcaaccagcaggccagacctgatcgacccagctctgcttcgaccgggtaggttagataagtgtgtctattgcccacccccagaccaagtgagtcgcctggagatactgaacgtgttgtccgactccttgcccctagccgatgacgtggatctgcagcacgtcgcttctgttaccgactcattcacaggcgccgatcttaaggccctcctttacaacgcacagctggaggctttacatggcatgttacttagcagcgggctacaggacggctccagttcctccgatagcgatctgagcctgagctccatggtgtttctcaatcactccagcggcagcgacgactccgctggggacggagagtgtggactagaccagagtctggtgtccctggagatgagcgaaatccttcctgacgaatccaaatttaatatgtaccggctttactttgggtcatcttatgagtcagaactcggaaacggtacaagctccgacctgagttcccagtgtctgtctgccccaagctctatgacccaggaccttcccggagtccccggcaaagaccaactcttctcccaaccacctgtactacggacagcgagtcaggaggggtgccaggaactcacccaggaacaaagagaccaactcagagccgatatcagcattataaaagggcgatacagaagtcagagcggcgaggatgaaagtatgaaccagcccggccccattaaaactagactcgcaatatctcaatcccatttgatgaccgcactcgggcacactcgccccagtataagcgaggacgactggaaaaactttgctgaattgtacgaatctttccagaatccaaaaaggaggaagaatcagtctggcaccatgttccggccagggcaaaaggtcacactagcatag

SEQ ID NO: 198986 - DNA, 3681 bp, synthetic construct
  misc_feature 1..3681: note = Description of Artificial Sequence: Synthetic coding sequence
  source 1..3681: mol_type = other DNA
atgtggggcagcgaccggctggccggcgccggcggcggcggcgccgcagtgacggtggcattcactaacgcccgggattgttttttacatctgccccggagactggtggcacagttgcatcttcttcaaaaccaggctatagaagtggtgtggtcacaccagccggccttcctgtcttgggtcgaagggagacatttcagtgatcagggggagaacgtcgccgagatcaatcggcaagtggggcagaaactaggattatccaatggagggcaggtgtttctaaagccatgcagccatgtagtgtcctgccagcaagttgaggtcgagcccctgtccgcagacgactgggaaatactggagcttcacgcagtgagcctcgagcaacatctgctggatcagatacgaattgtttttccaaaggccatcttccctgtctgggtagaccaacagacgtacatttttattcagatagtggctctaattcctgccgcttcatatgggaggctggaaactgacactaagctgctcatccagcctaagacgagacgggccaaggaaaacaccttcagcaaagctgacgcagagtataagaagttgcattcatacggacgcgatcagaaagggatgatgaaagagttgcagacaaagcagctacagagcaatacagtgggcatcaccgagtccaacgaaaacgaatcagaaattcccgtcgactctagttcagttgcttctttgtggactatgataggttccatattctcatttcaatcagagaagaagcaggagacatcctggggactgactgagatcaatgcctttaagaatatgcaaagcaaggtggttccactggataatattttcagagtgtgcaagagtcagccgcccagtatatataatgcatctgcaacttcagtcttccacaagcactgtgccattcatgtgtttccgtgggatcaggaatatttcgacgtcgagccatctttcactgtgacatatggcaagctggtcaagctgctgagtcccaagcagcagcagagtaagaccaaacagaacgttctgagcccagagaaggagaaacagatgagcgaacccctggaccagaaaaagatcaggagcgatcacaatgaggaggacgaaaaagcctgcgtcttgcaggtcgtctggaacggcctggaggaactgaataatgctataaaatacaccaagaacgtcgaggtgctgcacctcggcaaggtgtggataccggatgacctgagaaagcggctgaacatagaaatgcatgccgtggttagaatcacccccgttgaggttactccgaagattccaagatccctgaagctacagcctcgagagaacctcccaaaggacatcagcgaagaagacatcaagaccgtgttctacagttggttgcagcagtcaaccaccaccatgctcccactggttatttccgaggaagagttcattaagctggagacaaaggatggcctgaaagaattctccttgtctatcgtccattcatgggagaaggagaaggataaaaacatattcctgctaagtccaaatttgttgcagaagactaccattcaagtcctgttggatccaatggtaaaggaagaaaactcagaagaaatagatttcattttaccatttctgaagttgagttctctcggtggtgtgaatagtctaggagtctcatccctggaacatattactcacagcctcctggggaggcctctgagccgtcagctcatgtcacttgtcgcagggttaaggaacggggccttactgctcaccggcggaaaaggttcaggcaaaagcaccctcgctaaagccatctgtaaggaggccttcgacaagctcgatgcccacgtagagagagtcgactgtaaagcactgcgggctctcaacgatatgataaaggagttcataagcatgggatctctcgtggccctgattgcaacctctcaatctcagcagtctcttcacccactgctggtgtcagctcaaggagtccacatttttcagtgcgtgcaacatatccagccgcctaatcaggaacagcggtgtgaaatcctatgcaacgtcattaagaacaaattagattgcgacatcaataagtttacagacctagatcttcaacacgtggcgaaggaaactggggggttcgttgccagggactttaccgtgctggtcgatcgggcgatccacagtagactcagccgccagtcaatcagtaccagggaaaagctcgttttaacgacactcgatttccaaaaagcactccgcggcttcttaccagctagtcttcggagtgttaacttgcataagcccagagatttggggtgggacaagattggagggttacatgaggtgagacagattctgatggacacaatacagctgcccgcaaaatatccagagttattcgcaaatctgcccattaggcaacgaacagggattctgctttatggcccccctggcacaggtaaaacccttttggccggagtaatagcacgggagtcacgcatgaatttcatctccgtgaaagggcctgaacttctatcaaaatatattggggcatccgaacaggccgttcgcgatatctttatccgtgcccaggccgccaaaccttgcatccttttttttgatgagttcgaatctatagcaccacggagagggcacgacaatactggcgtcacagatagagtcgtaaaccagctccttacacagttagacggtgtggagggcctccaaggtgtttacgtcttggcagcaacttcccggcctgacttaatcgatcctgctctactgaggcccggaaggctggataaatgtgtatattgtcccccgccagatcaagtgagccggctggagatactgaatgtcctcagcgatagtttgcctctcgcagatgatgtcgatctgcagcatgtcgcttctgtgacagattcctttaccggggccgatttgaaggcactgctgtacaacgcgcaactggaagccctgcacgggatgctgttatcctctggactccaagatgggtcctccagctcggatagcgacttatcgctctcgagcatggtcttcttaaaccacagcagtggttctgacgactcagcaggagacggcgaatgtggactcgaccagagcctagtgtctctagagatgtccgaaatcttgcctgacgagtccaagtttaatatgtatcggctctatttcggcagctcctatgagtcggaattaggcaacggcactagctcagaccttagctcacagtgtctttcagcgccctcaagtatgactcaggaccttcctggagtgcccggaaaagatcagctcttttcgcaaccccccgtcctgcgcacagccagccaggagggctgccaagaactgacacaggaacagcgcgatcagctgcgggccgacatatccataatcaaaggtagataccgctcccaatccggcgaagatgaaagcatgaaccaaccaggaccaatcaagacaaggctggcaatttcacagtctcatcttatgaccgccttgggtcacacgcggccatcaataagcgaagatgactggaaaaacttcgccgagctttacgagagcttccaaaaccctaaacgacggaagaatcagtcgggcaccatgtttagaccaggacagaaagtgactcttgcgtag

SEQ ID NO: 198987 - DNA, 483 bp, synthetic construct
  misc_feature 1..483: note = Description of Artificial Sequence: Synthetic coding sequence
  source 1..483: mol_type = other DNA
atgagcctggtggccggcctgcggaacggcgccctgctgctgaccggcggaaagggatctggaaaaagcacgctagccaaggccatctgcaaggaggcttttgataaactggatgcccatgtcgaaagggtagattgcaaggccctccgggggaagcgcctggaaaacatccagaagacactagaggttgcattctctgaggccgtctggatgcaaccgtctgtcgtgctgttggacgatctcgaccttatcgccgggctgcctgcagtccctgaacatgaacacagcccagacgccgtacaatcacagcgcctggcccacgcactgaatgacatgatcaaggagtttatatctatgggttccctcgtagcgctcattgccacctcccagtcccagcaatccctgcatccgctgctggtgagtgcccaaggggtgcatatctttcagtgcgtccaacatatacaaccgccaaatcaaaattag

SEQ ID NO: 198988 - DNA, 1899 bp, synthetic construct
  misc_feature 1..1899: note = Description of Artificial Sequence: Synthetic coding sequence
  source 1..1899: mol_type = other DNA
atgtggggcagcgaccggctggccggcgccggcggcggcggcgccgccgtcacagttgccttcaccaacgcccgcgattgttttttgcaccttcccaggaggctggttgctcagcttcacctccttcagaaccaggctatagaagttgtgtggtcccaccaacctgcatttctttcatgggtcgagggccgccactttagtgaccaaggagagaatgttgccgagatcaatcgccaggttggacaaaaactggggctctcaaacggtggacaagtgtttctcaagccttgtagccatgtcgtgagctgtcagcaggtggaagtggagccactgtcggctgatgactgggagatcttagagttacacgccgtgagtctggagcaacatctgctggatcagatccgcatcgtctttcctaaggctatattccctgtttgggtcgaccagcaaacctacatcttcattcagatcgttgcgctgatacccgccgctagttacggtagactcgaaacggacaccaagctactaatccaacccaagacaaggagggccaaagagaatacgttttctaaagctgacgctgaatataagaaactccattcatacggtagagatcaaaaaggcatgatgaaggagctgcagacaaagcagttgcaatccaatacagtcggcataacagagtcaaacgagaacgagtcggagatcccggtcgacagttcttccgtggctagtctgtggaccatgatcggttcgatcttctcttttcagagcgaaaaaaagcaagaaaccagctgggggctgaccgagatcaacgctttcaagaatatgcagtctaaggtcgtccccctcgataatatattccgggtttgcaagtcacagcccccatccatttataacgctagcgctactagtgttttccacaaacattgtgctatccacgtgtttccttgggaccaggaatactttgatgtcgagcctagctttacagtcacttatgggaagctggtaaagctgttatcacctaaacaacaacaaagtaaaacaaaacagaacgtcctctctccagagaaagagaagcaaatgagcgaacctctcgatcagaaaaaaatcaggagcgaccacaacgaagaagacgaaaaggcctgcgttctgcaggtggtgtggaacgggcttgaggaactgaataatgccatcaagtatacgaaaaacgtagaggtcctgcatttagggaaagtctggatccccgacgacctcaggaaaaggctgaacatcgaaatgcacgctgtcgtccggatcacgccagtggaggtaacccctaagattccccgctctcttaaactgcagccgcgcgagaatttgccaaaggacatatctgaagaggatattaagactgttttttactcctggttgcagcaatcaacaaccacgatgctcccattagtgatttccgaggaggagttcatcaaattggagacaaaagatggactgaaagaattcagcctgtcgatcgtgcacagctgggaaaaggaaaaggacaaaaacatcttccttctctcgccaaatcttctccagaagaccactatccaggtgctgctggatcctatggtaaaagaagagaactccgaagagatagactttatcctgccctttctcaaattgagtagcttgggaggagttaactccctcggcgtctcctcactggagcatattacccactctctactaggtcggccattgagccggcaactgatgtccctggtcgccggactcaggaacggtgccttgcttctcacgggcggaaaaggaagcggaaaatccacacttgccaaggcgatttgtaaggaagcctttgataaactggatgcgcacgtcgagcgggtcgattgtaaggccctgtag

SEQ ID NO: 198989 - DNA, 1041 bp, synthetic construct
  misc_feature 1..1041: note = Description of Artificial Sequence: Synthetic coding sequence
  source 1..1041: mol_type = other DNA
atggcccccgccgccgccagcccccccgaggtgatccgggccgcccagaaggatgaatattaccgcggcgggctgcgatcagccgcgggcggcgctttacacagcctggcgggggccaggaaatggcttgagtggcggaaggaggtcgagctgttgagtgacgttgcctactttgggcttactaccctggcaggatatcagacattgggcgaggagtacgtgtccatcatccaggtggatcccagtagaatccatgtaccgagctcactccgtaggggggtgctggtcactcttcacgccgttttaccatacctcctcgacaaggcgctgctgcctctagagcaggagctccaggccgacccagactcaggaagacctctgcagggctctctaggacctggtggcaggggctgcagcggcgcccgccgctggatgagacaccatactgccactttgaccgaacagcaacgccgtgcgctgctaagggccgtgtttgtgctaagacagggcctcgcgtgtctgcagcgccttcacgttgcatggttttatatccatggcgttttctatcatctagcaaaacggctaacgggcatcacctaccaggcactacgacctgatcccttgagagtgctcatgtctgtggccccgagcgctctacagttgcgcgtgcgctccttgccaggggaggacctgcgcgctcgagtatcctacagattgttgggagtcatcagccttctgcacctggttctgagcatggggctacagctttacgggtttcgacaacgccaacgggctcgaaaagagtggagactccatcgtgggcttagtcatcggcgcgcttccctcgaggagagggcagtgtccagaaatcctctgtgcaccctgtgtctggaagagcggagacaccccaccgctaccccctgtggacatctgttctgttgggaatgtattacggcctggtgctcttctaaggccgaatgccctctttgcagagagaagttcccccctcaaaagctgatatatctgcggcattaccgctag

SEQ ID NO: 198990 - DNA, 981 bp, synthetic construct
  misc_feature 1..981: note = Description of Artificial Sequence: Synthetic coding sequence
  source 1..981: mol_type = other DNA
atggcccccgccgccgccagcccccccgaggtgatccgggccgcccaaaaggacgaatattaccgcggtggactgagatctgccgctggaggcgccttgcactcactcgccggggctaggaaatggctagagtggagaaaggaagtggaattgcttagtgatgtcgcgtacttcgggctgactaccctcgccgggtaccaaaccttgggggaggaatatgtgtcaattattcaggtcgatcccagcaggatccacgtgcccagctctctgcgacgcggggtgcttgtcacccttcacgccgttctcccttatctgctggacaaagcactgttgcccctcgagcaggagctgcaggctgacccagattctgggcgccccctgcaagggagtttgggccccggggggcgaggatgcagtggggcgaggaggtggatgcgtcaccacaccgctactctcactgagcaacaaaggagagccttgttgcgcgctgtcttcgttttgagacaaggtttggcctgcctacagcgtctgcacgtggcatggttctatatccacggtgtgttttatcacctcgcaaaacggctgacagggattacctacctgagggtgaggtcactgcccggcgaggacctgcgcgcgagagtgagttacaggcttcttggggtcatttctctgctccatctcgtgctctcaatgggattacagctctatggatttagacaacggcagagggcgagaaaggagtggcggcttcatcgcggcctatcacacaggagggccagcctggaggagagggccgtgagcagaaaccctttgtgtacactgtgtttggaagagcgccggcatcctaccgccactccctgcggtcacctgttctgttgggaatgcatcacggcatggtgctcctcgaaagccgagtgtccgctctgcagagagaaatttcctcctcaaaaactgatctacctcagacactatcgatag

SEQ ID NO: 198991 - DNA, 744 bp, synthetic construct
  misc_feature 1..744: note = Description of Artificial Sequence: Synthetic coding sequence
  source 1..744: mol_type = other DNA
atggacgccttcacccggttcaccaaccagacccagggccgggaccggctattccgggctacccagtacacatgcatgctgcttcgatacctgctagaacctaaagcaggcaaggagaaggtcgttatgaaactcaagaagctcgagagctctgtcagtaccggacgcaaatggttccgtctgggaaatgtggtccatgcaatccaggccaccgagcagagcatccacgccacagacctggtaccacggctctgcctaaccctggctaatctgaaccgcgttatttattttatctgtgataccatcctgtgggttaggagcgtagggctgaccagcggtattaacaaggagaagtggcgaactagagctgcacaccattactactattctcttctgctgagtctagtgcgggacttatacgaaatatccctgcaaatgaagagagtgacgtgcgaccgagctaaaaaggaaaagtccgcctcccaggatccactatggttctccgtagcagaggaggagacagaatggctgcagtcctttctgctgctgttgttcaggtctcttaagcaacaccctccactgttgctggacaccgtgaaaaatctttgcgacattctgaatcctcttgatcagttaggtatttacaagtcgaaccccgggattatcggcttaggagggttagtcagttccatcgcgggcatgatcaccgtggcctatcctcagatgaagctgaaaacgaggtag

SEQ ID NO: 198992 - DNA, 1209 bp, synthetic construct
  misc_feature 1..1209: note = Description of Artificial Sequence: Synthetic coding sequence
  source 1..1209: mol_type = other DNA
atgccctggaagctgtggcggggcagcgtgggctgccccggcgacctgtcatccgacggacttctcttcaggctcggccctccaaagccacccacggagctggagcctgagcccgaaatagagggattgttgacaccagtcctagaggcgggcgatgtggacgaaggacctgtggcccgccctctaagccctactaggctccagcccgcccttccccctgaagcacaaagcgttcccgaattagaggaggtggcccgtgtgctggcagagatccctagacccctaaagaggcgaggctccatggagcaggctcccgcagtggccttgcccccaacccacaaaaaacaatatcagcagattataagcaggcttttccaccggcacgggggccctgggccaggaggcccagagccggaactgagtcccataaccgaaggctccgaagcccgagccggcccccccgccccagccccgcccgcacctatccccccacccgcacctagccagtcatcccccccagagcagccgcaaagtatggagatgagatcagtgttaagaaaagccggctcacctaggaaggctaggagggcgcgactgaaccctttggtgctactcctggacgccgccctgaccggagagctggaggttgtgcaacaagcagttaaggagatgaatgatcctagccaacccaacgaagaagggatcaccgcactgcataacgcaatctgtggcgcaaactactcgatcgtagatttcctgatcacagccggtgccaacgtcaatagtccggacagccatggatggacccccctgcattgtgccgcctcatgcaatgacactgtaatatgcatggcgctggtccagcatggagcggctatttttgctacaaccctttccgatggcgccaccgctttcgaaaagtgcgatccatatcgtgaagggtatgccgactgtgccacttatttggctgatgtggaacagtcaatgggccttatgaatagtggcgccgtctatgccctgtgggactacagcgccgagttcggggacgagctgagctttagagaaggggagtctgtcacggtgttacgcagggacggtcccgaagagacagattggtggtgggctgccctgcatggccaagagggctatgtccctcgcaactacttcggactctttccaagagtcaaaccccaaagaagtaaagtctag

SEQ ID NO: 198993 - DNA, 507 bp, synthetic construct
  misc_feature 1..507: note = Description of Artificial Sequence: Synthetic coding sequence
  source 1..507: mol_type = other DNA
tgataccggggccgggaccggctgatccgggtgctgggctactgctgtcagctcgtgggcggagttttggtggaacagtgccctgcccgaagtgaggtaggcactagacttctcgttgtgagtacccagctctctcactgcagaaccatcttgaggctttttgacgatttagcaatgttcgtgtacaccaaacaatatggcttaggcgcccaagaagaagacgcttttgttcggtgcgttagcgtcctgggcaacctggcagaccagctctattatccctgcgaacacgttgcatgggccgcagacgcacgcgtgctccacgtcgacagtagccgatggtggaccctctccacaactctctgggctcttagcctccttttgggtgtggcaagaagcctatggatgctgctgaagctaagacagcgactgaggagtccaactgctccttttaccagtatgtaccaggccgctagggcaggagggcaggcggaggccaccaccccttag

SEQ ID NO: 198994 - DNA, 1212 bp, synthetic construct
  misc_feature 1..1212: note = Description of Artificial Sequence: Synthetic coding sequence
  source 1..1212: mol_type = other DNA
atggccagccagcccccccccccccccaagccctgggagacccggcggatcccaggagccggacctggccctggcccaggccccacgttccagagtgccgacctaggtcccacactgatgactcggcccggccagcccgccctgactcgggttccccctccaatcctgcctcgcccctctcagcagaccggcagcagctcagtgaatacatttagacccgcctattccagcttcagctcagggtacggcgcctacggaaattcgttctacggcggatatagcccttactcttacggctataacggtctggggtacaaccggctcagagttgacgacctgcccccctcaaggtttgttcaacaagcagaagagagctccagaggcgcttttcaatctattgaatctatcgtgcacgctttcgcttccgtctctatgatgatggatgccacgtttagcgcggtttacaactccttccgggccgttctggacgttgccaatcattttagtcggctgaaaatccacttcaccaaggtcttctcagcttttgcgctcgtcagaacgatccgttatctttacagaaggctgcagaggatgttgggcctccgaagaggatccgagaatgaagatctgtgggccgagtctgagggcacagtcgcctgcctgggcgccgaagatagagctgccacatctgcaaaatcatggccaatattcttattcttcgccgtgattctgggtggaccgtaccttatctggaaattattgtctacgcattctgacgaggtgactgacagcatcaactgggctagcggcgaggatgaccacgtggtagcccgcgcagaatacgactttgccgcggtgtcagaagaggagatctctttccgcgccggcgatatgttgaatttagcactgaaggaacaacagcctaaggtaagaggttggctcctggcaagcttggatggacaaaccaccggactcattcccgccaactatgtgaagatccttggaaagagaaagggtcggaagactgtggagtcctccaaagtatcaaagcagcaacaaagctttacaaaccccactctgacaaagggcgccacagttgctgattcactggatgagcaagaggccgcattcgaatccgtcttcgtggagaccaataaggtgcccgtagctcccgacagtatcggaaaggatggtgaaaaacaggacttgtag

SEQ ID NO: 198995 - DNA, 1134 bp, synthetic construct
  misc_feature 1..1134: note = Description of Artificial Sequence: Synthetic coding sequence
  source 1..1134: mol_type = other DNA
atggccagcagcgagcaggccgagcagcccagccagcccagcagcacccctgggtccgaaaatgtgctgccacgcgaaccccttattgctaccgcggtgaaattccttcaaaacagccgagtccggcaatctcccctggcaaccagaagggcgtttctcaagaaaaaggggctgactgacgaggaaattgacatggcgttccagcaatccggtactgccgctgatgaaccctctagtctggggcccgcgactcaggtcgtgcctgtgcagccacctcacctgataagccagccctactctcccgctggctcccgatggcgtgattacggcgctttagctatcattatggccgggatcgccttcggatttcatcagctttacaagaaatacttgctgcccctaatactggggggaagggaagaccgcaagcagctcgagaggatggaagcaggactgagcgagctcagcggtagtgtggcccagactgtcacgcaactgcagaccacccttgctagtgtgcaggaactactgatacagcagcagcaaaagattcaagagctcgcccacgaattagcggctgccaaagctacaacaagcacaaactggatcctagagtcccaaaacatcaatgagttgaaatctgagattaattccctgaaagggctgctgctcaatcgccgccagttcccgcccagcccaagcgcacccaaaattccctcatggcaaattcctgtgaagagcccgtctccctccagccctgcagccgtcaatcaccactcatccagcgacatttcacctgtgtccaacgaaagtacaagcagcagcccaggaaaggaagggcattctcctgaggggtctaccgtcacgtaccacctgctcgggccccaagaagagggtgagggggtggtggacgtcaaggggcaggtgagaatggaggtgcagggggaagaagaaaagcgggaagacaaggaggacgaggaagacgaggaagatgatgatgtctcacacgttgatgaggaagactgtttgggagtccagagagaagatcgtcgcggtggggatggtcagattaatgagcaagttgagaagctgcggagaccggaaggagccagcaacgagtccgaaagagattag

SEQ ID NO: 198996 - DNA, 942 bp, synthetic construct
  misc_feature 1..942: note = Description of Artificial Sequence: Synthetic coding sequence
  source 1..942: mol_type = other DNA
atggccttccagcagagcggcaccgccgccgacgagcccagcagcttagggcctgcgacccaggttgtccccgtgcagcccccccatctgatctcccaaccctattctcctgcgggatcccgttggagggactacggggctctcgcaatcatcatggctggtatagcgttcggattccaccagttgtacaagaaatatctgcttccgctcatactcggcggccgcgaggacaggaagcagctcgaacgaatggaagcaggcctgtcggagctctcgggctctgttgcacagacagttacacagttacagactacattggccagcgttcaggaactgctcatccagcagcagcaaaagatccaggaactcgcccacgagctggctgcagcaaaagctaccacatctacgaactggatcctggaatctcagaatataaacgaactcaaaagcgagattaatagtttaaaaggcctactgcttaatagacgccaatttcctccgtccccctccgcgccaaagattccttcatggcagatcccagttaaaagcccatcacccagtagcccagctgcagtaaaccatcactcgtctagcgatatttcacccgtgtctaatgaatcaacatcctcgagccccgggaaggaggggcactcccccgagggaagcacagtgacataccacctccttggaccacaggaggagggggagggcgttgtagacgtgaagggccaagtgcgtatggaagttcaaggagaggaagagaaaagagaagacaaagaagacgaagaagatgaggaggatgatgacgtcagtcacgttgacgaagaggattgcctaggcgtccaacgagaagatcggagaggtggagatggacagatcaatgaacaggtggagaagctgcgaagaccggagggagcttctaatgagtcagagcgagactag

SEQ ID NO: 198997 - DNA, 1041 bp, synthetic construct
  misc_feature 1..1041: note = Description of Artificial Sequence: Synthetic coding sequence
  source 1..1041: mol_type = other DNA
atggagaagctgcggctgctgggcctgcggtaccaggagtacgtgacaaggcaccctgcagccactgcccaactggagacagctgtccgcggtttctcctatttgctcgccggaagatttgctgattcacatgagttgagcgagttagtgtattccgcctctaacctcttagtacttttgaacgacggcatcctgcggaaagaactgaggaagaagttgcctgtctccctatctcagcagaagctgttaacttggctcagcgttttagagtgcgtggaagtcttcatggagatgggggcggcaaaagtatggggcgaagtgggtagatggctcgtgattgcgttggtgcaattggccaaagccgtgctgcgaatgctattactgttgtggttcaaggccgggctgcagacttcacctcccatcgtgccacttgaccgcgagacccaagcccaaccccctgatggcgatcattcccccggaaatcacgagcagagttatgttgggaagcgcagcaaccgcgttgtgaggactctgcagaacacgccttcattgcattctcgccattggggagcacctcaacaaagagagggtagacagcaacagcatcatgaggaactctctgctacacctacacctctaggcctccaagagacaattgcggagtttctatacatcgcccggccgttgctgcacttgctgtccctcggtttgtggggtcagcgatcctggaagccctggctgttggcaggcgtggtcgacgtaactagcctcagccttctgtccgatcggaaggggctgactcggcgggagaggcgtgagctgaggcgccgaactatcctcctcctgtattacctgttgagatctcccttctacgaccgctttagcgaggcgcgtattctgtttttgctgcagctcctggcagaccatgttcccggcgtgggcttggtcacgacctctcaaagggcagccagcccctgtctcccagctcgcccccacactcagccatggagcccacccgcttttctccccggacacccctag

SEQ ID NO: 198998 - DNA, 1011 bp, synthetic construct
  misc_feature 1..1011: note = Description of Artificial Sequence: Synthetic coding sequence
  source 1..1011: mol_type = other DNA
atggagaagctgcggctgctgggcctgcggtaccaggagtacgtgacaagacacccggcagctaccgcccagcttgagaccgctgtgagagggttctcataccttctggccggcagattcgcggactctcatgaattgagtgagctggtttactccgcctccaacctgctggtgctcctgaacgatgggatccttagaaaagagctgaggaagaagctgcccgtttccctctcacagcaaaaactgctcacctggctcagcgttctggagtgcgtcgaggtcttcatggagatgggagccgccaaggtctggggtgaggtgggacgctggctggtgatagcacttgtgcaattagccaaagccgtgctgaggatgttgctactcttgtggtttaaggcaggactccagacctccccgccaatagtccctttggatcgcgagacgcaggcacagccccccgatggggaccacagccctggcaaccatgaacagagttatgtgggcaagaggtccaacagagtagtgaggacactccaaaataccccctccctccattctagacattggggggctccgcagcagcgcgagggcagacagcaacaacaccatgaggaactaagtgcaacccccactcccctggggctgcaggaaaccatagccgagttcctatacattgccagacctcttcttcatttgttaagccttggcctgtggggccagcgctcatggaagccttggcttctggcaggagttgtggacgtgacctccttgagccttttatctgaccggaaaggcctcacgaggcgagagagacgcgagttaaggcggagaactatcctgctattatattatctcctgcgctcgcccttctacgaccgttttagcgaggctcgcattttatttcttctacaactcctggctgaccacgtcccaggagttggtctggtcactcgcccgctcatggattatctgcctacgtggcagaaaatttacttctactcgtggggctag

SEQ ID NO: 198999 - DNA, 900 bp, synthetic construct
  misc_feature 1..900: note = Description of Artificial Sequence: Synthetic coding sequence
  source 1..900: mol_type = other DNA
atggccgccgccgaggagggctgcagcgtgggcgccgaggccgaccgcgaactcgaggaacttctagagtccgctctggatgactttgataaggcaaagccctcaccagcacctccctcgacaactactgctccggatgctagtggaccccagaaacgttcccccggcgacacagcgaaagacgcactgttcgcttcccaggagaagttctttcaggagctgttcgacagcgagcttgccagccaagcaaccgccgagtttgagaaggcaatgaaggagcttgctgaagaggagccgcacctggtagagcaatttcaaaaactgagtgaggctgcgggcagagtggggagcgatatgacgagccagcaagaatttacatcttgcctgaaggagacactctcaggcctagccaaaaatgctactgatctgcaaaattcctcaatgtccgaagaagaactgaccaaggccatggagggacttggtatggacgagggggatggagaaggcaatatcctgcctattatgcagagcattatgcaaaacttgctttctaaggacgttctctacccatccctgaaagagatcacagagaagtatccggagtggctgcagtcccatcgcgaatctctaccccccgaacaattcgaaaaataccaggaacaacactctgtaatgtgcaagatttgtgagcagtttgaggcggagacgcccaccgattcagaaacaacccaaaaggccaggttcgaaatggtactcgacctcatgcagcaacttcaggacctcggacacccaccaaaagagctggctggcgagatgcctcccgggttaaacttcgatctcgatgccctgaatctaagcggaccgccgggcgcttcaggcgaacagtgtctgatcatgtag

SEQ ID NO: 199000 - DNA, 708 bp, synthetic construct
  misc_feature 1..708: note = Description of Artificial Sequence: Synthetic coding sequence
  source 1..708: mol_type = other DNA
atggagagcggcgccctggacgacttcgacaaggccaagcccagcccagctcctcccagtactactacagcccccgatgcttccggtccccaaaagaggagtccaggagacactgctaaggacgccctttttgcatcacaggagaagttcttccaagagctgtttgattcggagttggcctcccaggcaactgctgaatttgagaaagcaatgaaagagctggctgaggaggagcctcatttggtcgaacagtttcagaagttatccgaggctgctggcagggtaggctctgacatgacgtctcagcaagaattcacaagttgcctaaaggaaactttatcagggctcgccaagaacgctactgatttgcagaattctagtatgtcagaggaagagctgacaaaagccatggaaggcttaggtatggatgagggagacggggaggggaacatcttaccaatcatgcagtcaattatgcaaaatctgctgtctaaggatgtgctctatcctagcctgaaagaaataactgagaaataccctgaatggctccaatctcaccgagagagcctgccccccgagcagttcgagaagtatcaggaacagcacagcgtgatgtgtaagatttgtgaacagtttgaagctgaaaccccgacagatagcgagacgacgcaaaaggcccggttcgagatggttctggatctcatgtag

SEQ ID NO: 199001 - DNA, 840 bp, synthetic construct
  misc_feature 1..840: note = Description of Artificial Sequence: Synthetic coding sequence
  source 1..840: mol_type = other DNA
atggagagcggcgccctggacgacttcgacaaggccaagcccagccccgctcccccatcaaccaccaccgccccggacgcctcgggcccccagaagaggagccccggggacacggccaaggacgctctcttcgcctctcaggaaaagttttttcaggaactcttcgattccgagctggcatcacaggctaccgctgagttcgaaaaggccatgaaggaactggccgaagaggagcctcacctggtagagcagtttcagaaactgagcgaagctgccgggcgggtcggctccgacatgacatcccaacaggaatttacctcgtgtctgaaggagactctgtctggtctcgcgaagaacgctacagatctgcagaatagcagtatgagtgaagaagaactaaccaaagccatggagggcttggggatggacgaaggcgacggggaagggaacatcctccccataatgcagtctatcatgcaaaaccttctaagcaaagacgtgctgtacccgtctctgaaggaaatcacggagaagtacccggagtggctccaatctcaccgggagtccctgccccccgaacagtttgagaaataccaggagcagcatagcgtgatgtgtaaaatctgcgagcagtttgaggccgagactccaacagactcggaaacaacccagaaggctagatttgaaatggtgctggatctcatgcagcaactgcaggatctcgggcaccctccaaaggagctcgccggcgaaatgcctcccggcctgaactttgacctcgatgcccttaatctgtctggcccgcccggtgccagcggggagcaatgtttgattatgtag

SEQ ID NO: 199002 - DNA, 630 bp, synthetic construct
  misc_feature 1..630: note = Description of Artificial Sequence: Synthetic coding sequence
  source 1..630: mol_type = other DNA
atgaaggagctggccgaggaggagccccacctggtggagcagttccagaaattgagcgaagcagctggacgggtgggttccgatatgacttcacagcaggaatttacatcttgtcttaaagaaaccttgagcggcctcgctaagaatgccacagacctccaaaatagttccatgagcgaggaagaactcaccaaggctatggagggtctcggtatggacgagggagatggggagggtaatattctgcctatcatgcaaagtatcatgcagaatctcttgtctaaggacgttctttacccatctctcaaggagatcaccgagaagtatccggagtggctccaatctcatcgtgagagtttaccccccgagcagttcgagaaatatcaggagcaacactccgttatgtgcaagatctgtgagcaatttgaggctgaaactcccacagactctgagaccactcaaaaggctcgatttgagatggtcctcgatcttatgcagcagctccaggatttaggacaccctccaaaggagttggcaggcgagatgccacccggcttgaattttgatctggatgctctgaatttgtcaggtccccctggggcatccggtgagcaatgcctgattatgtag

SEQ ID NO: 199003 - DNA, 561 bp, synthetic construct
  misc_feature 1..561: note = Description of Artificial Sequence: Synthetic coding sequence
  source 1..561: mol_type = other DNA
atggccgccgccgaggagggctgcagcgtgggcgccgaggccgacagggaactcgaggaactgctggagtccgccctggacgactttgacaaggcgaaaccatcgcctgcgccaccaagtacgacgaccgcaccagacgcttctggccctcagaaacgaagccccggcgatacagccaaggatgcactcttcgcatcacaggagaagttcttccaggagctgtttgactccgaactggcatcccaggccaccgctgaatttgaaaaagccatgaaagaactggcagaggaagaaccgcacctagtggagcagttccagaagctttcagaggcagctgggcgggtggagctccagcacgtgggcagacgggccgaccaaggacatggcggcgccagacatgggcgtcggggatgggggcgcgagcatccaccccaccacgctgaatactacgcagagcccacgctgcaaggatgtgccgttccgattacagagggagaccaccgaaaggtaagcaggatggtcgctgaatccagcggaatcagtacttcccgtgcagtgtag

SEQ ID NO: 199004 - DNA, 918 bp, synthetic construct
  misc_feature 1..918: note = Description of Artificial Sequence: Synthetic coding sequence
  source 1..918: mol_type = other DNA
atggccagccggaaggagaacgccaagagcgccaaccgggtgctgaggatttcccagctggatgccctggagctgaacaaggcactggaacagctcgtatggagtcaatttacgcagtgctttcacgggttcaagcccggtctcctggcccgatttgaacctgaagtaaaagcctgtctttgggtgttcctctggcgctttacaatctattccaagaacgcgactgttgggcagagcgtgcttaacattaagtacaaaaacgatttcagcccaaatctaagatatcaacctccctccaaaaaccagaagatatggtacgcagtgtgtacgataggcgggcgatggctggaagagaggtgttatgatttatttcgtaaccaccaccttgcctctttcggaaaggttaaacaatgtgtaaacttcgtgattggcctgctgaaactgggcgggttgatcaattttctcatatttctgcagagaggcaagtttgccacgctgacagaacgtctcctcggcatccactctgtcttttgtaagccccagaacatttgcgaggtgggcttcgagtatatgaaccgggaacttctgtggcacggatttgccgagttcttgattttcctgttgcctctaatcaatgttcagaagctgaaagccaagctaagctcctggtgcattcctctgaccggcgcaccaaatagcgataacaccctggccacttcaggaaaggagtgtgctttgtgtggggaatggcccacaatgccccatacgattgggtgcgaacacattttctgctatttctgcgcaaagtcctcttttctttttgatgtatatttcacctgtccaaaatgtggaactgaagtgcatagtctccagcctctcaaaagcggcatcgaaatgtcagaggtgaacgcactgtag

SEQ ID NO: 199005 - DNA, 918 bp, synthetic construct
  misc_feature 1..918: note = Description of Artificial Sequence: Synthetic coding sequence
  source 1..918: mol_type = other DNA
atggccagccggaaggagaacgccaagagcgccaaccgggtgctgcggatttcacaactcgacgccctcgaactgaacaaagctctggagcagctggtttggtctcagttcacccagtgctttcatggcttcaaacccggcctgctcgctcggttcgagccagaggttaaggcttgcctgtgggtttttctatggaggttcaccatctacagtaaaaacgctaccgtcgggcagtctgtattgaacattaaatacaagaacgatttttcacctaacctgcgataccagcctccaagcaaaaatcagaagatctggtatgccgtgtgtacaatcggaggacgttggctggaagagaggtgctacgacctttttcggaatcatcaccttgcatctttcgggaaggtaaagcagtgcgtcaattttgtgattggcttgctcaagctgggtggcctgatcaattttttgatattcctgcagagaggtaagttcgcaacactgactgaaaggctacttgggatccacagtgtgttttgtaagcctcaaaacatctgtgaagtgggcttcgagtacatgaaccgagaactcttgtggcacgggtttgctgaatttctcatcttcctgctgcccctgatcaatgtgcagaaactcaaggcgaaacttagctcatggtgtattccactgacaggggcacccaactctgacaataccctagctacatcgggtaaggagtgcgcattgtgcggcgaatggcctacaatgcctcacaccatcggctgcgagcatatcttctgctatttctgcgctaagagttcatttctgttcgacgtctattttacctgtcccaagtgcgggacagaggtccacagcctccagcccttaaagtcgggaattgagatgtccgaagtcaacgccttgtag

SEQ ID NO: 199006 - DNA, 543 bp, synthetic construct
  misc_feature 1..543: note = Description of Artificial Sequence: Synthetic coding sequence
  source 1..543: mol_type = other DNA
atggccagccggaaggagaacgccaagagcgccaaccgggtgctgcggataagtcagctggatgcactggagttgaacaaggctctcgagcaattggtttggagccagtttactcagtgctttcatgggttcaaaccaggcttgttggctaggtttgagcctgaagtaaaggcctgcctgtgggtgtttttgtggcggtttactatttacagcaagaacgctaccgtggggcagtccgtgctgaacattaaatacaagaatgacttctcacctaatctacggtatcagcccccttcgaaaaaccagaaaatttggtatgctgtgtgcacaataggcggcaggtggcttgaggaacgctgctatgatctctttagaaatcatcacttggctagctttggcaaagttaagcagtgcgtcaactttgtgattggcttattgaagctgggcggcctgattaattttcttatttttctgcaaaggggcaagttcgcaacactgaccgagcgcctgcttggcatccactcggtattttgtaagccttag

SEQ ID NO: 199007 - DNA, 12 bp, synthetic construct
  misc_feature 1..12: note = Description of Artificial Sequence: Synthetic coding sequence
  source 1..12: mol_type = other DNA
atggccagctag

SEQ ID NO: 199008 - DNA, 918 bp, synthetic construct
  misc_feature 1..918: note = Description of Artificial Sequence: Synthetic coding sequence
  source 1..918: mol_type = other DNA
atggccagccggaaggagaacgccaagagcgccaaccgggtgctgcggattagccaactcgacgccctggagctgaacaaagcactggaacagctggtgtggagccaattcacccaatgctttcacggcttcaaaccaggcctgctggcgcgttttgagcccgaagtgaaggcgtgtttatgggtcttcctctggcggtttacgatttatagcaagaacgctacagtcggacaaagtgttttgaatattaagtataagaatgacttttcacccaatctcagatatcagccgccctcaaaaaatcaaaaaatttggtatgcagtgtgcaccattgggggtagatggctagaagagcggtgttatgatctattccggaaccatcatctggcctcttttggtaaggtgaagcagtgtgtaaatttcgtgattggcctgttaaagttgggcggcctcattaacttcctgatttttctgcagagagggaagttcgccacgctgaccgaacgactgctggggattcatagcgtgttttgtaaaccacaaaacatttgcgaggtcggctttgaatacatgaatcgagaactgctgtggcacggattcgctgaatttttgattttcttactccctctgatcaatgtgcaaaagctcaaagccaaactgagctcctggtgcatccctctcactggcgctccgaacagtgacaacacactcgcaaccagcgggaaagaatgcgctttatgcggtgaatggccaaccatgcctcataccatcggatgcgaacatattttctgttatttttgtgctaagtcatcattcctctttgacgtgtattttacatgccctaaatgtggcaccgaagtgcattcactgcagccgctgaagtcaggcatcgagatgtcagaggtgaacgccctctag

SEQ ID NO: 199009 - DNA, 918 bp, synthetic construct
  misc_feature 1..918: note = Description of Artificial Sequence: Synthetic coding sequence
  source 1..918: mol_type = other DNA
atggccagccggaaggagaacgccaagagcgccaaccgggtgctgagaataagccagctggatgcactggagctgaataaggcgctcgaacagctggtgtggagccagtttacacagtgttttcacggattcaagcccggcctcctagctcggttcgagcctgaagtgaaagcctgcctctgggtgtttctatggagatttactatttactctaagaacgccaccgtagggcagtctgtcctgaacatcaagtataaaaacgatttttcaccgaacctcaggtaccaacccccttccaagaatcagaaaatctggtatgccgtgtgtaccatcggaggcaggtggctcgaggagagatgctacgatttattcaggaatcaccatctcgctagcttcggtaaagtgaaacagtgcgtgaatttcgtcattggactactgaagctcggcgggcttattaatttcttgatcttcctgcagagagggaagtttgccacattaactgaaagactgctcgggatccattcggttttttgtaagcctcagaatatatgcgaggtggggttcgaatacatgaatcgcgagttactgtggcacgggtttgcagagtttttaatttttctgctgcctctgataaacgtacagaagctgaaggcgaagctgagcagctggtgcatacccctaactggggcacccaattcggacaacactctggctaccagcgggaaggagtgtgccttatgcggggagtggcccaccatgccacacacaatcggctgcgaacatatattctgttatttttgcgctaagtcatctttcctattcgatgtgtactttacatgccctaaatgcggcactgaagtgcattctctgcagcctcttaagtcaggaatcgagatgagcgaggtgaacgctctttag

SEQ ID NO: 199010 - DNA, 918 bp, synthetic construct
  misc_feature 1..918: note = Description of Artificial Sequence: Synthetic coding sequence
  source 1..918: mol_type = other DNA
atgaagagcgacagcagcaccagcgccgcccccctgcggggcctgggaggccctttgagatcttctgagccagtccgagccgtgccagccagagccccagctgttgacttgttagaagaggctgctgatcttctcgtggtacatctggactttcgcgccgcccttgagacctgtgaacgcgcctggcagtccctcgccaaccacgctgtggccgaagaacccgccggaacaagtttagaggtcaaatgttccttatgtgttgtggggattcaagcccttgctgaaatggaccggtggcaggaagtgcttagctgggtgctgcagtactaccaggtgcctgagaagctgccgccaaaagtgctggagttgtgcattctgctgtatagtaagatgcaggaaccaggagccgtgcttgatgtggttggtgcatggctgcaagatcccgctaatcagaatttacccgaatacggcgctctggccgaatttcatgtacagcgtgtacttctgcctctgggctgtctcagcgaagccgaagagcttgtcgttggctcggccgccttcggagaagagaggcgactcgatgtattgcaggccattcacaccgcaagacagcaacagaagcaggagcactccggctcggaggaagcccagaagccgaacctggagggatctgtgagtcacaaatttttgagcctgcctatgctggtccgccaactgtgggactctgccgtctcacatttcttctctctgcccttcaagaagtccctcctagccgctctcattctatgtctattagtggtgagatttgatccagcatccccaagctcactccactttctgtacaaattagcccagctctttcgctggattaggaaagctgcatttagcagactgtaccagctgcgcatccgggactag

SEQ ID NO: 199011 - DNA, 918 bp, synthetic construct
  misc_feature 1..918: note = Description of Artificial Sequence: Synthetic coding sequence
  source 1..918: mol_type = other DNA
atgaagagcgacagcagcaccagcgccgcccccctgcggggcctgggaggccctctgcgcagttccgaacccgtgcgcgcagtgcctgcaagggccccagctgtcgatttgctggaggaggccgcagacctcttggtagtacaccttgatttccgcgccgccttggagacctgcgagcgggcctggcaatccctcgcgaaccacgcagtggcggaagaaccagcaggcacctcacttgaggttaaatgctcattgtgtgtggtggggatacaggccctcgctgaaatggatagatggcaggaggtcttaagttgggtcctgcagtattaccaagtgccagagaaactgccccccaaagtgctggaactgtgcatccttctctacagtaagatgcaggaacctggcgcggtactcgacgttgttggcgcatggttacaggaccccgctaaccaaaacctgcccgaatacggcgctctggccgaattccatgtgcagcgcgtacttctgcctctcggctgccttagcgaagcggaggagctggtcgtggggagtgccgccttcggcgaggaacggcgactggacgtcctgcaggccatacacacggcaaggcagcagcaaaaacaggagcacagtggatccgaggaagcacagaagcctaatctggagggaagcgtgtcacataagttcctgtctctgcctatgctggtgcgacagctgtgggattcagctgtctctcacttcttttccttaccattcaaaaagtcgctcctcgcagctctaatactttgccttctggtggttaggtttgaccccgcatcaccctcatccctccacttcctatataagttggcacagctgtttaggtggattcggaaggccgcgttttcaaggctgtaccaactgagaattagggactag

SEQ ID NO: 199012 - DNA, 1098 bp, synthetic construct
  misc_feature 1..1098: note = Description of Artificial Sequence: Synthetic coding sequence
  source 1..1098: mol_type = other DNA
atgaagagcgacagcagcaccagcgccgcccccctgcggggcctggggggccccctcagaagcagtgaaccagtgagagccgtacctgcccgggcccctgcagtggacctactggaggaagcagcagaccttctggttgtgcatttagactttagagccgcactggaaacctgcgaacgagcctggcaatccctggcgaatcacgcggtcgcagaggagcctgctggaactagtctcgaagtgaaatgcagcctgtgtgttgttggcatccaggccctggcagaaatggaccgctggcaggaagtattatcctgggttctccagtattaccaagtacccgaaaagctgccacctaaggttctggaactgtgcatactgctctatagtaagatgcaagaacccggcgctgtactcgacgttgtgggcgcctggctgcaagacccggcaaatcaaaacttgcccgagtatggggccctggccgaattccatgtgcaacgcgtgctgctgcccctgggatgtctgtctgaggccgaggaactcgttgtcgggagtgctgccttcggcgaggaacggcgccttgatgtcttgcaagccatacacaccgccaggcagcaacagaagcaagaacactcaggctccgaggaggcccagaagcctaacctcgagggcagcgttagtcataagttcttaagtctgcccatgttggtccggcagttgtgggactcggcagtgagtcacttcttttccttgcccttcaagaagtccctattggccgccctgatcctctgtctgctcgtagtgaggttcgacccagcttcacccagtagtctccacttcttgtacaaattggcccaattattcgctgggtctggccgccttcacttcttggcttctacctcatctgcttccgtcacagaaggcccatgcgccccccagcccctttgtagcagtcggccatggccacagaaacagtccgatcgtgccacacacccccaagcacccctgggcaagtgggaccaacctaatctggctgagtgtaccgtcagttgttgtttgggcgctcttagcttcgccccgtattttggttggagtagatag

SEQ ID NO: 199013 - DNA, 771 bp, synthetic construct
  misc_feature 1..771: note = Description of Artificial Sequence: Synthetic coding sequence
  source 1..771: mol_type = other DNA
atgaagagcgacagcagcaccagcgccgcccccctgcggggcctgggaggaccactgcggagctcagaaccagtgagggcagtgcccgcccgagcacccgccgtggatctgctggaggaggcagctgatctcctcgttgtccacctagacttccgcgcagccctcgagacatgtgagcgcgcctggcagtcactggctaatcatgccgtggcagaagagccagctgggacaagtttggaggtgaagtgttctttgtgcgtggtggggattcaggcactcgccgagatggatcgatggcaggaggtcctatcttgggtgctccagtactatcaggtccccgaaaagttaccacctaaagtgctcgagctatgtatactgctttatagtaaaatgcaagaaccaggagccgttctcgacgtggtcggtgcgtggctacaggaccctgcaaatcagaatctaccagagtatggggctctcgccgaatttcacgtccagcgggtcctccttcctcttggctgtctttcagaagccgaagaactggttgtcggttccgccgcttttggcgaagaacggcgcctcgatgtgttgcaggcgatccacacagccaggcagcagcaaaaacaggagcattctggcagcgaagaagcgcagaagcctaatctcgaagcctctccctcgagtctgcatttcctctacaaactggcacaactcttccggtggatccggaaggctgctttctcacggctttaccaactgcgcatccgcgattag

SEQ ID NO: 199014 - DNA, 549 bp, synthetic construct
  misc_feature 1..549: note = Description of Artificial Sequence: Synthetic coding sequence
  source 1..549: mol_type = other DNA
atgctgcggagcgtgtggaacttcctgaagcggcacaagaagaagtgcatttttttggggacggtgttgggcgtgctttctatgctgccaacccttagggaagctctgatgcagcaactgaatagtgaatccctcacggccctgctaaaaaatcggccatccaataaactggagatttgggaggaccttaaaatcatttcctttaccagatccacagtggctgtgtattccacctgcatgcttgtcgtccttttacgggtccagctcaatatcatcggcggatacatctaccttgacaacgcagcagtgggaaagaacggtaccacaatcctggcaccccctgatgtgcaacagcagtatttgtcatccatccagcacctcctcggcgacggcctaacggaattgattaccgtcattaagcaagcggtccagaaagtgcttggctcagtttctttaaagcattccttgtctctgctcgatctggaacaaaaactcaaggaaatcaggaatcttgtcgaacagcacaagtccagctcttggatcaattag

SEQ ID NO: 199015 - DNA, 1122 bp, synthetic construct
  misc_feature 1..1122: note = Description of Artificial Sequence: Synthetic coding sequence
  source 1..1122: mol_type = other DNA
atgctgcggagcgtgtggaacttcctgaagcggcacaagaagaagtgcatctttctgggcaccgtgctgggtggtgtgtacatcctcggcaaatatgggcaaaaaaagattcgagagattcaagagagggaagccgccgaatacattgcccaggcgcgtaggcagtaccattttgagagtaaccaacgcacctgcaatatgacagtgttatctatgctccccacgctgagggaagccttaatgcagcagcttaatagcgagtctctgacagcactcctcaagaaccgaccttcaaataagctggaaatatgggaggatcttaagatcatcagcttcactcgcagtacggtcgccgtgtactctacctgtatgctggttgtgctactgcgagtgcagctgaacatcatcgggggatacatctacctagataatgccgcggtgggaaaaaacggtacaactattcttgcacctcccgacgtccaacaacagtacttgagtagcatccagcaccttctgggagacggccttactgagcttataactgtgatcaagcaagccgtgcaaaaggtgctcggctccgtgagcctcaaacactccctttctttgctggatctggaacaaaagttaaaagagattcggaacctcgttgagcagcataagtcttcaagctggattaacaaggatggctccaagccactgttatgtcactacatgatgccagacgaagaaacacccttggccgtgcaagcgtgtggattaagcccccgggacattaccacaatcaaattgctaaacgagacccgggatatgctagagtctccagacttcagtacagtgctgaacacttgtctgaaccgaggatttagccgccttttggataacatggccgaatttttccggccaaccgagcaggacctgcagcatggtaattcgatgaacagcctttccagcgtgagtcttccactcgccaagatcatccccattgttaatgggcagattcattctgtctgttctgagacaccgtcccatttcgtgcaagatctccttaccatggaacaggtcaaggactttgctgctaacgtgtacgaggctttctctacgccgcagcaactggagaagtag

SEQ ID NO: 199016 - DNA, 549 bp, synthetic construct
  misc_feature 1..549: note = Description of Artificial Sequence: Synthetic coding sequence
  source 1..549: mol_type = other DNA
atgctgcggagcgtgtggaacttcctgaagcggcacaagaagaagtgtatattcctgggtacagtcttgggagttctgtcgatgctaccaacattacgggaggctctgatgcagcaactcaacagcgagtctcttaccgctctcctcaaaaatcgccctagcaacaagctggaaatttgggaggatctgaaaattatcagtttcacacggtctaccgttgcggtgtactcaacctgcatgctggtagtgctgttgcgcgtccaactaaatatcattggagggtacatttacctggacaatgccgccgtgggtaaaaatggcacgacgatcttagccccaccagatgtgcaacagcaatacctgtcatccattcaacatcttctgggggatggactgactgagctaattaccgttattaagcaggcagtgcaaaaggttttgggttccgtgtctttaaagcacagcctgagtctcctggacctggagcagaaactaaaggagattcggaacctagttgaacagcataagtcttcaagctggatcaattag

SEQ ID NO: 199017 - DNA, 1809 bp, synthetic construct
  misc_feature 1..1809: note = Description of Artificial Sequence: Synthetic coding sequence
  source 1..1809: mol_type = other DNA
atggccatgcgggagctggtggaggccgagtgcggcggcgccaacccgttaatgaagctggccgggcacttcacacaggacaaggctctcagacaagagggactgaggcctggcccatggccaccaggcgcccctgcttctgaagctgcatccaagccactaggagtcgccagcgaggacgaactggttgcagaattcctgcaagatcagaacgcacccttggttagccgggcgccccagacctttaagatggatgatctcctggccgaaatgcaacagatcgaacaatccaatttccgacaggccccgcaacgtgccccgggggtggcggacctggcgctctcagagaactgggcccaagagttccttgccgctggtgacgcagtcgacgttacccaagactacaatgaaacagactggtctcaggaattcataagtgaggtaactgatcccctgtccgtttccccggccagatgggccgaagaatatttggagcagagtgaagagaagctatggttgggagaaccagaaggcacggccaccgacagatggtacgacgagtatcacccggaagaggatcttcagcacactgcatctgacttcgtggctaaggtagatgatccaaagctggccaacagcgagggtacttcagacgcgtgggttgatcaattcacaaggcctgtgaacacttccgctttggacatggagttcgagagggccaaaagcgctattgaatctgacgtggatttttgggataagctgcaagccgagctggaggaaatggcaaagcgcgatgcagaagcccacccctggctgtcggattatgacgacctgacctcagccacgtacgataagggatatcaatttgaggaggagaatccgttacgagaccaccctcagcctttcgaggagggtctccggcggctccaggagggggatcttccgaatgccgtgttgctgttcgaagccgcagtgcagcaagacccaaaacatatggaggcctggcaatacctgggcactacacaggctgagaatgagcaagaactgctggcaatatccgcacttagacgttgccttgagttgaaacctgacaaccaaacagctctcatggcgcttgccgtcagtttcacaaatgagtctctccagcgacaggcctgtgaaacgctgagagattggctgagatacacacccgcctacgctcacctggtcacgcctgccgaagagggggccgggggggccgggctcggcccgtcaaagcggattctaggttctctactaagtgacagccttttcctggaagtgaaggagctgtttttggcggcagttcggctggaccccaccagcatcgatcccgacgtacagtgtggcctgggcgttctatttaacctgagtggcgagtatgataaagccgtggactgcttcaccgccgccctgtctgtccgaccgaacgattaccttttatggaataagctgggtgctaccttggccaatggcaaccagagtgaagaggccgtcgccgcatatagacgggccctggagctacagccaggctacatcaggtcccggtataacctgggaataagttgcatcaatttgggcgcccatagagaagcagtagagcactttctggaagccctcaatatgcagcgaaagtccagaggaccacggggggagggtggggctatgtccgagaacatctggagcacactgcggctggccctgtcaatgctgggtcagtccgacgcatatggggctgctgacgccagagatctctccaccttgctcacgatgttcggcctgccacaatag

SEQ ID NO: 199018 - DNA, 1896 bp, synthetic construct
  misc_feature 1..1896: note = Description of Artificial Sequence: Synthetic coding sequence
  source 1..1896: mol_type = other DNA
atggccatgcgggagctggtggaggccgagtgcggcggcgccaaccctcttatgaaactagctgggcactttactcaggacaaagctctacggcaagagggcctccgccccggcccttggccacccggagctccggcctctgaggccgccagtaagccactcggtgttgccagcgaggacgaacttgttgcagagttcttgcaggaccaaaacgccccactggtgtctcgggctcctcaaaccttcaaaatggatgatcttctggccgagatgcagcaaatcgaacaatccaattttagacaggccccccaaagagccccaggggtcgctgacttagcactgtccgagaactgggctcaggaatttttagcagccggcgacgccgttgacgttacccaggactataacgaaactgactggtctcaagagtttatctcagaagttaccgacccacttagcgtatccccagctcggtgggcagaagagtatttggaacagtccgaggagaagctttggttgggcgagccagaagggaccgctacagaccggtggtatgacgagtatcaccctgaggaagacttgcaacatactgcatctgacttcgtagccaaagtcgacgatccaaagcttgccaactccgaattcctaaaatttgtccgccagattggagaaggtcaggtgtccctcgaatccggagccgggagcggcagagctcaagctgagcaatgggctgctgagttcatccagcagcaggggacatccgacgcctgggtcgaccaatttacacggcctgttaatacctccgccctcgatatggagtttgagcgggcaaagtcggccatagagctccaggcagagctggaggagatggcgaagcgtgacgccgaggcacacccatggttatctgattatgacgacttgacatctgcaacttatgacaaaggctaccaatttgaggaagagaaccccctgagagaccaccctcagccattcgaagaggggctgaggagactgcaagagggcgatcttcctaacgccgtcctgctgttcgaggctgctgttcagcaagaccccaagcacatggaagcatggcagtacctcggaaccacccaggctgagaatgagcaggagctcttagccatcagcgccttgaggcgttgcctggaactgaaacctgataatcagactgcgctgatggctctggctgtgtctttcacgaacgagtctctgcaacggcaggcatgtgaaaccctcagagactggttgagatacacaccagcctacgcacatctggttacacccgccgaggaaggcgctggtggtgcaggccttggaccaagcaagcgcatcctcggttccctgctctcagacagcctgtttctagaagtgaaagagctcttcctggcagctgttagactcgacccaacgtcaattgaccctgacgttcagtgtgggctcggggtgctcttcaacttatctggagaatacgacaaggccgtcgactgctttaccgccgctctaagcgtacgacccaatgactacctgctatggaacaagctgggcgcgacactggccaatgggaaccagagtgaggaagcagtggctgcatataggcgggccctggagttgcagccaggatacatacgctcaagatacaatctggggatatcttgtatcaatcttggcgcccaccgcgaagcagttgaacacttccttgaggctttgaacatgcagcgtaagagcagagggcctagaggcgaaggcggtgctatgagcgaaaacatttggtctacactgaggctggccttgtcaatgcttggtcagtctgacgcctacggtgcggccgacgctcgcgacctcagtactttgctcacaatgtttggcctgccccagtag

SEQ ID NO: 199019 - DNA, 1233 bp, synthetic construct
  misc_feature 1..1233: note = Description of Artificial Sequence: Synthetic coding sequence
  source 1..1233: mol_type = other DNA
atggccatgcgggagctggtggaggccgagtgcggcggcgccaacccacttatgaagcttgcagggcactttacccaagataaagcgttaaggcaagaggggttgcgaccaggaccttggccccctggggctccagcctccgaggctgttagcgtactggaagttgagtcacccggcgccgctagtgaagctgcctccaagcccctaggcgtggcgagcgaagacgagttagtggccgagtttctccaggatcaaaatgctcccctggtgtcaagggctccccaaacttttaagatggacgacctgctagccgagatgcagcagatagagcagtctaacttcagacaagctccacagcgtgcacctggggttgccgacctcgctctgtccgaaaattgggctcaggagttcctggccgccggtgacgctgttgatgttacacaggactataatgagacagactggagccaggaatttatcagtgaggtcacggatcccctctcagtttcaccagcaagatgggccgaagaatacctggaacagtcagaggagaagctttggttgggggaaccagagggtacagccactgacagatggtacgacgagtaccaccctgaggaggatctgcagcatacggccagcgattttgtggcaaaagtggatgaccctaagctggctaactcagaaggcacctccgacgcttgggtagaccaatttactcggcctgttaatacctcagcactcgacatggaattcgaaagagccaaatctgctatcgaacttcaagcagaattggaggagatggccaagcgagatgcagaggcccacccctggctaagtgactacgacgatctgacctccgccacctacgacaaaggataccagtttgaggaagaaaaccctctgcgagaccaccctcagccgttcgaagaaggcttaaggcgcctccaagaaggggacctgccgaacgcagtcctcttatttgaggccgctgtccagcaggatcctaagcatatggaagcatggcagtacttaggcacaactcaggcagagaatgagcaggagttacttgccatttccgccttgaggaggtgcctcgagctcaagccagataatcagaccgctcttatggcactggccgtctctttcacaaatgaatctctgcagagacaggcttgcgaaacactgagagattggctcaggtatacccccgcgtatgcacacctcgtatag

SEQ ID NO: 199020 - DNA, 1983 bp, synthetic construct
  misc_feature 1..1983: note = Description of Artificial Sequence: Synthetic coding sequence
  source 1..1983: mol_type = other DNA
atgctgctgtgccgggcccaccgggtgctgggcctgcggggcgcccgagagctagcagtgaccatggcaatgagagaacttgttgaagccgagtgcggaggagcaaaccccttgatgaaattggctggacattttacccaggataaagcacttcgccaggagggtcttcgccccgggccatggcccccgggtgccccagcgtcagaagccgccagcaaacctctgggcgttgcttccgaagatgaactggttgccgagtttctgcaggatcagaacgcccctctcgtgtccagggccccgcagacgtttaagatggacgacttgctggccgagatgcagcagatcgaacagtcaaacttccggcaggccccccagcgtgccccaggcgttgccgatctggccttgtccgagaactgggctcaggagttcctggccgctggcgatgccgtagacgtgacgcaagattacaatgagacggactggtcccaggaatttatctctgaagtcaccgaccccctgagtgtgtctcctgcccgatgggccgaagaatacctcgaacagtcagaggaaaagttgtggctgggcgaaccggaggggactgcaactgatcgttggtacgatgagtatcacccggaggaggatctgcagcacacagcctccgattttgtggccaaagtggacgatccgaagctggccaattctgaatttcttaaatttgtgaggcagattggggagggccaggtgtccctggagtctggtgctggctcaggaagggctcaggcggagcaatgggccgctgagtttatccagcagcaaggcacaagtgacgcatgggttgatcagtttacgcggccagtcaacacgtctgccctggatatggagttcgaacgggcaaagtccgccatagagtcagacgtggatttctgggataagctccaggcagagctcgaggagatggctaagcgcgacgcagaggctcatccgtggctttccgactacgatgacttgacctcagcgacttatgacaagggataccagttcgaagaagaaaatccacttagggaccacccccagcccttcgaggaggggttacgtcgattgcaggaaggagatctgcccaacgctgttttgcttttcgaggccgctgtgcagcaggatccaaaacacatggaagcctggcagtatctcggcactacacaggctgaaaacgagcaggaattactggccatttctgcacttaggagatgcctcgaactcaaacccgataatcagacagccttaatggccctggctgttagttttacaaacgaatcccttcagcgccaggcctgcgaaacattacgggattggttgcgctatacgccggcatacgcacacctggtcaccccagcagaagagggcgctggcggcgctggcctcggtccatccaaacgcattctgggaagccttctctcggactcgctcttcctagaggtcaaagagctgtttctcgctgccgtccgactggaccccacgtcaatcgatccagatgtgcagtgtggtctgggggtgttgttcaacctgagcggcgaatacgataaagcggtggactgtttcacggcagcactctctgtccgcccaaatgactacctgctctggaataagctaggcgcaaccttggcgaacggaaatcagagcgaagaggctgtggcggcctaccgaagggccctggagctccagcctggatacatccggagccgatacaacctcggcatttcttgtattaatttaggtgcccaccgtgaggccgtcgaacattttctagaagcactcaacatgcagagaaagtccaggggccctcgtggtgaggggggcgccatgagcgagaatatttggtctaccttgaggcttgccctcagcatgctgggtcagagcgatgcatatggcgctgcggatgcacgggacctgtccacgctgctgaccatgtttggcttaccccaatag

SEQ ID NO: 199021 - DNA, 1920 bp, synthetic construct
  misc_feature 1..1920: note = Description of Artificial Sequence: Synthetic coding sequence
  source 1..1920: mol_type = other DNA
atggccatgcgggagctggtggaggccgagtgcggcggcgccaaccccctgatgaaactcgccggacactttacacaggataaagcccttcggcaggaaggcctgcgccccgggccttggcctcctggcgccccagccagcgaagccgctagcaagcctttaggggtggcctctgaagacgagctcgtagcggaatttctccaagaccagaatgcccctctcgtctcacgcgcacctcagaccttcaagatggatgatttgctggccgaaatgcaacagatcgagcagtccaacttcagacaagcaccacaaagagccccaggtgtggcagatctggccttgagtgagaattgggcacaagagtttttggccgcaggagatgctgtagatgtaacacaggattataacgaaaccgactggagtcaggaatttatctcagaagtgaccgaccctctgtccgtttcccctgccaggtgggccgaggaatacctggagcagagcgaggaaaagctctggctgggcgaaccagaaggcactgccacagatcggtggtatgacgagtaccatcccgaggaagatctccagcatacagcatctgacttcgtggctaaggtcgatgatcccaagctagccaactcagagtttctgaaattcgtacggcagatcggcgaaggacaagtgtcactggagtccggagcgggtagcggtcgcgctcaggcggagcaatgggccgccgaattcatccaacagcaggggacatcagacgcctgggtcgaccagtttacccgtcccgtaaatacatcagctctagatatggagtttgaacgggctaagagtgcaatcgaatctgatgtggatttttgggataaacttcaggcagaactggaagagatggcgaaacgtgatgctgaggcccacccgtggctcagtgattacgacgatttaacatccgctacgtatgacaagggatatcagttcgaagaggagaaccctttacgtgaccaccctcagcctttcgaggaggggttacgccggttacaggaaggcgacctgcccaatgcagttctcttgtttgaggctgcggtgcaacaggatcccaagcacatggaagcctggcagtatcttgggacaacacaggccgaaaacgagcaagagttgctggccatcagcgctctcagaagatgcctggagctgaagcccgataaccagacagccctcatggctctggccgtgagtttcacaaacgagagtcttcaacgacaggcctgtgaaacgctgagagattggctccgttataccccagcatacgcccacttagtgactcctgccgaagagggcgcaggcggcgcaggattaggacctagtaaaaggattctgggctccctgctgagcgactcactattcctggaggtcaaggagttgtttcttgcagcagttaggctggatcctacaagcatagatccggatgtccagtgtggtctaggagtgcttttcaatctgagtggcgagtatgacaaagccgtggactgctttacggccgctctgagcgtcaggcctaacgactacctgctgtggaacaaattgggcgcgacgctggcaaacggcaatcagtctgaggaggctgtcgcagcatacaggcgcgccctggagcttcagcctggatacataaggagcaggtataacctgggcatcagctgcataaacctgggagctcaccgggaggctgtggagcactttctggaagcactcaacatgcagaggaaaagtagaggccctcgcggagagggcggcgctatgtcggagaatatttggtccacgcttagattggcgctgagcatgctgggacagagcgatgcttacggcgctgctgatgcaagagatctgtctaccctacttacaatgttcggccttccccaatag

SEQ ID NO: 199022 - DNA, 1965 bp, synthetic construct
  misc_feature 1..1965: note = Description of Artificial Sequence: Synthetic coding sequence
  source 1..1965: mol_type = other DNA
atggccatgcgggagctggtggaggccgagtgcggcggcgccaacccactgatgaaactggctgggcatttcacacaagacaaagccctgaggcaagaaggccttaggcccggcccttggcctcccggtgcccctgctagcgaagccgtaagcgtcctggaggttgaatcgccaggcgcggcgagtgaagccgcatccaaaccgctcggggtcgcctctgaagacgaactggttgctgagttcctccaagaccaaaacgccccactcgtgtctagggccccacaaacattcaagatggacgacttgctggctgaaatgcagcagattgaacaatccaattttcgccaagctccgcagagagctcctggagtggccgatctggccctaagcgagaactgggcccaggagtttctggcagccggggatgcggtggacgtgacccaggactataatgaaactgattggagccaggaattcatcagtgaagtaactgaccccctttctgtgtcccccgcacggtgggccgaagagtacctcgagcagtccgaagaaaaattatggctcggtgaacctgaaggaaccgctaccgatagatggtatgacgaataccatcccgaggaagacctccagcatactgcgtcggattttgtggctaaggttgatgatcccaaacttgccaactccgagtttttgaaattcgttaggcagatcggtgaaggccaggtgtctctggagtcaggggccgggagcggacgcgctcaggcggaacagtgggctgccgaattcatccaacaacaggggacttctgacgcatgggttgatcaatttactaggcctgtgaatacctctgcactggacatggagttcgagcgcgcgaagtctgctatcgaaagcgacgtggacttctgggacaagttgcaggccgaactggaggagatggcaaagagggatgccgaggcacacccatggctgagcgactacgatgatctgacgagtgcgacttatgacaaagggtatcaatttgaggaagaaaacccgctgcgggaccatcctcagcccttcgaggaggggctccgccgtctacaggaaggtgatctccccaacgcggtcctcttgttcgaggcagctgtccaacaggatcccaagcacatggaggcgtggcaatatttgggcacaacgcaggccgagaacgagcaggagcttctggcaatcagcgctctgagacgctgtttagagttgaagcccgataaccagacggccctgatggctttagcggtaagtttcactaatgaaagccttcagaggcaagcatgcgagacactgcgagattggctcagatatactcctgcctatgcacacttagtaacacctgctgaggaaggggctgggggcgcaggcttgggaccttccaaaagaatcctgggaagcttactctcagactctctgtttttggaagttaaggagctcttccttgctgccgtaagattggaccccacatcaatcgacccagacgttcaatgtgggctgggcgtgctctttaatctgtctggagagtatgataaagctgttgattgcttcactgctgctttgtctgtgaggccaaatgattatcttctgtggaataagcttggagcaacactggcaaatgggaaccagagtgaggaagcagtagccgcctacaggagagccctggaactgcaacccggctacatcaggagccggtataacctcgggatctcatgtatcaatctgggtgctcatagggaagccgtcgaacacttcctcgaagctctgaacatgcagcgaaagtcaaggggccccaggggcgagggaggggctatgtctgagaatatttggtccactctccgactggcgctgagcatgctcggtcagagcgatgcctatggcgccgccgacgcgcgcgacctctccactctgttaacgatgtttggactgccacaatag

SEQ ID NO: 199023 - DNA, 1920 bp, synthetic construct
  misc_feature 1..1920: note = Description of Artificial Sequence: Synthetic coding sequence
  source 1..1920: mol_type = other DNA
atggccatgcgggagctggtggaggccgagtgcggcggcgccaaccctctcatgaaactggcaggacatttcacacaagataaggcactgcggcaggagggactgcggccgggcccctggcctcccggcgcgccagccagcgaggccgctagtaaacccctgggggtcgcttctgaagatgaactggtcgcagagttcctccaggatcagaacgcacctttggtgtcgcgggccccacaaacattcaagatggacgatctcctggcggaaatgcagcagatcgagcagtctaattttaggcaggccccgcagagagccccaggagtcgccgatctggctttgtcggaaaattgggcccaggagtttctggccgcaggcgatgctgtcgacgtgacccaagactataatgagacagactggagccaagagtttatctccgaggtgaccgatccgctgtccgtaagccctgcccgatgggccgaagagtacctcgagcaaagtgaggaaaagctatggttgggggagcccgaaggcacggccaccgaccgctggtatgacgagtatcaccctgaggaggacctacagcacacagctagcgatttcgttgccaaagtggatgatccaaagctagctaactctgagttcctcaagttcgtgagacagatcggtgagggtcaggttagtttagaaagtggtgcaggaagtggcagggctcaggcagagcagtgggcagctgagttcattcagcagcagggaacttcagatgcatgggtagaccaattcacgcggccagtcaatacctccgccctggatatggagttcgagcgagctaaatctgcaatcgagtccgacgtcgatttttgggacaaattgcaggcagaactggaggaaatggccaaacgtgacgccgaggcacacccttggctgtcagactacgacgacctgacaagtgccacatacgataagggctatcagtttgaggaggagaacccacttcgggaccatccccagccttttgaagagggactgcggcggctgcaggaaggcgatctcccaaacgccgtcttactatttgaagccgcggtgcagcaggatccaaagcacatggaggcctggcaatacctgggaacaacacaagctgaaaatgagcaagagctgctggcaatatcagctctgcggagatgcttggaactgaaacccgataatcaaaccgctttaatggcgctcgctgtctccttcaccaatgaatctcttcaacgtcaggcctgtgagacgctccgggattggcttcggtataccccagcatacgctcatctcgtcactccagcggaggaaggagccgggggcgcagggctgggtcccagcaaaaggattttaggaagcctgctgtccgattccttgtttctggaggttaaagagctcttcttggcagccgtgcggctggaccctacatctattgaccctgacgtccagtgcggtctgggcgtcttgtttaacctctccggggaatatgacaaggcagtcgattgtttcactgctgccttatctgtcagacctaacgactacctgttgtggaataagctgggtgcaaccctggccaacggaaatcaatctgaagaagccgtcgctgcctaccgcagagccctcgaattacagcctggatatatccgaagtcgttacaacctgggcatttcttgtattaacttaggcgctcaccgcgaagctgtagagcatttcctcgaagccctgaatatgcagaggaaatcgagaggtcccaggggggagggcggcgctatgtctgaaaatatctggtcaaccctgagactggcactgtctatgttgggccaatctgacgcctacggagctgccgacgcccgtgacctttcaacgctgctgaccatgttcggccttccccagtag

SEQ ID NO: 199024 - DNA, 345 bp, synthetic construct
  misc_feature 1..345: note = Description of Artificial Sequence: Synthetic coding sequence
  source 1..345: mol_type = other DNA
atggccatgcgggagctggtggaggccgagtgcggcggcgccaaccctctcatgaaacttgcgggacatttcacccaggacaaagcgttgcggcaggaagggctaagacctgggccctggccacctggggcgcctgcaagtgaggcagctagtaaacccttaggtgtagctagcgaagatgaacttgtcgccgagttcctgcaggaccagaacgcccccttggtgtctcgtgcccctcaaaccttcaagatggacgacctactggccgagatgcagcagatcgaacagtctaatttccgccaagcacctcagcgagcccccggggtcgccgacctggccttatag

SEQ ID NO: 199025 - DNA, 309 bp, synthetic construct
  misc_feature 1..309: note = Description of Artificial Sequence: Synthetic coding sequence
  source 1..309: mol_type = other DNA
atggccatgcgggagctggtggaggccgagtgcggcggcgccaaccctcttatgaaattggcaggccacttcacacaggacaaagctctacggcaggaaggcttaaggccaggaccatggccacccggggcgccggctagtgaggccgcctctaagcccctgggggtggccagcgaggacgagttggtagcggagttcctgcaagatcagaacgctcccctcgtaagccgcgctccgcaaacgtttaagatggatgatctcctagctgaaatgcagcagatcgaacagtccaactttagacaggcctag

SEQ ID NO: 199026 - DNA, 747 bp, synthetic construct
  misc_feature 1..747: note = Description of Artificial Sequence: Synthetic coding sequence
  source 1..747: mol_type = other DNA
atggccatgcgggagctggtggaggccgagtgcggcggcgccaaccccttgatgaagctagctgggcatttcacacaagacaaggctctccgccaggagggcctgcgccctgggccatggccccccggagcccctgctagcgaggcagcctctaagcccctgggagtggcaagcgaagacgagctggtggctgagttcctgcaggaccagaacgctcctctggtatccagagcaccccagacctttaaaatggacgacttgttggcggagatgcagcaaatcgagcaatcaaatttccgccaggcacctcaacgtgcccccggcgtggctgatttggccctgtccgagaattgggcacaagaatttttagcggctggcgatgcggtggatgttacacaggattacaatgagaccgactggtcgcaggagttcatcagcgaggtgactgaccctctgtcggtttcccctgcccgctgggcagaggagtacctggaacagagcgaagaaaaattatggttgggtgagccagagggcacggcgactgatagatggtacgatgagtatcatcctgaggaggacttgcagcataccgcaagtgacttcgtcgctaaagtggatgacccaaagctcgccaactctgaattcctcaaattcgttcgacagatcggtgaggggcaggtgagcttggagagcggagcaggcagcggccgcgcacaggcagagcaatgggcagccgagtttatttag

SEQ ID NO: 199027 - DNA, 315 bp, synthetic construct
  misc_feature 1..315: note = Description of Artificial Sequence: Synthetic coding sequence
  source 1..315: mol_type = other DNA
atggccatgcgggagctggtggaggccgagtgcggcggcgccaacccgttaatgaagctggccggccatttcacgcaggacaaagccttacgtcaggagggccttagacctgggccatggccccctggagcccccgccagcgaggcggcttcgaagccactgggggttgccagtgaggacgagctggtggccgagtttctccaggaccagaatgctcccctggtgtcccgtgccccccagacctttaagatggatgaccttctggccgagatgcagcagatagaacaatctaacttccggcaagcaccacagtag

SEQ ID NO: 199028 - DNA, 1875 bp, synthetic construct
  misc_feature 1..1875: note = Description of Artificial Sequence: Synthetic coding sequence
  source 1..1875: mol_type = other DNA
atgtaccagggccacatgcaggtggtgggcgtgaccctgaagaagaaatggcattgtctgcagaaaagcgatctcacactggccctgggcaaaggctctagagcagctgacaaggccgtagcaatggtgatgaaggaaatcccaagagaggagtccgcagaggagaagccactccttacaatgactagtcaactcgtgaatgagcagcaagaatccaggcctctgctgtccccaagcatcgatgatttcctttgtgaaactaagagcgaagcaatcgctcggcccgttacatcaaacacggcagtattgactactggcctggacctcctggacctctccgaacctgtgagtcaaacccagactaaagccaaaaaatctgaaccatcctcaaagacctcttctcttaagaagaaagcagatggctcagatctgataagcaccgatgcagagcagcgtggtcagccacttcgcgtccctgagacctcatcactggacttagatatccagacccagctggaaaaatgggatgatgtgaagttccacggtgatcgcaacaccaaggggcaccctatggccgagagaaaaagttcctcaagccggacggggtcaaaggaactcctgtggagttctgagcaccgctcccagccagagctatcaggggggaaaagtgcccttaattcagagtctgcgtctgagctcgaactcgtcgcaccgactcaggcacggctaaccaaggagcatcggtggggcagtgcacttttgtctcgcaatcacagcctcgaggaagaatttgaaagagccaaggcagccgtggagtctgacacagaattttgggataagatgcaggcggagtgggaggagatggcaaggcgaaattggattagcgagaaccaggaagcgcagaaccaggtgacgataagcgcatcagagaagggatactatttccataccgagaatccctttaaggactggcctggcgcattcgaggagggacttaagcggttgaaagagggcgatctccctgtgaccattctgttcatggaagctgcaattttacaggaccccggtgacgctgaggcttggcaatttcttgggataacacaagctgagaatgagaatgagcaagccgcaatcgttgccctccagaggtgccttgagctccagccaaataacctcaaggcactaatggcccttgctgtcagttacaccaatacggggcaccaacaggatgcttgcgacgcgcttaagaactggattaagcagaatccaaagtacaaatatctagtaaaaagtaagaaaggctctcctgggctgaccaggagaatgtccaagagtcctgtagacagctccgtgctcgagggggttaaggagctgtacctggaagcggcacatcagaacggcgatatgattgacccagacctgcagactggccttggtgtgctcttccacttatctggagagtttaatcgggccatagatgcttttaatgccgctttgacagtgcgtccagaggattattccctgtggaatcggctcggtgcaactcttgctaatggcgacagaagcgaggaagccgtggaggcctacaccagggcactggaaatccagccgggttttatccgtagccggtataatctgggtatttcctgtatcaatctaggtgcctaccgagaagccgtgtctaactttctaactgcgctgagccttcagcggaaatccagaaaccaacagcaagttcctcatccagccatcagcgggaacatttgggccgcgcttcgcattgctctgtccctgatggatcaacccgagctattccaggcagctaacttaggggatttggacgttctgttgcgcgccttcaacttggatccttag

SEQ ID NO: 199029 - DNA, 1875 bp, synthetic construct
  misc_feature 1..1875: note = Description of Artificial Sequence: Synthetic coding sequence
  source 1..1875: mol_type = other DNA
atgcaccagaacggcagccaggtggtgggcgtgaccctgaagaagaaatggcactgcctgcagaagtcggatctcaccctcgccctgggcaaaggctctcgtgccgctgataaggcagttgcaatggtgatgaaagaaattcccagagaagagagcgcagaagaaaagcccctcttaactatgacaagccagctggtaaacgaacagcaggaatctcggcctcttctgagcccatctatagacgatttcttgtgcgagacaaagtctgaagccatcgcaagacctgttactagcaatacagctgtcctgaccacaggccttgatttgctagacctttcggagcctgtctcccagacacaaaccaaagcaaagaagtccgagcctagtagcaagacttcctcactgaaaaagaaggctgacggctcagacctgatcagtaccgatgctgaacagcggggtcaacctctccgggtccccgaaacttcttcccttgacctcgacatacagactcaactcgaaaagtgggacgacgtcaagttccatggggacaggaatactaagggtcacccgatggctgaaagaaaatccagctccagccggaccggctcgaaagaactgctgtggtcatcggagcaccgctcccagcctgagttgagcgggggaaagagtgccctgaactctgagagtgccagtgagctggagcttgtcgccccaacacaagcgagactcacaaaagagcatcgctgggggtccgcgctcttaagtcgaaaccacagtctcgaagaggagtttgagagagccaaggcggcagttgaaagcgacaccgagttttgggacaaaatgcaggccgagtgggaggaaatggccaggcgcaactggatatcagaaaaccaggaggcacagaaccaggtcactatatcagcttccgagaagggttactatttccatacagagaaccccttcaaggattggcctggcgcatttgaggagggtctaaagcgcctgaaagaaggcgatctacccgtcaccatactatttatggaagccgccatcctccaggacccgggagacgctgaagcgtggcagtttctgggcataacccaggcagagaacgaaaatgaacaagcggccattgtggccttgcagcggtgtctggaactccagccaaacaacctcaaagccctgatggccctggctgtgtcctatacaaacactgggcaccagcaggatgcctgtgacgcactgaaaaattggatcaagcaaaatcctaagtataaatatctggtgaagagcaaaaaaggctcaccaggccttactcggaggatgagtaaatctccggtagattcttctgtgctagagggagtaaaggagctttatctggaggcagcccaccagaatggcgatatgatcgatccggacctccagacgggcttgggtgtgttgttccacctgagcggcgagtttaacagggccatagacgcatttaacgccgcactgaccgtacgacccgaagattactctttgtggaatcggctaggcgctacactcgcaaatggagatcgcagtgaggaagctgtggaggcctacacacgagcactggagattcagccaggattcatacggtcccggtacaaccttggtattagttgtatcaacttgggggcctacagggaagccgtgtccaatttcttaactgcactgtccctgcagaggaaaagccgaaatcaacaacaggtgcctcaccccgcaatctcaggaaacatttgggccgcactcagaatcgcactgtcgttgatggaccaacccgaactgtttcaggctgctaatctgggggacctggatgtactactcagagcttttaacttagatccttag

SEQ ID NO: 199030 - DNA, 1557 bp, synthetic construct
  misc_feature 1..1557: note = Description of Artificial Sequence: Synthetic coding sequence
  source 1..1557: mol_type = other DNA
atggtgatgaaggagatcccccgggaggagagcgccgaggagaagccactgctgacaatgaccagccagttggtaaacgagcagcaagaatcacgtcctcttctgtccccctcaatcgacgatttcttatgtgagaccaaaagcgaagcaatagcgcggcccgtcaccagcaatactgcagacatccaaacccagctggaaaagtgggacgatgtcaaatttcacggggaccgaaatactaagggacacccaatggcagaacgtaagtcgagctctagtaggactggatcgaaggagctcctgtggtcttccgagcatagatcccaacctgagctcagtggcgggaaaagcgccctcaacagtgagtctgcttcagagctggagctggtagcccccactcaggcgcgcctaaccaaggagcatcggtggggaagcgccctgctctcccgaaatcacagcctggaggaggagttcgaaagggccaaagctgccgtggaatccgacacagaattctgggacaaaatgcaggccgaatgggaggagatggcgagaaggaattggattagtgaaaatcaagaagcccagaaccaggtgaccattagcgcttctgagaagggctattattttcacaccgaaaaccctttcaaagattggccgggggctttcgaagaaggcctgaagcgtcttaaggagggtgatctccctgttactatcctgtttatggaagccgctattttgcaggatccaggcgacgctgaggcctggcagtttcttggcatcacccaggccgaaaacgagaatgagcaggcagcaatcgttgcattgcagcgctgcttggagctccagcctaacaacttgaaggcccttatggctttagctgtgtcttatactaataccgggcatcaacaagatgcatgcgacgccctaaagaattggatcaaacaaaacccaaaatacaagtaccttgttaaatctaaaaagggctcgccagggttgacaaggcgcatgtcaaaatccccagtcgactcttcagtactcgagggcgtgaaggaactgtacctggaggccgctcaccagaacggggacatgatcgatccagacctgcagactgggctgggagtcctttttcaccttagcggtgagttcaacagggcaattgatgctttcaacgctgcgctcactgtgcgccctgaggattattctctgtggaatcggctcggcgcaaccttggccaatggagatagaagcgaagaggccgtggaagcctatacacgggcactggaaattcagcccggcttcatacggagccggtacaacctgggtattagctgcattaacttaggcgcttacagggaagcagtctctaactttctgactgctctctcactccaaagaaagtcacggaatcagcagcaggtgccccatcccgccatttccgggaatatctgggctgctcttaggattgccctgagcctgatggaccaacctgagctgttccaagccgcgaacctcggcgatcttgacgtcctcctcagagccttcaacttggatccctag

SEQ ID NO: 199031 - DNA, 1809 bp, synthetic construct
  misc_feature 1..1809: note = Description of Artificial Sequence: Synthetic coding sequence
  source 1..1809: mol_type = other DNA
atgtaccagggccacatgcagggcaagggcagccgggccgccgacaaggccgtggccatggttatgaaagaaattcctcgcgaagagagcgcagaagaaaagccccttctgaccatgacaagccagctggttaatgaacagcaggaaagcaggccccttttatctccgagtatcgacgactttctatgtgaaactaagagcgaggcaatcgcacggcccgtcaccagtaacaccgcagttctgacaactggattagaccttctggacctgagcgaacctgtctcccaaacccaaaccaaagcaaaaaaatccgagccctcctccaaaacaagcagcctcaaaaagaaggccgatggctcagacctgatttctaccgatgccgagcaacggggacaacctctgcgcgtacccgaaacctcgagcctggatctagacatccagactcaactggaaaaatgggatgatgttaaatttcacggcgacaggaacacaaaaggccacccaatggcagagaggaagtccagcagtagtcggaccggttcaaaggaactgctatggagctcagagcatcgaagtcagcctgagctgagtggtggaaagtccgcactcaactccgaatctgcatccgaactggaactggtcgctccgactcaagctaggctcaccaaggagcacaggtgggggtcagctttgttgagccgaaaccattccctggaagaggagtttgagcgtgccaaggctgctgtggagagtgacaccgaattctgggataaaatgcaggctgagtgggaggaaatggctagacgtaactggatctccgagaaccaggaagcacagaaccaggtcactatctccgctagcgagaaaggatactacttccatactgaaaacccatttaaagactggcctggagcctttgaagagggacttaagaggctcaaagagggggatctgcccgtgacgattctgtttatggaagcagccattttacaggacccgggtgatgcagaagcctggcagttcctgggtataacccaggctgagaacgaaaacgagcaggccgccatcgtggcactacagagatgcctcgaactgcagcctaataacctgaaggcattgatggccctcgctgtgtcatacactaacacaggacaccaacaggatgcttgtgacgccctcaaaaactggattaagcagaatccaaagtataaatacttggtgaaatcaaaaaagggaagtcccgggttgactagaagaatgagcaagagccctgttgatagcagtgtcctcgaaggcgtcaaggagctgtacttagaagctgcccatcagaacggcgatatgattgacccagacctgcagacaggtctgggcgtcctgtttcacttaagtggtgaatttaaccgggcgatcgacgctttcaatgctgcccttacagtgcgaccagaggactattcactgtggaaccggctcggggctactttagctaatggcgaccgcagtgaggaggccgttgaggcatataccagagcgttggaaattcaaccaggattcatccggtcccggtataatctggggatcagttgcataaacttaggtgcttaccgcgaagctgtgagcaacttcttaaccgcgcttagtctgcagagaaagagcaggaaccagcagcaagtgcctcatcccgcaattagcggaaacatctgggcggctctccgtatcgccctgtccctcatggatcagcctgagctgttccaggctgcgaacctaggtgatctggatgtgttgttgagggcctttaacctggacccttag

SEQ ID NO: 199032 - DNA, 1545 bp, synthetic construct
  misc_feature 1..1545: note = Description of Artificial Sequence: Synthetic coding sequence
  source 1..1545: mol_type = other DNA
atgagcagcctgagcctgaagcccctggtgcaggtgagcgtgggcgcctttgttcagctggtcaacgaacagcaggaaagcaggccacttctgagccccagcatcgatgactttctgtgtgaaaccaagagtgaggccattgctcgaccagtcaccagcaatactgccgacatccagacacaactggagaaatgggatgatgttaaattccatggcgacaggaacaccaaaggtcatcccatggccgaacgcaagtcaagctcttctcgtactggaagtaaagaactgctgtggtcatctgaacatcggtcccagccggagctgagtggaggaaagtctgccctgaacagcgagagcgcgtctgagttagaacttgtagcaccgactcaagcacgtctgacaaaagagcacagatggggatctgccctcctttctagaaaccattccctcgaggaagagtttgaaagggccaaagctgccgtggaaagtgacaccgaattttgggacaaaatgcaagctgaatgggaagagatggccaggagaaactggattagcgaaaatcaggaagctcaaaatcaagtgaccatatctgcctctgaaaaagggtactattttcacactgagaaccccttcaaagactggcctggagctttcgaagaaggcctgaaaagacttaaagaaggagatctgcccgtgactattctgttcatggaagcagcgatcctccaagatcccggggacgcggaggcctggcagtttctcggtataacacaagctgagaacgagaatgaacaggcagccatcgtggcactgcaaagatgtctggaactgcagccaaataacctcaaggcccttatggccctcgccgtgtcatacaccaacactggtcatcaacaggacgcctgcgatgctctgaaaaactggataaaacagaatcccaagtacaagtatctggtgaaatccaaaaaaggatccccaggcctgacccgacgcatgtccaaatcccccgtggatagctctgtgctagaaggtgtgaaggaattgtacctggaggcagctcaccagaacggagatatgattgatcctgacttgcagacagggctcggtgtgctcttccatctttccggcgaatttaatagggctatagatgcattcaacgcagcacttaccgttcgacctgaagactattcgttgtggaacagactgggagcaactctagccaatggtgaccggagcgaggaggccgtggaagcttacacacgagcactggagattcagccgggatttattagaagcagatacaacttgggcattagttgcatcaaccttggcgcttatagagaggcggtgagcaacttcctcactgccctgtccctccagcgcaaatcccggaaccagcagcaggtaccacatccggcaatctcagggaacatctgggccgccctcaggattgcgctaagtcttatggaccagccggagctcttccaagctgcaaatttgggggacctcgatgtgttgctgagggcctttaacctggatccctag

SEQ ID NO: 199033 - DNA, 1881 bp, synthetic construct
  misc_feature 1..1881: note = Description of Artificial Sequence: Synthetic coding sequence
  source 1..1881: mol_type = other DNA
atgtaccagggccacatgcagaagagcaaggagcagggctacggcaagctatcttccgacgaagacttagagattattgtagaccagaaacaggggaaaggctccagagcagccgataaagctgtggccatggtcatgaaagagatccctagggaagaatcggctgaggagaaacctctgttaacaatgacgagccagctggtcaatgagcaacaggaatctcgcccactactgtccccttccatcgatgatttcctctgtgaaaccaaaagcgaggctatcgcaagacctgtaactagcaatacggccgtgttaacaacaggactggacctattggaccttagcgaacctgtatctcagacacagaccaaggccaaaaagtcagaaccctcttctaagacctcctccctcaagaaaaaggcagacgggtctgatcttattagcaccgatgccgagcagcggggacagccattgagagtgcccgaaacttcgtctctggacctggatattcagacgcaattagagaagtgggacgacgtgaaattccatggagaccggaacactaaggggcaccccatggcagagcggaagagcagctcaagccggacaggatctaaggaattgctgtggtccagcgaacaccgtagtcaaccggagctcagtggaggtaagagcgctcttaattccgaatcggcttcagagcttgagctcgtcgcccccacacaggcccgcctcactaaagagcaccgctgggggagtgcacttctatcccgaaatcactccctagaagaggaattcgaaagagctaaggccgccgtagagtcagatactgaattctgggataagatgcaggccgaatgggaggaaatggcacgaagaaactggatctctgagaaccaggaggctcagaatcaagtgactatttctgccagtgagaagggttactatttccacaccgaaaacccgtttaaggattggccaggcgcctttgaggagggcctgaagagactgaaagagggcgacctgcctgtgacgatcctgtttatggaggcagccattctacaggaccctggggacgctgaggcatggcaatttttgggtattacacaggctgaaaatgagaacgaacaggccgccatcgtggctcttcagaggtgcctagagctccagccgaacaatcttaaggcactcatggccctagcagtctcatacacgaacacggggcatcaacaggacgcttgtgacgcactgaaaaactggattaagcaaaatccaaaatacaagtacctggtcaagagtaagaaggggagccccggattgacgcggcggatgagtaagtccccggttgactcctccgtcctggagggtgtaaaggagttgtacctggaggctgcacatcaaaacggggatatgatagaccccgacctacagactgggctcggtgttttattccatttatcaggcgaattcaacagggccatcgatgcgtttaacgctgctctcactgtccggcccgaggactacagcttgtggaatcgcctcggagctacactggcaaatggagaccgctccgaggaagcagtggaagcttatactcgtgccctggaaattcagcccggcttcattcggtctcgttacaacctcggaatctcgtgtatcaacctcggcgcctaccgggaagcagtctcaaattttcttaccgctctaagtctgcagagaaagtccaggaatcaacagcaggtgccacatcccgccatcagtgggaatatctgggccgccctgagaatcgccctctcactgatggaccagccagaattgtttcaggccgccaaccttggtgacctggatgtactgttgcgcgccttcaacctagacccatag

SEQ ID NO: 199034 - DNA, 1752 bp, synthetic construct
  misc_feature 1..1752: note = Description of Artificial Sequence: Synthetic coding sequence
  source 1..1752: mol_type = other DNA
atggtgatgaaggagatcccccgggaggagagcgccgaggagaagcccctcctgactatgacatctcagctcgtgaacgaacaacaagaatcccgcccccttctcagccctagcatcgatgatttcctttgtgaaaccaagtccgaggctatagcccgccctgtgacctcaaacactgccgtgctgacaaccggcctcgatctcctggacctctcagaacccgtgagccaaactcagaccaaagctaaaaagtcggagccatcctcgaagacatcatctcttaaaaagaaggccgacggatccgacctgatttctacggacgcagaacagcgcggacagccattacgggtccccgaaacgagcagccttgatttagacatccagactcagcttgaaaaatgggatgatgtgaagttccatggagaccgaaatacgaaagggcatccgatggctgaaagaaaatcctctagttctcgaaccgggtcaaaggaattactttggtcgtcggagcacaggagccagccggagctgagtgggggcaaatcagccctgaattctgagtctgcctccgagctggaacttgtggccccaacacaggcccgcctcaccaaggagcatcggtggggatccgcccttcttagccgaaaccacagcctcgaggaggaatttgagagagcaaaggcagctgtcgaatcagacactgagttctgggacaaaatgcaggctgagtgggaggagatggcaagacgcaattggatctctgagaaccaggaagctcagaaccaagtgactattagcgccagcgaaaaggggtactactttcatacggaaaaccccttcaaagactggcccggggcgtttgaggaggggttgaagaggctgaaggagggtgatctgcctgtcacgattctttttatggaggcggcaattctccaggaccctggggacgccgaggcttggcagttcctgggtatcacgcaggctgagaatgaaaatgagcaggccgcaatcgtagctctgcaacgttgtcttgagctccaacccaacaacctgaaggcccttatggccctggctgtttcttatacaaacaccggccaccagcaagacgcctgcgatgccctgaagaattggatcaaacagaatcctaaatataaatacctagtgaagtccaagaaaggaagtcctggactcaccagacgaatgtctaagtcacccgtggactcatctgtactggaaggagtaaaggagctctaccttgaggctgctcatcagaacggggatatgattgacccagacctgcaaactggcctgggcgtcctgttccacctctctggcgagttcaacagggctatcgatgcctttaacgctgcccttacggtgagacccgaggattattctctatggaacaggctcggagctacactagccaatggtgacaggagcgaggaggcagtcgaggcatacacacgcgccctggaaatacaacctggattcattcgctctagatacaatttgggaatatcctgtatcaatctgggcgcttacagggaagccgtttctaattttcttactgcgctctctctgcaacgcaagagtagaaatcagcagcaagtaccacatcccgctatctccggaaacatatgggcggccctgagaatcgctctgagcctgatggaccagccagaactgttccaggctgcaaatctgggtgacctcgatgtgctgctgagggcctttaacctcgacccatag

SEQ ID NO: 199035 - DNA, 1776 bp, synthetic construct
  misc_feature 1..1776: note = Description of Artificial Sequence: Synthetic coding sequence
  source 1..1776: mol_type = other DNA
atgtaccagggccacatgcagaagagcaaggagcagggctacggcaagctcagttccgacgaggatctggagatcatcgtggaccagaagcagctagtgaatgagcagcaagaatcaaggcccctgctctctccttccattgatgatttcttgtgtgagaccaagtctgaagcaattgcccgtccagtcacctctaatactgccgtcctgaccacagggctagacctgctagacctgtctgaaccagtgagccaaacacaaacaaaggccaaaaagagcgagccgtcatcgaaaacgagttctctaaaaaaaaaagccgatggctcagatttaatctcaacagatgcagagcagcgcgggcaacctttgagggtgccagagacaagcagcctggatcttgatattcagacgcagctggagaagtgggatgacgtgaagttccatggcgaccgaaacaccaaagggcatccaatggccgagcgaaaatcatccagctcacggacgggtagcaaagagttgctttggagctcagagcataggtcacagcccgagctgagtgggggcaagagcgccttgaacagcgagagtgcctcagaattggagctcgtggcgccaactcaggcacgtctaaccaaagagcacagatgggggtcggccctgttgtctcggaaccatagccttgaggaggaattcgagcgagccaaggccgcagtggaatctgacactgagttttgggacaaaatgcaggccgaatgggaggaaatggctcgcagaaactggatttccgagaaccaggaggctcaaaaccaggtcacgatctcagcgagcgaaaaaggttattatttccacacagaaaacccatttaaggactggcctggagcctttgaggaaggactgaaacggcttaaagagggcgatctgcccgtgaccatcttgtttatggaggccgcgattttgcaggaccctggtgacgccgaagcttggcaattcctggggatcacccaggcagaaaacgagaatgagcaggctgccatcgtggccctgcagaggtgcttggagctgcagcctaataacctcaaagccctgatggccttagcagttagttacacgaacactggccaccagcaagatgcatgtgatgctcttaaaaattggattaaacaaaaccctaaatataaatatctagttaagtctaaaaaagggagccccggcctgacgagacggatgagcaaatctccagtggactcctccgtactggaaggcgtgaaggagctctatctagaggcagctcatcagaacggcgatatgatcgaccccgatctgcaaactgggctcggggtgctgttccacctctccggcgagttcaatagagcgatagacgctttcaacgccgccctgacggtccgccccgaagattactccctctggaatcggttgggggcaacactcgctaacggcgacagatccgaggaggccgtcgaagcctacacacgcgcactggagatacaacccggctttataaggtctcgttacaacctcgggatttcctgcattaatttaggagcctaccgcgaagcagtaagtaacttcctaaccgccctgtcactgcagagaaaatccagaaatcagcagcaggttcctcacccggctataagcggcaacatctgggccgccctaaggattgctctgagcctgatggatcaaccggagctgttccaagccgccaatttaggcgatctggacgtcctactgcgcgccttcaacctcgacccttag

SEQ ID NO: 199036 - DNA, 2217 bp, synthetic construct
  misc_feature 1..2217: note = Description of Artificial Sequence: Synthetic coding sequence
  source 1..2217: mol_type = other DNA
atggccctggccgtgctgcgggtgctggagcccttccccaccgagacaccaccactagctgtcctactgccccctggcggaccatggcccgcagcagagttgggcctggtgcttgctctgaggcccgcgggggagtcgccagcgggtcctgcgctgctcgtggccgccctggagggccccgatgcgggcaccgaagagcaaggcccgggacccccccagctcttggtatctcgcgctttgttgcggttactggctttaggaagtggcgcttgggtgagggcaagagcagtcagacggccccccgccctcggatgggctctactgggtacgtcccttgggccagggttggggcctagggtgggacctttgctggtgagaaggggcgagactctgccagtccccgggcccagggtgttggagacaagaccagccctgcagggactcctcggtccaggcacacgactggccgtcacggagttgcgcggacgcgctaggctgtgcccagagagtggggatagctccagacctcctcccccacccgtcgtttcttcttttgctgtctcaggaacggttaggcgactgcagggggtattgggagggaccggggactcgctcggcgtgtcacgcagctgtcttagaggacttggcctgtttcagggcgagtgggtttgggtggcccaagcacgggaaagttctaataccagtcagcctcatcttgcccgggtgcaggtgcttgagccccgttgggatctgtcagacaggttggggcctggcagtgggcctttaggggaacccctggccgatggcctcgctttggtgccagcgacactagcttttaatctggggtgtgacccattggagatgggtgaacttcgcatacagcgctacctggaaggatccattgcgcctgaggacaagggaagttgctccttattgccaggtcctccctttgctcgggagctgcacattgaaatcgtatcctctcctcactattcgaccaatgggaattatgatggggttttgtatagacactttcaaattccccgtgtggtgcaagagggcgacgtgctgtgtgttcctactattggacaggtcgagatcctggaaggcagcccggaaaaattgccgcgctggcgggaaatgtttttcaaggtgaaaaaaactgtgggagaagctccggatggtccagcatctgcctatctggccgataccacccacacttccctctacatggtcggctctacactgtctcctgtgccatggcttccaagtgaggagagcacactgtggtccagcctgagcccacccgggctggaggctttggtgtctgagctatgtgccgtactgaagccccgcctgcagcccggtggggcactcttaaccggcaccagctcagtgcttttgcgcggtccgcctggctgcgggaaaacgactgtggtggctgctgcatgctcccacttgggcctccatctgctgaaggtgccctgcagctctctatgtgccgagagctccggtgctgtcgagaccaaacttcaggcaatcttcagcagggcccgacggtgccgcccagccgtactcctactcacagccgtcgacctgttgggtcgggatcgagacgggcttggcgaggacgcaagggtgatggccgtgctgaggcatctcttactcaacgaggatcccctgaactcttgcccccctttgatggtggtggcaaccacttcacgggcccaggacctccccgctgacgtgcagacagcatttcctcacgagttagaagtgccagcactcagcgaagggcaaaggttatcaatcttgcgtgctctaaccgcgcacctgccactcggtcaagaggttaacctcgcacagctagcccggagatgcgcgggcttcgtggtgggggacctgtacgccctcctgactcactcgagcagagccgcttgtacacgcattaagaactccggccttgctggcggtctgacggaagaggatgagggcgaattgtgcgccgcgggattccctctgctggctgaggattttggacaagcattagagcagctgcagacagctcactcacaggcagtaggtgcacccaaagttgaaactaagtctctcgagtgcttgcccggtccaggtctccagctccatgccctttcctccctaatgaactggactctgtggcctcaagccggcggagaagttgaaatcctagaagaatag

SEQ ID NO: 199037 - DNA, 2943 bp, synthetic construct
  misc_feature 1..2943: note = Description of Artificial Sequence: Synthetic coding sequence
  source 1..2943: mol_type = other DNA
atggccctggccgtgctgcgggtgctggagcccttccccaccgagacaccgccactcgcagtgctcctgcctcctggcgggccctggcccgcagcagagcttggcctcgtgctggcattacgtcccgctggagagagcccagccggcccagcgctgctggtcgccgctcttgaaggccctgacgctggcacggaagaacaaggcccaggcccccctcagttgctggtgtcccgagctctgctacggctcctggcccttggctcgggggcgtgggtcagggcacgcgctgtgaggcgcccccccgccctcggctgggccctgctggggacttctctagggccgggcttgggtccgcgggtcggaccactcttggtaaggcgcggagaaacactccccgtcccaggtcccagagtcctcgagactaggcccgctttgcagggcctcctcggccccggaactaggttggccgttactgagttacgaggccgcgcacggctgtgtcctgagtccggggacagctctagaccacctcccccgccagtggtctcatcatttgcagtatctgggacggtgaggagactacagggggtgctgggcggaaccggagactctttaggcgtgtctcggtcctgtttgagaggcctaggcctcttccagggcgagtgggtgtgggtcgcgcaggcccgtgagtcgagcaatacgtctcagccacacctggcacgcgtgcaggtgctagaacctcgctgggacctaagtgatcgcttgggcccggggtcaggacccctgggggaacctttggcagatggactggccctcgtgcccgctaccctggccttcaatctgggttgtgacccgctggaaatgggggaactgagaatccagaggtatctggaagggagtatagctccggaggataaaggcagctgctctctcttgcccggtcctccttttgctagagagttgcacatagaaatcgtcagcagtccacactatagcacaaacgggaattacgacggagtgctttacaggcactttcagattccccgggtggtgcaggagggagacgttctgtgtgtgcccactatcggacaggtcgagatcctcgagggaagcccagaaaagctgccccgttggagggaaatgttcttcaaggtgaagaaaacagtaggggaggctccggatggacctgcttctgcctatctggcagatacgacccatacaagtctgtatatggtcggctccactcttagtcccgtcccttggttgccctcagaagaatccactctctggtccagtctgagccctcctggtttggaggcattggtttcagagttatgtgcagtccttaaacctcgcttacaacccgggggcgcgcttctcactgggaccagctccgtactactcagaggcccgcctgggtgtgggaaaactacagttgtggcagctgcttgtagccacctgggactccacctccttaaggtgccctgctctagcttgtgcgccgagtcttccggagctgtcgaaaccaaactgcaggctatttttagccgagcccgtcgatgccgccctgctgtattactcctgaccgctgtagacctgctcgggcgggacagggatggactgggcgaggacgctcgagtcatggcagtgttgaggcacctgctattgaacgaagaccccctcaattcctgtccacctttgatggtggtcgctacaacctcaagggcccaagacctgccagctgacgtgcagaccgcttttccacacgagctcgaagtccctgccctcagtgagggtcaacgactctccattttgcgggccctgactgcacacctgcccctcgggcaggaggtgaacctggcccagttggcacgtcggtgtgctggctttgtggtgggagatctgtatgcgctactgacccactcttcccgcgccgcgtgcacccgtatcaaaaacagtgggttggccggcgggttaacggaggaggacgagggggagctatgtgccgccgggttccccttactagccgaggactttggacaggcacttgagcagctgcaaactgcacattcccaggcggtcggggccccaaagattccctcagtctcctggcatgacgtgggcggcctccaggaagtcaagaaagaaattctggaaactatccagttgccactggaacatcctgagctgctgtcactcggtctcaggagaagtggtctcctgctgcatgggccacccggaactgggaaaacactcctagctaaggccgtggccacggagtgctcacttaccttcttgtcagtgaagggccccgagttaataaacatgtatgttggccagtccgaggagaatgtgcgagaagtcttcgctagagccagagccgccgccccttgtatcattttctttgacgagttggactccttggccccgagcagaggacgctccggagatagcggcggtgtcatggatcgcgttgtgtcccagctgttggccgagctcgatggactgcactctacacaggacgtctttgtgatcggggccaccaatagacctgacctactggaccccgcattgcttaggccaggccgttttgacaagctagtttttgtgggggccaatgaggatcgcgcctctcaacttagggtcctgtctgcaatcactcgtaagtttaaactcgagccttcggtgtccctcgtaaacgtgctcgattgctgtccgccacagctgaccggcgcagacctgtacagtctttgcagtgatgccatgacagcagccttgaagagaagagtgcatgatctagaggaagggttggaacctggctcttctgcacttatgcttactatggaggacctgctccaggcagccgcccggcttcagcctagcgttagcgaacaggaacttttaaggtacaagcgaattcagaggaaattcgccgcgtgctag

SEQ ID NO: 199038 - DNA, 972 bp, synthetic construct
  misc_feature 1..972: note = Description of Artificial Sequence: Synthetic coding sequence
  source 1..972: mol_type = other DNA
atgagcgccgtgtgcggcggcgccgcccggatgctgcggacccccggtcggcacggctatgccgctgagttttccccttatctacctggtcggctcgcctgcgctaccgctcagcactatggaatcgctggttgtggcactctgctgatactcgatccggatgaggccggactgcgactgtttcgtagctttgactggaacgatgggctgttcgatgtcacctggagcgagaacaatgaacacgttctgattacttgttccggggacggcagcctacaactgtgggacactgccaaagccgcaggtccgctccaagtgtacaaagaacacgcacaagaagtatacagtgtggactggagtcagacccggggggaacaactggtggtgtccggctcctgggaccagactgttaagctgtgggatcccaccgtgggaaaatctctctgcacattcaggggacatgaaagtattatctatagcacaatttggtctccgcacatcccaggttgtttcgcgtctgcaagtggcgatcagacgttgcggatttgggatgtgaaagccgctggcgtgcgaatagtaataccagcccatcaggcagaaattttgagctgcgactggtgcaaatataacgagaatcttcttgtcacaggcgccgtggattgtagcttaagaggctgggacctaaggaacgtgagacagccagtttttgagctgctgggtcatacctatgccatcaggagggtcaagtttagcccgtttcatgccagcgttcttgcctcgtgttcatacgatttcacagtgcggttttggaacttttctaaaccagacagtctactagagactgtcgagcaccacacggaattcacatgtgggttagacttttctctgcagagccctactcaagtagctgattgtagttgggacgaaaccatcaagatctatgaccccgcatgcctcactatacccgcctag

SEQ ID NO: 199039 - DNA, 369 bp, synthetic construct
  misc_feature 1..369: note = Description of Artificial Sequence: Synthetic coding sequence
  source 1..369: mol_type = other DNA
atgagcgccgtgtgcggcggcgccgcccggatgctgcggacccccggaaggcacggatacgcggctgaattttctccttacctacctggcaggctagcgtgtgcaaccgcccagcactacggaattgctggctgcggtacactgctgattttggacccagatgaggccgggctcaggcttttccgctcctttgactggaatgacggcctgttcgatgtaacctggtctgagaataacgagcacgttctgataacctgtagcggtgatggctccctgcaactttgggatactgcaaaggccgctggccccctgcaagtctacaaagagcacgcacaggaatacgtgcaggggtcgtgtgtggtgaagtag

SEQ ID NO: 199040 - DNA, 843 bp, synthetic construct
  misc_feature 1..843: note = Description of Artificial Sequence: Synthetic coding sequence
  source 1..843: mol_type = other DNA
atgagcgccgtgtgcggcggcgccgcccggatgctgcggacccccggccggcacggatatgcagctgagtttagcccttatctgcctggccgccttgcctgcgccaccgcccagcactacgggatcgcgggctgtggaaccctgttgatcctcgatcccgatgaagccggcttgcgcctattccgcagcttcgattggaatgacggcttgtttgatgtgacctggtctgaaaacaacgaacacgtcttaatcacatgcagcggcgacgggtccctccagctgtgggacaccgctaaggccgccggcccactgcaggtctacaaagaacacgcccaggaggtgtacagcgtggattggtctcagactcggggtgagcagcttgttgtgtctgggagctgggaccagactgtaaagctctgggatccaacagtgggcaagtccctctgcacgttcaggggacatgagagcatcatatactcaaccatttggtcccctcacatacctggatgctttgccagcgcttcaggggaccaaaccctgcggatatgggacgtgaaagccgcaggtgtgaggatcgtaatccccgcccatcaggctgagatcctaagctgtgactggtgcaagtacaacgaaaatcttctggtgaccggcgccgttgactgttccctccgtggttgggacctgcgcaacgttcgccaaccagtgtttgaactcctgggccatacttacgcaataagaagggtaaagatggagtcttgcccagtgacacaaacaaggagccagctgaccgcaacgagcgccttctgggtacaggccgtgttgcttccgcaacctactgaatag

SEQ ID NO: 199041 - DNA, 912 bp, synthetic construct
  misc_feature 1..912: note = Description of Artificial Sequence: Synthetic coding sequence
  source 1..912: mol_type = other DNA
atggccagctgggccaagggccggagctacctggcccccggcctgctgcagggtcaagtcgccatcgtgaccggaggcgccaccggtatcggtaaggccatcgtgaaagaacttcttgaattgggtagcaacgtggtaatagcctcccggaagctcgaaaggctgaagtctgcagccgatgagctgcaggctaaccttcctcccactaagcaagcccgcgtgatccccatccagtgtaacatacgcaacgaagaagaggtcaacaacctggtgaaaagcaccctggatacttttgggaaaattaactttctggtcaataatggcggggggcagttcctgagtcctgctgagcatatttcttctaagggttggcacgcagtgttggaaaccaatctgaccggtaccttctacatgtgcaaagctgtctactcttcgtggatgaaagaacatggcgggtccattgtgaacattatagtgcccactaaagccggttttcctctggctgttcactccggggctgccagggccggtgtgtacaacctgaccaaatcactggccctggaatgggcctgctccggaattcgtatcaactgtgttgcaccaggcgtgatttactctcagaccgctgtcgagaattacggctcctggggacaatcgttcttcgagggtagctttcagaaaattccagccaaacggatcggagtgccagaggaagtgagcagtgtcgtatgtttcctcctgtcgccagcagccagtttcatcactggacagtcagtggatgttgatgggggccgttctctgtacacacattcctatgaggtacccgaccatgataattggcccaagggtgcaggggatctctcagtggtaaagaagatgaaagaaactttcaaggagaaggctaagctgtag

SEQ ID NO: 199042 - DNA, 1407 bp, synthetic construct
  misc_feature 1..1407: note = Description of Artificial Sequence: Synthetic coding sequence
  source 1..1407: mol_type = other DNA
atggtggacaccgagagccccctgtgccccctgagccccctggaggccggggacctagagtcccccctttctgaggaatttcttcaagagatgggcaacatccaggagatctcacagagtatcggtgaggattctagcggaagcttcggctttacagaataccaatatttagggagctgcccaggaagcgatggatctgtgataaccgacaccctgtctcccgcgagtagtccgtcctccgtcacttaccccgtcgtccccgggtccgtcgacgaatccccctctggggccctcaacatagagtgtagaatctgcggagacaaagcctctgggtaccactacggagtgcacgcatgtgagggctgtaaaggtttctttcgccgcacaatccgtctgaagctggtttacgacaaatgcgacagaagctgcaaaattcagaaaaaaaatagaaataagtgccagtactgtcggtttcataagtgcctcagtgtgggtatgagtcacaatgcgatcagatttgggcgcatgccgcgatccgaaaaagccaaactcaaggccgagatcttgacatgtgaacacgatatcgaggactcagaaacagccgacctaaaaagcctggctaaaagaatttatgaggcatatctgaagaactttaatatgaataaagtgaaagcccgggtcattttgtctggaaaggcgtccaacaaccctcctttcgtaattcatgacatggaaacgctctgtatggcggagaagacattagttgctaagctggtagcgaacggaattcaaaacaaagaagcagaggtgcggatcttccattgctgtcagtgcacctctgtggaaacagtcacagagctcaccgagttcgcaaaggccattccaggcttcgcaaaccttgaccttaacgaccaggtgacactcttaaagtatggggtctatgaggcaatttttgcaatgttgagttccgttatgaacaaagacgggatgctcgttgcttatggcaacggatttatcacccgcgagttcttaaagtcacttcgaaagccattctgtgatattatggaacctaaattcgatttcgcaatgaaattcaacgcgctcgagttggacgactctgacatcagcctgtttgttgctgccatcatctgttgcggcgatcgtccaggcttacttaacgtgggtcatatcgagaaaatgcaggaggggatagtccacgtcctgaggcttcacctacagtccaaccatcctgatgacatattcctctttcccaagctcctgcagaaaatggccgatctgaggcagctcgtgacggaacatgcacagctggtgcagataataaagaaaacagagtcagatgcggcgttacacccactcctgcaggaaatctatagggatatgtactag

SEQ ID NO: 199043 - DNA, 1407 bp, synthetic construct
  misc_feature 1..1407: note = Description of Artificial Sequence: Synthetic coding sequence
  source 1..1407: mol_type = other DNA
atggtggacaccgagagccccctgtgccccctgagccccctggaggctggtgacctggagtcacctctttcagaagagttcttacaggaaatgggcaacatccaggaaatatcgcagtccattggagaggatagtagtggttctttcgggtttacagagtaccaatatctgggtagctgtcccggcagcgacgggagtgtgattactgacactctgtcacctgcttctagcccgagcagcgttacctaccctgtcgtgcccgggagtgtcgacgagtcacccagcggcgccctcaacattgagtgtagaatctgcggtgacaaggcctcaggatatcattacggggtacatgcatgtgagggctgtaaggggttcttccgacgaaccatcagattaaagctggtttatgataagtgtgatagaagctgtaagattcagaagaagaatcgcaacaagtgccagtattgccggttccataaatgtctaagtgtcgggatgtcgcacaatgctataagattcgggcgtatgcctagatcagaaaaagcaaagctgaaggcagaaatcttaacatgtgaacatgacattgaggattcggagaccgccgatctgaagagtctggcaaaacgcatctacgaggcttatctcaagaatttcaatatgaataaggtgaaagcgcgggtgatcctgtctgggaaggcctccaacaatcccccgtttgtgattcacgacatggaaacattgtgcatggctgagaaaactctggtggccaaacttgtcgctaatggaattcagaataaagaggccgaggttcggatttttcattgttgtcagtgtacgagtgtggagaccgtgaccgagcttactgagttcgcaaaggccatccccggatttgccaatctggatcttaatgatcaggttacccttctcaagtacggcgtctacgaggccatattcgccatgttaagttcagtcatgaataaagatgggatgctagtggcctatgggaacggatttatcactcgtgagttcctgaaatccttgagaaagcctttctgtgatattatggagcctaaatttgattttgcaatgaaattcaatgctcttgagctggacgatagcgatatatcattgttcgttgcggccattatctgctgcggagatcgccctggcttactcaacgtgggccacattgagaagatgcaggagggcatagtgcatgtcctgagactgcacctgcagagtaaccatcccgatgacatctttctcttccccaaacttctacagaagatggctgatctgagacagttagtgacagagcacgcacagctggtgcagataatcaagaaaactgagtccgatgctgccctccaccccctgctccaggagatctatcgcgatatgtactag

SEQ ID NO: 199044 - DNA, 1407 bp, synthetic construct
  misc_feature 1..1407: note = Description of Artificial Sequence: Synthetic coding sequence
  source 1..1407: mol_type = other DNA
atggtggacaccgagagccccctgtgccccctgagccccctggaggcgggggatctggagagtccgctctccgaggaatttctccaggaaatggggaatatacaggaaatttcccagtccatcggtgaagattcctcaggtagtttcggatttaccgagtatcagtacctgggctcttgtcccggttcagatggtagcgtgatcactgatacgttgagccccgccagctcgccctcttccgtcacgtatcctgtggtccctgggtcagtggatgagtcaccctcaggggccctaaatattgaatgtcgcatttgcggcgacaaggccagtgggtatcactacggagtgcacgcctgcgaggggtgtaagggcttcttcaggcgcaccattaggctgaagctagtgtatgacaaatgtgacagatcgtgcaagatccagaagaaaaataggaataaatgccaatattgccgcttccataagtgtttaagtgtgggcatgtctcacaatgcaattcgcttcggacgcatgcctcgatctgagaaagccaagctcaaggcggaaatcctgacatgcgagcatgatattgaagacagcgagaccgctgacttaaagtctctggcgaagcgaatttatgaagcctaccttaaaaactttaatatgaataaagttaaggctagagtgatccttagtggcaaggcttccaataacccccccttcgtgattcacgacatggaaacactgtgtatggcggagaagactttagtagccaagttggtcgctaatggcatacagaataaagaggcagaggtgcggattttccactgttgccaatgcacctcagtcgagaccgtcactgaactgaccgagtttgccaaagccattcccgggttcgctaatctggacctcaacgaccaggtaacgcttctgaagtacggagtgtatgaggccattttcgcgatgctatcttcggtgatgaataaggacgggatgctggtcgcctacggaaacggattcataactcgtgaatttcttaagtcgctcagaaaacccttttgtgacattatggaacctaaattcgacttcgctatgaaattcaatgctctggaattggatgacagtgacatctcactgttcgtcgcggcaatcatctgctgtggcgaccgacccggactactgaatgtggggcatatcgagaaaatgcaagagggcatcgtgcatgtgctgagattgcatctccagagtaaccatccagacgatatatttttgttcccaaaactgctccagaagatggcagacttgcgacagctcgtgaccgaacatgctcagttagtgcagatcattaaaaagaccgagagcgatgcagcccttcatcctctactgcaggaaatataccgtgatatgtactag

SEQ ID NO: 199045 - DNA, 1407 bp, synthetic construct
  misc_feature 1..1407: note = Description of Artificial Sequence: Synthetic coding sequence
  source 1..1407: mol_type = other DNA
atggtggacaccgagagccccctgtgccccctgagccccctggaggcaggagatctggaatctcctctgagtgaggaatttcttcaagagatgggaaatatccaagagatatctcaatctattggtgaggattccagtgggagctttggatttaccgaatatcagtacttgggatcttgtccaggtagcgatggatccgtgattacagatacactctccccggcatcttcccccagctccgtgacctaccccgttgtgcccggctccgtagacgagagcccttcaggcgccttgaacattgagtgcaggatttgcggtgacaaagcatcgggatatcactatggcgtccacgcatgcgaggggtgcaaagggttcttcaggaggacgattaggctgaaactagtttatgacaagtgcgatcggagctgtaaaatccagaaaaaaaatcgcaataaatgtcaatactgtcgctttcataagtgcttatccgtgggaatgtcccataacgcgataaggttcgggcggatgcccagaagtgagaaggcgaagctcaaagcagaaatcctgacttgcgagcacgatattgaagacagcgagaccgcagacctaaaatctcttgccaagcggatttatgaggcctatctgaagaatttcaatatgaacaaagtgaaggcgcgggtcatcctgagcggtaaggcgagcaataatcctccctttgtcattcacgatatggagacactgtgtatggctgagaagacactggtagcgaagctggttgccaatggaatccagaacaaggaagcggaggtccgcatttttcactgctgccagtgtacaagtgtcgagactgtgaccgagcttacagaattcgccaaagccattccggggtttgcaaatctagacctgaacgaccaggttaccctgctaaaatatggggtctatgaggcgatcttcgctatgttgagctcagtcatgaataaagacgggatgttggttgcttatggcaacggtttcatcacacgcgaattcttgaaatcgctcaggaagcctttctgcgatattatggaacccaaatttgactttgcaatgaaattcaatgccttggaactcgatgattccgatataagcctgttcgtggcggcaatcatatgttgtggcgatcggcccggactgctgaacgttggacacattgaaaagatgcaagaaggaatagtacacgtactgcggttacatctgcagtctaatcaccccgacgacatcttccttttccctaagttactgcagaaaatggccgacctcaggcagctggtaacagaacatgcacagctcgtgcagataattaagaaaaccgagagtgacgcagccctacacccgcttttgcaggagatttaccgcgacatgtactag

SEQ ID NO: 199046 - DNA, 210 bp, synthetic construct
  misc_feature 1..210: note = Description of Artificial Sequence: Synthetic coding sequence
  source 1..210: mol_type = other DNA
atggtggacaccgagagccccctgtgccccctgagccccctggaggcaggtgatctggagagtccattgagtgaagagtttctgcaggaaatgggcaacattcaggagatcagccagtccatcggtgaggactccagcggcagtttcgggtttaccgagtaccagtatcttggaagttgtccaggttctgacgggtcagtgattacttag

SEQ ID NO: 199047 - DNA, 402 bp, synthetic construct
  misc_feature 1..402: note = Description of Artificial Sequence: Synthetic coding sequence
  source 1..402: mol_type = other DNA
atggtggacaccgagagccccctgtgccccctgagccccctggaggccggtgatctcgaatctccactgtcagaagagtttctacaggagatgggcaacatccaagagataagccagtctatcggcgaggactcaagcggctcattcggcttcaccgaataccagtacctgggctcttgcccaggttcagatgggagcgtgatcacagataccctgtctcctgcttctagcccgagcagcgtgacttaccctgtggtgcccggctcggtcgacgaaagcccatctggcgctctgaacatagagtgtcgcatttgcggagacaaagccagtgggtaccattacggtgtgcacgcctgtgaaggctgcaaggtcgaaggaagttggaacagagcctggtggtag

SEQ ID NO: 199048 - DNA, 525 bp, synthetic construct
  misc_feature 1..525: note = Description of Artificial Sequence: Synthetic coding sequence
  source 1..525: mol_type = other DNA
atggtggacaccgagagccccctgtgccccctgagccccctggaggccggcgatctcgaatctcccctgtctgaagagtttcttcaggaaatgggcaatattcaagagattagccaaagcatcggtgaggattctagtgggtcttttggattcaccgaataccagtatttggggtcctgcccgggatcggatggcagcgtaattacagatacgttatccccggcctccagcccttcatctgtgacttatcccgtggtgccaggtagcgtcgacgagtccccctcaggcgccttgaatatcgagtgtcggatctgtggcgataaagcatcggggtaccattatggagtccacgcttgtgaaggctgtaaggggttcttcaggagaacaattcgattgaaactcgtctacgacaaatgtgaccggagctgcaagattcagaaaaagaacaggaataagtgccagtattgtcgatttcataagtgtctgtcagttggaatgtcacataatgccttttgtcatacgtag

SEQ ID NO: 199049 - DNA, 30 bp, synthetic construct; identical to SEQ ID NO: 92855
  misc_feature 1..30: note = Description of Artificial Sequence: Synthetic coding sequence
  source 1..30: mol_type = other DNA

SEQ ID NO: 199050 - DNA, 489 bp, synthetic construct
  misc_feature 1..489: note = Description of Artificial Sequence: Synthetic coding sequence
  source 1..489: mol_type = other DNA
atgaacaaggtgaaggcccgggtgatcctgagcggcaaggccagcaacaatccaccattcgtgatccacgatatggagacattgtgcatggcagaaaaaactctggttgccaagctcgttgccaacggcatccagaataaggaagcagaggtgaggattttccactgttgccagtgcaccagcgttgaaactgttacagagctgaccgaatttgccaaggcaataccagggtttgccaacctcgacctgaacgaccaggttacgcttctcaaatacggagtgtacgaggcgatcttcgccatgctgagctcagtgatgaacaaggatggcatgctggtggcctatggcaacggcttcataacccgtgagttcctgaagagcttaagaaagccattctgcgacataatggagcccaaattcgactttgcaatgaaatttaatgccttggaactggacgacagcgatattagcctctttgttgcagcctag

SEQ ID NO: 199051 - DNA, 1326 bp, synthetic construct
  misc_feature 1..1326: note = Description of Artificial Sequence: Synthetic coding sequence
  source 1..1326: mol_type = other DNA
atggagcagccccaggaggaggcccccgaggtgcgggaggaggaggagaaggaggaggtggctgaggctgaaggggcaccagaactcaacggtggccctcaacatgcgctgcctagctcttcatatacggatctgtctaggtctagcagccccccatccctcctagaccagctgcagatgggctgtgatggggcttcatgcgggtccctgaatatggagtgcagagtatgtggtgacaaggcctctggattccactatggggtccacgcttgtgaaggctgtaaagggttcttcaggcgcaccatccgcatgaaacttgagtacgagaaatgcgagaggtcatgtaagatccaaaaaaagaataggaacaagtgtcagtactgcaggttccagaagtgcctcgccttgggaatgtctcataacgctattcggttcgggaggatgcctgaggcagagaaacgaaagctggtcgcaggacttacggccaacgaaggctcacagtataaccctcaagtcgcagatctaaaggccttttctaagcatatttataatgcctacctgaagaactttaacatgacaaagaaaaaggcgaggtctattctcacgggcaaggcaagtcacaccgcgccctttgtgattcatgatatcgaaaccctgtggcaggccgaaaaaggcctcgtctggaaacagctggtcaatggcctccccccatataaggagattagtgtccacgtattctaccggtgccagtgtactacagtggagactgtcagagaactcaccgagttcgcaaagtccatcccaagtttctccagcttatttctgaatgatcaggtgacactacttaagtacggcgttcacgaagctatctttgcaatgctggcgagcattgtcaataaagacggactcctggtggccaacggctccgggttcgtgaccagggaattcttgagatcattacgaaagcctttctcagacattattgaacctaagttcgagtttgccgtcaaatttaatgcccttgagttggatgattctgatctcgctctctttatagccgcaatcattctgtgcggggataggcccggacttatgaatgttccacgggtggaagccattcaggacactattcttcgggcattggagtttcatcttcaggcaaatcaccccgacgcccagtatttattccctaagttgctccaaaaaatggcggatctccgccagctagttaccgagcacgcgcaaatgatgcaacgaattaagaaaactgaaacagagacgtctctgcatccactcttgcaagagatctataaggacatgtattag

SEQ ID NO: 199052 - DNA, 1086 bp, synthetic construct
  misc_feature 1..1086: note = Description of Artificial Sequence: Synthetic coding sequence
  source 1..1086: mol_type = other DNA
atggagcagccccaggaggaggcccccgaggtgcgggaggaggaggagaaagaagaggtcgcggaagccgaaggtgcaccagaactgaacggtgggcctcaacacgccctcccttcaagttcatacacagatcttagtagaagcagcagccctccgtccctgcttgatcagctgcagatggggtgcgacggggctagctgcgggagcctgaacatggaatgccgggtgtgcggtgataaagcatcaggctttcactatggagtgcacgcttgcgagggctgcaagggattttttagaagaaccataaggatgaagctcgagtatgaaaaatgcgagaggagctgcaagatccagaagaaaaacaggaataaatgtcagtattgccgttttcagaaatgtctcgccctgggaatgtctcataacgcaataagattcggtcgtatgccggaggccgagaaacgcaaacttgttgcgggacttacagccaacgaaggcagccaatataacccccaagtcgctgatctgaaggccttttctaaacacatatataacgcctacctgaagaactttaacatgacaaagaaaaaagcacggtcaattctgaccgggaaggcctcgcataccgccccgtttgtcattcacgatatcgaaaccttatggcaagcagaaaaaggattggtgtggaagcaattggtgaacgggctgccaccgtacaaagaaattagcgtccatgttttttatcgatgtcaatgtaccacggttgagaccgtcagagagctgaccgagtttgccaagtccattcccagtttcagctccctgtttctcaatgatcaggtcacgctcctaaagtatggcgtccacgaagccattttcgcaatgttagcctccatcgttaataaagatggcctgttagtggctaatggtagtggattcgttacaagggagttcctgcggtccttgagaaaacctttctctgatatcatcgaacctaaattcgagtttgcagtgaagttcaacgctctggagctggacgattccgacctggctctatttatagccgctatcatactgtgcggcggggaatag

SEQ ID NO: 199053 - DNA, 1326 bp, synthetic construct
  misc_feature 1..1326: note = Description of Artificial Sequence: Synthetic coding sequence
  source 1..1326: mol_type = other DNA
atggagcagccccaggaggaggcccccgaggtgcgggaggaggaggagaaggaagaggtagcagaagctgagggtgcccctgagctgaacggcggtccacaacacgccttaccctccagctcttacaccgatctctctcggagttcatcgcctccaagtctcctcgatcaacttcagatgggttgtgatggagcctcgtgcggttccctgaacatggagtgcagagtctgtggcgacaaagcatccggattccattatggcgtccacgcctgcgagggatgcaaaggatttttcaggcgaaccatacggatgaaactggagtatgagaagtgcgagcgctcctgtaagatccaaaaaaagaatcgtaataagtgccagtactgccggttccagaagtgtctggctttgggtatgtcccacaatgccatccgcttcggtagaatgcctgaggcagaaaaacgcaaactggtcgcaggattgacagcaaacgagggatcccagtataacccccaggtcgctgacctcaaggctttttcaaaacatatttacaacgcttacctgaaaaacttcaacatgacaaagaaaaaggcaagatctatactaacaggtaaggcctctcataccgccccatttgttatccatgatattgaaactttatggcaggccgaaaagggacttgtgtggaaacagctggttaatgggctccccccctacaaggagatctccgttcatgtgttctatcgctgtcaatgcactactgtggagacagtgcgagaactgaccgagttcgcaaagtccataccatccttcagctcactcttcttgaacgatcaggttacgctcctgaaatatggcgtgcatgaagccatcttcgccatgctggcctccatcgtgaacaaggacgggctgctggtcgccaatggatccggatttgtcacgcgggaattcttgagatcactgcgaaagcccttctccgacatcatagaacccaagtttgaattcgctgttaagttcaatgccctcgagctggacgactccgatctggcactgttcattgcggctatcattctgtgtggcgacaggccagggttgatgaatgttcctcgtgtggaggcaattcaggatactattcttagggcactggaattccatctgcaggcaaatcatcctgatgcacagtatctgtttcccaagctcttgcagaaaatggctgaccttaggcaactggttactgaacatgcccagatgatgcaaagaattaagaaaacagagacggagactagcctgcaccctttattacaggagatctacaaagatatgtattag

SEQ ID NO: 199054 - DNA, 1032 bp, synthetic construct
  misc_feature 1..1032: note = Description of Artificial Sequence: Synthetic coding sequence
  source 1..1032: mol_type = other DNA
atggagcagccccaggaggaggcccccgaggtgcgggaggaggaggaaaaggaggaagttgcagaggccgagggcgctccagagctaaacggaggtccccagcacgccttgccgagtagttcctacacagcaattcgctttggaaggatgccagaggctgagaagcgtaagctagttgccgggctgactgctaacgaggggagtcagtataacccacaagtggcggatctgaaggctttttccaaacacatctacaacgcatacttaaaaaattttaatatgacaaagaaaaaggctcgctcaattctgaccggaaaggcctctcataccgctccattcgtcatccatgacattgaaaccctatggcaggccgagaaggggctggtgtggaagcagctggtgaacgggctacccccttacaaggaaatcagcgtgcatgtgttctaccggtgccagtgcacaaccgtcgagactgtgagggaactgacagagtttgcaaagtcgattccttcctttagcagcctctttctgaatgaccaggttacactgctgaagtacggtgtccacgaggccatattcgccatgctggcgtcaatcgtaaataaagacgggctgctcgtagccaacggctccggatttgtgaccagagagtttctgcggtccctgaggaagcctttttctgacattatcgagcccaagtttgaatttgcggttaagtttaatgccctcgagctggacgatagcgacctggccctgttcatcgctgcaataatcctgtgtggcgaccgccccggattgatgaatgtgcctagagttgaggcgattcaagatacaattctgcgcgctctcgaatttcacctccaggcaaatcatcccgacgcccagtatttgtttcccaaactgctgcagaagatggcagatctcaggcagttggtcaccgagcatgcccaaatgatgcagcggatcaaaaaaaccgagacggaaaccagcctccaccctctgctccaagagatttataaggacatgtactag

SEQ ID NO: 199055 - DNA, 1086 bp, synthetic construct
  misc_feature 1..1086: note = Description of Artificial Sequence: Synthetic coding sequence
  source 1..1086: mol_type = other DNA
atggagcagccccaggaggaggcccccgaggtgcgggaggaggaggagaaagaggaagtcgcagaggctgagggagctcccgaactgaacggtggtccacagcacgccctaccttcatctagttataccgacttatcaagatcatcgtcacctccatctctgctagaccagctgcaaatgggctgcgacggcgcttcctgtggaagccttaatatggagtgtcgggtttgtggcgataaagcgagcgggttccattacggagttcatgcgtgcgagggatgcaagggcttttttcgaaggacgattcggatgaagctcgaatacgagaagtgcgagagatcatgcaagatacagaagaaaaatcggaacaaatgccaatactgtaggttccagaagtgcctagccctcggtatgagccataacgccattaggttcggtcggatgccggaggcggaaaagcgcaagctggtggctgggttaacggcaaacgaaggaagccagtacaacccccaggtagctgacctaaaggccttcagcaaacatatctataatgcatatcttaaaaattttaacatgacaaaaaaaaaggcgagaagcatcctgaccggaaaggcctctcacacggctccctttgtgattcatgacatcgagaccctttggcaggctgagaagggcttagtttggaaacagctggtgaacggcctcccaccctataaagaaatcagcgtacacgtcttttatagatgccagtgtacgaccgtggagaccgttcgcgagttaaccgagttcgcaaagagcataccaagcttctcatctttattccttaacgaccaggtgacactgttaaagtacggtgtacatgaggcaatatttgcgatgctcgctagtattgtgaacaaggatggactgttggtggctaatggctcaggcttcgtgacgcgtgaattcctccggagcctcagaaaacccttttcagacataatagaaccgaagttcgagttcgcagtcaaattcaacgccctcgaactggatgactcagacctggcattgttcattgcggcaattatactgtgtggaggcgagtag

SEQ ID NO: 199056 - DNA, 1209 bp, synthetic construct
  misc_feature 1..1209: note = Description of Artificial Sequence: Synthetic coding sequence
  source 1..1209: mol_type = other DNA
atgcaccagcgggacctgagccggagcagcagcccccccagcctgctggaccaactgcagatggggtgcgatggagctagctgcggaagccttaacatggagtgccgagtttgtggtgataaggcctctgggttccattacggagtccatgcatgtgagggatgtaagggattctttcggcgaacgattagaatgaagctagagtatgaaaagtgcgagaggtcctgcaagatccaaaagaaaaaccgaaacaaatgccagtactgtcggttccaaaaatgtctggcgttgggaatgtcacataatgctatccgctttgggcggatgcccgaagctgaaaagcgcaaactggtggccggcctaacagctaacgagggcagtcaatataacccccaagtagcggaccttaaagcgttctcgaagcatatttacaatgcctatctgaaaaactttaatatgacgaaaaagaaagcaaggtctatccttactggcaaggcctctcatactgcaccttttgtgattcatgatatagagacactgtggcaggcagaaaagggcctcgtctggaagcagctggtgaacggactacccccttataaagagatttcagttcatgtcttctatagatgccagtgcacaacggtggaaacggtgagagaactcaccgagttcgctaagagcattccttcattcagctccttattcttaaacgaccaggtgacactgttaaagtatggcgtacatgaggcgattttcgccatgctggcctcaatagtgaataaggacggcctgctggtagcgaacgggtctgggttcgtgacgagggagtttttgagaagtctgagaaagcctttttctgacattattgaaccgaagttcgagttcgctgtcaaatttaacgcgctcgaactcgatgacagtgacttggccctgtttatagccgccatcatcttgtgcggtgacaggcccggacttatgaatgtccccagggttgaagcaatccaggacacaattctgcgcgcactcgagtttcacctgcaggcgaaccaccctgacgcacagtatctgtttcctaagctgcttcagaaaatggctgatctgcgtcaattagtgaccgagcacgcgcagatgatgcagaggataaagaagacggagaccgagactagccttcatccccttctgcaggagatttacaaagacatgtactag

SEQ ID NO: 199057 - DNA, 1017 bp, synthetic construct
  misc_feature 1..1017: note = Description of Artificial Sequence: Synthetic coding sequence
  source 1..1017: mol_type = other DNA
atgaagctggagtacgagaagtgcgagcggagctgcaagatccagaagaagaatcgtaacaaatgccagtattgtcgattccaaaagtgcctcgccttgggcatgtctcataatgcgattagatttggacgtatgcccgaggcggagaagcgaaaactagtcgccggtctcacggctaacgagggcagtcaatacaatccccaggtggcagatctgaaggcctttagcaagcatatttataatgcgtacctgaaaaacttcaatatgacaaagaagaaagcccgctccattctgacaggtaaggctagtcacacagctcctttcgtgatccacgacattgaaacactgtggcaagcagagaagggactggtgtggaagcaactggtgaatggcctcccaccctataaggaaatttctgtccatgtcttttaccgttgccagtgcacaacggtagagactgttcgggagctgaccgagtttgcaaaatccattccaagctttagcagcctgtttctgaacgaccaggttactctgctgaaatacggggtccacgaggcaatcttcgcgatgctcgcatcaatcgtgaataaagacgggctgttagtcgcgaacggctccgggttcgtaaccagggagttcttacggagcctgcggaagccattctcggatatcattgaaccaaagtttgagtttgcagtcaagttcaatgccctcgagctggacgacagcgacctggccctgttcatcgccgccattattctgtgcggagaccggcctggcctcatgaacgtacctcgagttgaagctatccaggatactatcctgagggcactggagttccacttgcaagccaatcaccccgacgcccagtatctgttccccaagctgctgcagaaaatggctgatctacggcaactcgtaacagagcacgcccaaatgatgcagaggattaagaaaacagaaacagagacgagtctacacccacttttgcaggaaatctataaagacatgtactag

SEQ ID NO: 199058 - DNA, 1518 bp, synthetic construct
  misc_feature 1..1518: note = Description of Artificial Sequence: Synthetic coding sequence
  source 1..1518: mol_type = other DNA
atgggcgagaccctgggcgacagccccatcgaccccgagagcgactcctttacggacacactgtccgctaacatcagccaggagatgacaatggtggacacagaaatgcctttttggcctactaactttggcatctcatccgtcgaccttagcgtcatggaagatcattcacattctttcgatattaagccttttactacagtggatttttccagtatttctacaccacactatgaggacatacccttcaccaggacagatcctgttgtggccgactataaatatgatcttaaactccaagagtatcaatcagcaatcaaggtggaacccgcaagtcctccttattactctgagaagacgcaactatacaataaacctcacgaggagccatcaaactccttgatggcaattgagtgcagggtttgtggcgataaggccagtgggttccactatggcgtgcacgcgtgcgaaggctgtaagggatttttcaggcggaccatcaggctcaagttaatttatgatcggtgtgacctgaactgcaggatccacaaaaagagtcggaataagtgccagtactgcaggttccagaaatgccttgcggttggtatgtcacataacgccataaggttcggaagaatgccacaggcggagaaggaaaaacttctggctgagatttccagtgatattgaccagctgaacccggaatctgcagacctgcgcgcactcgccaagcacttgtacgatagctacattaagtccttccccttgaccaaagctaaggccagagccatccttaccgggaaaacaaccgataaatccccattcgtgatttacgatatgaattctctcatgatgggggaagataaaatcaagttcaagcacataacaccactgcaggaacagtctaaagaggttgccatacgcatatttcagggctgccagttccgtagtgttgaggctgtacaagagataacggaatacgctaagtccatccccggttttgtgaatctcgatctcaacgatcaggtgacccttctcaaatacggcgtccacgagataatttatacaatgctggcctctctgatgaacaaggatggcgtgctcatttcggaaggccagggcttcatgacccgggaatttctgaaatccctcagaaaaccctttggggattttatggagccaaaatttgagttcgccgtaaagtttaatgctcttgagctggatgactcagaccttgccatcttcattgctgttataatactgagtggagaccgccccgggctgctgaatgttaaaccgatcgaagacatccaggataatctgctccaggccttagaactgcagctgaagctgaatcaccccgagagttcccagctgtttgctaagctgctgcagaaaatgacagatctgcgccaaatcgtaacagagcacgtgcagttgctgcaggttattaagaaaaccgagaccgatatgtctctacaccctttattgcaggaaatatacaaggatctttattag

SEQ ID NO: 199059 - DNA, 1434 bp, synthetic construct
  misc_feature 1..1434: note = Description of Artificial Sequence: Synthetic coding sequence
  source 1..1434: mol_type = other DNA
atgaccatggtggacaccgagatgcccttctggcccaccaacttcggtatttcttcagtagatctctccgtaatggaggatcattcacactcctttgatatcaagccatttacaaccgttgacttcagcagcatctcaacaccccactacgaagacatcccgttcactaggaccgacccggtcgtggccgattataagtatgatttgaagctgcaggaataccagtccgccatcaaggtggagccggcctcaccgccttactacagcgagaaaacacagctgtataataagccccacgaggaaccgagcaacagtctgatggcaattgaatgtcgcgtctgcggtgataaggctagtggattccattacggggtccacgcttgcgagggttgcaagggcttttttaggcgtacgatcaggttgaaactgatctatgaccgatgtgacctgaattgcaggatacacaaaaagtcacgtaacaaatgccagtactgccggttccagaagtgcctggccgtgggaatgtctcacaacgcaatacggttcgggcgcatgccccaggctgagaaagagaaattattggccgaaatcagcagcgacattgaccagctcaacccagagagcgcagacctccgcgcacttgccaaacacctgtatgacagctatataaagagtttccctcttacaaaggccaaggctagagccatcctcaccgggaagactacagacaaatcccccttcgtaatctacgacatgaacagcttgatgatgggcgaagataaaattaagttcaagcacatcactccactgcaggaacagagtaaggaggtggcaatacggatcttccagggatgtcagtttagaagcgtagaggctgtgcaggaaattacagagtacgcaaagagtatacccggtttcgtaaatcttgatctgaatgaccaggtgaccctgttgaagtacggggttcacgaaatcatttacacgatgttagcgtctcttatgaacaaagacggcgtgctcattagtgaggggcaaggctttatgaccagggagtttctcaagagcctaaggaagccctttggcgacttcatggagccaaagttcgagtttgctgtgaaatttaacgctctggaactggatgacagcgacctcgcgatctttatcgccgtgattatactctccggcgatagaccagggcttctgaatgtgaagcccattgaggacatccaggacaatctgctgcaggccctggagctgcagctaaaactgaatcaccccgagtcttctcagctctttgcaaagttactgcagaaaatgacagatctaaggcaaatcgtcacagaacacgtgcaactgctgcaggtgataaagaaaacagaaactgacatgagtttacaccccctacttcaggagatttacaaagatctgtattag

SEQ ID NO: 199060 - DNA, 753 bp, synthetic construct
  misc_feature 1..753: note = Description of Artificial Sequence: Synthetic coding sequence
  source 1..753: mol_type = other DNA
atgaccatggtggacaccgagatgcccttctggcccaccaacttcggcattagttccgtggatctgtctgtgatggaagatcacagccattccttcgacatcaaaccatttaccacagtggacttcagcagtatttctacaccccactacgaggacatcccttttacaaggacagaccctgtcgtcgccgattacaaatacgacttgaagttgcaagaatatcagtctgccatcaaagtggaaccggccagccctccgtactattccgaaaagacccagctttataataagccgcatgaggaacccagtaattctctcatggctatcgagtgcagagtttgtggtgataaagcttcgggatttcattatggcgtgcacgcttgcgaagggtgtaaaggcttcttccgtcggactattcgactgaagctgatatacgacaggtgtgacttgaattgtaggattcataaaaagtccaggaataagtgccagtattgtaggtttcaaaagtgcctggcggtgggaatgagccataatgctatcaggtttggaaggatgccccaggccgagaaggagaaactgctggcggagataagctccgacattgatcagcttaatccggagtcagccgacctgcgggccctggccaagcacctgtacgactcctatattaagagcttcccactgactaaagccaaggcccgggcaatcttgaccggcaagactaccgataagtctactgcacaggtgtgttag

SEQ ID NO: 199061 - DNA, 1434 bp, synthetic construct
  misc_feature 1..1434: note = Description of Artificial Sequence: Synthetic coding sequence
  source 1..1434: mol_type = other DNA
atgaccatggtggacaccgagatgcccttctggcccaccaacttcggaatttcctcggtcgatctgtctgtaatggaggaccacagccacagcttcgacattaagccctttaccacagttgatttctcaagcatctcaacaccgcactacgaagatatcccctttactcgtacagaccccgtggtagccgactataagtatgacctaaagctgcaagaataccagtccgccattaaggtagagccagcatcccctccttactactctgagaagacacagctgtacaataaaccacacgaggagccctccaactcgctgatggccatcgaatgcagagtgtgcggagacaaagcatccgggtttcactacggcgtgcacgcctgcgaagggtgcaagggcttcttccgccgtactatacggctgaagctcatctatgatcgatgcgacctcaactgtaggattcacaagaagtctcgaaacaagtgtcagtactgccgctttcagaagtgtctggcggtgggaatgagtcacaacgcgatacggttcggtcggatgcctcaagccgagaaggagaaactgctggctgagatctcatcagacatcgaccaactcaaccccgagtctgccgatctcagggccctagccaagcacctctatgatagctacatcaagtccttccctctgaccaaagctaaagcaagggcaatacttacaggaaagacaaccgacaaatccccatttgtaatttacgatatgaatagcttaatgatgggagaggataaaattaagttcaagcacattacaccactgcaagagcaatctaaagaggtggccatccggatctttcagggctgtcagtttcgaagcgtcgaagcagttcaggagatcactgagtacgctaaaagtattcctggtttcgtcaacctggatcttaacgaccaggttacactgctcaaatacggggttcatgaaataatctacaccatgcttgcttctctgatgaataaagacggggtgttgattagcgaaggccagggattcatgactcgggaattcctaaagagtctgagaaaaccattcggggatttcatggagccaaaattcgaattcgctgtgaaattcaacgccctggagctggacgacagtgatctggcaattttcattgcggtgattattctttcaggggaccggccaggactgctcaacgtaaagcctattgaagatatccaggacaacctactccaggcgctggagctgcagctgaaattgaatcatccagagagcagccagctgtttgccaagctcctgcagaagatgaccgatctgcgccagatcgtcactgagcacgtgcagctcctgcaggttataaaaaaaacagagacggacatgagtctgcatccattgctgcaagagatttacaaagatctctattag

SEQ ID NO: 199062 - DNA, 1434 bp, synthetic construct
  misc_feature 1..1434: note = Description of Artificial Sequence: Synthetic coding sequence
  source 1..1434: mol_type = other DNA
atgaccatggtggacaccgagatgcccttctggcccaccaacttcggaataagctcggtcgatctgagtgttatggaggatcacagccactctttcgatattaagcccttcacaacggtagacttttcctcaatcagcacgccacattacgaagacatccccttcaccaggaccgacccggtggttgccgactataagtacgatctcaagttacaagagtaccagtccgccatcaaggtggaacccgcctcccctccatactactcagaaaaaacgcagttatacaataagccccatgaagagccaagcaacagcctgatggctatcgagtgtcgcgtttgtggggataaggccagcgggtttcattatggcgtccacgcctgcgagggttgcaaaggcttctttcgccgcacaattagacttaagctgatctatgacaggtgcgatttgaattgtagaatacataagaagtcccggaataagtgtcagtattgtagattccagaaatgtctggccgttgggatgagtcataatgccattcggtttggcagaatgcctcaggccgaaaaggaaaagttgttagcagagatatccagtgatatcgatcagttaaaccccgagtccgcggatcttcgggcgctcgcgaagcatctgtacgactcctacatcaaatcattccccctgacgaaggccaaagcacgggccattttgacaggcaaaacaacagacaaatcaccattcgtgatctacgacatgaatagcctgatgatgggtgaggataagatcaaatttaagcatatcacgccattgcaggagcagtccaaagaggtcgctattagaatattccagggatgtcagtttcgttccgtcgaggccgtgcaagaaatcacagagtacgccaagtccattccgggattcgtgaatcttgacctgaatgatcaagtcacccttctgaagtacggcgtgcacgaaattatttacaccatgcttgcttcccttatgaacaaggatggcgtcctgattagtgaaggccaaggcttcatgacccgtgaattcctgaagtctttgcggaaaccatttggcgatttcatggagcccaaattcgagttcgccgttaaattcaatgcattggagctggatgatagcgatttggctattttcatcgccgtgattatcctttctggcgataggccggggctcttgaatgtaaaaccgatcgaagatattcaagataacctgttacaagccctggaactgcagctcaaactgaatcaccctgagtcatctcagttatttgctaagctactgcagaagatgacggatctaagacagatcgtcacggaacacgtccaactgctgcaagtgattaaaaaaaccgaaactgacatgtctttgcatccgctgctgcaggagatctataaagatctttactag

SEQ ID NO: 199063 - DNA, 1434 bp, synthetic construct
  misc_feature 1..1434: note = Description of Artificial Sequence: Synthetic coding sequence
  source 1..1434: mol_type = other DNA
atgaccatggtggacaccgagatgcccttctggcccaccaacttcggaatctcatcagtcgacttgtccgttatggaagaccactctcactccttcgacattaagccatttaccactgtggatttcagcagtatctcaactccccactatgaggacatcccttttacgcgaactgatcctgtggtcgctgactacaaatatgacctaaagctacaggagtaccagtccgccatcaaagtcgagcctgcctctcctccctactacagtgaaaagacccagctgtacaataaaccccacgaagaaccaagcaatagcctcatggccattgaatgtcgggtctgtggggacaaggcttcaggattccactacggagtgcacgcttgtgaggggtgcaagggcttcttccgtcggaccatccgcctgaagctcatttatgatcggtgcgatctgaactgccgtatccataagaaaagccgcaataagtgccagtactgtaggtttcaaaagtgtttagctgttggaatgtcccacaatgccattagatttggcaggatgcctcaggctgaaaaggagaagctgttggcagagatttcaagcgacattgaccagcttaatccagagagcgcagatctccgagccctcgccaagcacctctatgacagttacatcaaaagcttccctctgacaaaggccaaggctcgcgcaatcctaactggtaagacaactgataagtcaccatttgtgatctacgatatgaatagcctgatgatgggtgaggacaaaataaagttcaagcacataaccccattgcaagaacagtcgaaggaggttgccattaggattttccagggctgtcaattcaggtccgtggaagcagttcaggagattaccgagtacgctaaatcaatccccggcttcgtcaacctggatctgaacgaccaagtcacacttcttaagtacggcgtgcacgaaataatatataccatgttggcttccttaatgaacaaggacggcgtgcttattagtgagggccagggcttcatgacccgagagtttctcaaatctctgcggaagccgttcggcgatttcatggaacctaaattcgaattcgctgtgaagtttaacgcactggagctggacgactctgatttggccattttcatcgccgtaatcattttaagtggtgacagacccggcctcctgaatgtgaaacccatcgaggacatccaggataatctgctgcaggccctggaattacagctcaaactgaaccacccagaatcttctcagctattcgcaaagttgttacagaagatgactgatctgcggcaaatcgttacggaacacgttcagctcctccaagtcattaagaaaactgagacagacatgagcctacatcccctccttcaggaaatatacaaggacctctattag

SEQ ID NO: 199064 - DNA, 1452 bp, synthetic construct
  misc_feature 1..1452: note = Description of Artificial Sequence: Synthetic coding sequence
  source 1..1452: mol_type = other DNA
atgaagggcttcagcgagatgaccatggtggacaccgagatgcccttttggcctacaaatttcggcatttcctctgtggatctcagcgtgatggaggaccattcccattcgtttgacatcaagccatttaccaccgtcgacttcagtagcatctcaacgccccactatgaagacattcctttcacccgaaccgaccccgtggttgccgactacaagtatgacctgaaacttcaggaataccagagcgctattaaagtggaacccgcctcccccccctactactcagaaaaaacccagctatacaataagccccacgaagagccctccaatagtttgatggccatcgaatgccgcgtctgtggcgacaaagcctcgggattccattacggggtgcatgcatgtgagggttgtaagggcttctttagaaggacaatacggctgaagctgatttatgacaggtgcgacctgaactgtcggattcacaaaaaaagcaggaacaaatgccagtactgcaggttccaaaagtgtctggcagtcggcatgtcccataacgctatcagatttggaagaatgcctcaggctgagaaggaaaaactgctcgctgagattagctccgacattgaccagctcaaccccgaatcagccgatctgagagccctggcaaagcacctttatgactcgtacatcaagtcgttccctctgactaaagcaaaagctagagccattctgaccggcaaaaccaccgacaaatcaccgtttgtgatatacgatatgaacagtttaatgatgggcgaagataagattaagtttaaacacattacaccgctacaggaacagtctaaggaggttgctatacgcatcttccaggggtgccagttccgaagcgtggaagctgttcaggagatcacagaatatgcgaagagcattcctgggtttgtgaacctagaccttaatgaccaagtcaccctacttaagtacggtgtccacgagatcatatacacgatgttggcaagtctgatgaacaaggatggagttctcatctccgagggacagggcttcatgacacgcgaattccttaagagccttcggaaaccatttggcgacttcatggagcctaagttcgagtttgcagtaaaattcaatgccttagagctggatgacagcgacctcgccatattcatcgcggttataattctgtctggcgacagacctggactgctcaatgtcaagccaatagaggacattcaggataatctgctccaggcactcgaactgcagctcaagctgaaccaccctgagagcagccagttattcgccaagctgctacagaaaatgacagacctcaggcaaattgttacggaacatgtacagcttctgcaggtcatcaaaaagactgagactgatatgagtcttcaccccctgctgcaggagatttataaagacctttattag

SEQ ID NO: 199065 - DNA, 399 bp, synthetic construct
  misc_feature 1..399: note = Description of Artificial Sequence: Synthetic coding sequence
  source 1..399: mol_type = other DNA
atgaccatggtggacaccgagatgcccttctggcccaccaacttcggaattagcagcgtagacttgtccgtgatggaggatcactctcattctttcgatattaaacccttcactacggtggacttcagctccatttccaccccacactacgaagatattccatttacacgtaccgatccggtggtggccgactataagtacgacttgaaactgcaagagtatcaaagcgcgattaaggtggagcccgcctcgcctccgtactattccgagaagacccagctgtacaacaaaccccatgaagagcctagcaatagcctgatggcgattgaatgcagggtatgcggcgacaaggcaagcggctttcactacggagtgcacgcctgcgaaggttgtaagtag

SEQ ID NO: 199066 - DNA, 300 bp, synthetic construct
  misc_feature 1..300: note = Description of Artificial Sequence: Synthetic coding sequence
  source 1..300: mol_type = other DNA
atgaccatggtggacaccgagatgcccttctggcccaccaacttcggcattagctcagtcgatctctcagttatggaggaccacagtcacagctttgacattaaacccttcacaacagttgattttagcagtattagcactccgcactacgaggacataccgttcactagaaccgacccagtggtagctgactataagtacgatcttaaactacaggagtatcagtctgcgataaaagtagagccagctagccctccatattacagcgaaaagacacaactttataacaaacctcactag

SEQ ID NO: 199067 - DNA, 132 bp, synthetic construct
  misc_feature 1..132: note = Description of Artificial Sequence: Synthetic coding sequence
  source 1..132: mol_type = other DNA
atgaccatggtggacaccgagatgcccttctggcccaccaacttcggcatcagcagcgttgatctgagcgtgatggaagaccactctcattctttcgacataaagccattcacaacagtggattttagctag

SEQ ID NO: 199068 - DNA, 747 bp, synthetic construct
  misc_feature 1..747: note = Description of Artificial Sequence: Synthetic coding sequence
  source 1..747: mol_type = other DNA
atggtggacaccgagatgcccttctggcccaccaacttcggcatcagttcagttgatttgtcagtcatggaagaccactcccactcttttgacattaaaccattcaccacagtggactttagttccatttccacccctcattacgaggatattcctttcactaggaccgaccccgttgttgccgactacaaatacgacctgaaactccaggagtaccagtcggctataaaggtggaacctgcctcccctccatactatagcgagaagactcagctgtacaacaaaccacacgaagagccaagtaactctctaatggctatagaatgtcgcgtgtgtggagataaagcttccggatttcactatggtgtgcatgcgtgcgagggctgtaaagggtttttcaggcgaacaatcagactgaaattgatttacgaccggtgcgaccttaattgtcgcattcacaaaaagtctaggaacaaatgtcagtactgccggttccagaagtgcctcgctgtggggatgagccataatgccatccgtttcgggagaatgcctcaggcagagaaggaaaagttgttggctgaaatttcctcggacatagatcagctaaatcccgagtcagcagacctgagggctctggcaaagcacctttacgatagctatatcaaatccttcccactgaccaaggccaaggcccgggctatcctcacaggaaaaacaactgacaaatcgactgctcaggtgtgttag

SEQ ID NO: 199069 - DNA, 2955 bp, synthetic construct
  misc_feature 1..2955: note = Description of Artificial Sequence: Synthetic coding sequence
  source 1..2955: mol_type = other DNA
atggccggcaacgactgcggcgccctgctggacgaggagctgagctcctttttcctcaactatctggccgatacgcagggcgggggatccggtgaagaacagctctacgctgacttccccgaattagacttgtcacaattggacgcctcagatttcgacagcgctacttgttttggggagttacagtggtgccctgaaaattccgagactgaaccgaaccaatacagtcccgatgatagcgaactttttcagattgacagtgagaacgaggcactccttgcagagctgacaaaaactcttgacgatatacccgaagatgacgtgggattggccgccttccctgcattggacgggggggatgccctgtcctgcacttccgcctcaccagcccctagttcagctcctccctcccccgctcctgagaagcccagtgcccccgcgccagaagtggacgaactgtctctggccgattccacacaagataaaaaggcacccatgatgcagagtcagtcgaggtcatgcaccgaactgcacaaacatctgacttctgctcagtgttgcctgcaggataggggattacagccaccatgtctgcagtccccaagattaccggccaaagaggataaagagcccggcgaggactgtccaagcccgcaacctgccccagcctcccctagggactctctggcattgggacgcgccgaccccggcgccccagtcagtcaggaagacatgcaggccatggtgcaactaatcaggtatatgcacacctactgtctgccacagaggaagcttccaccccaaacccctgaacctctgcctaaggcctgttcaaacccctcccagcaggtcaggtccaggccgtggtctcgtcaccattcaaaagccagttgggctgaattcagtatcctgagagagctcctggcccaggatgtattgtgcgacgtatctaagccctatcggctggcaaccccggtgtacgccagtctgactccaaggagccgcccacggcctccaaaagattcccaggccagccccgggcggccatcttccgtcgaggaagtgagaatagctgcatccccaaagtcaaccgggcctaggccttccctcagaccactgcggctcgaagtaaaacgggaggtccggcgcccagccagacttcagcaacaggaggaagaggatgaggaggaggaagaagaagaggaagaggaagagaaggaagaagaggaggaatggggacggaagcggcccggtcggggattgccttggactaaattgggccggaagcttgagtcgtccgtatgccccgtgcgccgaagccgccgcctgaatccagagctgggaccctggttgacatttgcggatgagccactcgtgccttcagaaccccagggtgccctgccctccctgtgtctcgcgcccaaggcctatgacgtcgagcgtgagctcggttcccccaccgacgaggactctgggcaggatcagcagctgctacgcggtccacagattcccgccttagagtccccttgcgagtccgggtgtggagacatggatgaggaccccagctgcccccagctgccgcccagggactcaccaagatgtctcatgctggccctgtcacaatctgaccccaccttcggaaagaaatccttcgaacagacattgacagtagaactgtgcggcactgctggcctaactccccccactacccccccctacaagcccactgaggaagacccctttaagcctgacatcaaacatagtctcggcaaagagatcgcactatccctcccttcacccgagggtctaagcctgaaggccacacctggcgctgcccataagctgcctaagaagcatccggagcgcagtgagctgctgagccatctgagacacgccaccgctcagccggcttcacaggccggacaaaagcgcccattctcctgttcctttggcgatcacgactattgtcaggtgctcagacctgagggcgtgttacagcgcaaggtccttaggtcatgggaaccctctggtgtgcacctagaggactggccacagcagggggcgccttgggcagaagcccaagcacccggccgagaggaagacaggtcctgcgatgctggcgcccctccgaaggatagcaccctgctgcgggaccacgaaatccgcgcatctctgaccaaacacttcgggctccttgaaacggcgcttgaggaggaagatctcgcttcttgtaaaagtccagaatacgacaccgtcttcgaagacagtagttcaagctccggcgaatcctcctttctccctgaagaggaggaggaagaaggggaagaggaggaagaagatgacgaagaggaggactccggtgtttcccccacgtgcagcgatcactgtccataccaatctcccccttccaaggccaatcggcagctgtgcagccgctccagatcgagctccggaagctcaccctgtcactcgtggtctcccgccactcgtaggaatttcagatgtgagtcacgcggaccatgtagcgaccggacacctagtattcggcacgcccgcaaaaggcgtgaaaaggccatcggggaaggacgggttgtttatatccagaacttgtcctctgacatgtccagtcgagaactaaaacgccgttttgaggtctttggggagatcgaggagtgtgaagtgttaacacgcaacagacgaggcgaaaagtatggctttataacttataggtgcagcgagcacgccgccctcagtctgacgaaaggagccgcattgcgaaagaggaacgagcctagtttccagctgagctatggcggactgagacatttttgctggcctcgttacaccgattacgattccaattcagaggaggcactccccgcaagtgggaaatcaaagtatgaggcgatggactttgatagcctactcaaggaagcccagcagagccttcattag

SEQ ID NO: 199070 - DNA, 2880 bp, synthetic construct
  misc_feature 1..2880: note = Description of Artificial Sequence: Synthetic coding sequence
  source 1..2880: mol_type = other DNA
atgggcggcggcagcggcgaggagcagctgtacgccgacttccccgagctcgatttatctcagcttgatgcgtctgacttcgatagcgccacctgttttggcgagttacagtggtgcccggaaaattccgagacagaaccgaaccagtattccccggacgatagtgaactgtttcaaatcgatagtgagaatgaggcactcctcgccgaattgactaagacgttggatgacattcctgaggatgacgtgggacttgccgcattccctgccctcgacgggggagacgccctctcttgtactagcgccagtcctgccccctcatctgctcctccatccccggcgccagaaaagccatccgctcccgcacctgaagtcgatgaattgtcactcgctgactctacacaggataagaaggcacctatgatgcagtcacaatccagaagttgcaccgagctgcacaagcacctgaccagtgctcagtgttgccttcaagacaggggcctccagcctccgtgtctgcagagtccaagactcccagcaaaggaggataaggagcctggcgaggactgtccgagccctcagcctgcgccggccagtccgagggattcacttgcactagggcgcgcagatcccggggccccagtgagccaggaagatatgcaggccatggtgcagctcattcgttatatgcacacttactgtctcccccaacgcaagctgccgccccaaaccccagaacccctcccaaaggcctgtagcaatccgtcccagcaagtgcgctcgcgcccttggtcccgccaccactcaaaagcctcgtgggccgagttttcaatactgcgagagctcctggcccaggatgtgctgtgcgatgtaagcaagccctatcgtctagccactccagtctacgcttccctgacccccagatccagaccacgaccacctaaggactcacaggcctcacctggccggccatcatctgtggaggaggtcagaatagctgcatcccctaaaagcactgggccacgcccgagcttgagaccgcttcggctggaagtgaagagagaagtgcgcaggcctgcacgcctgcagcagcaggaagaagaggatgaggaggaagaggaagaagaagaagaggaggaaaaagaagaagaggaagagtggggtcgaaagagaccagggcgaggcctcccctggaccaagttgggccgcaagctcgagtcatcggtctgcccagtgaggcgcagcaggagactaaatccagagctcggcccctggctcacattcgccgacgaaccgctcgtaccaagcgagccacagggcgcactgcccagtctgtgtttggccccaaaagcttacgatgtcgagagagaactgggttcacctacagatgaagactccggacaagaccagcagttactcagggggccacagatacccgcgctagagtccccctgcgagagcggctgtggtgacatggacgaagatccaagttgtcctcagctacctcctcgggatagccccagatgtcttatgctcgcactctcccaatccgatcccacttttgggaaaaagtcctttgagcagaccctcaccgttgaactatgtggaaccgctgggcttactccgcccaccacacccccttacaaacctactgaagaggatcccttcaagccagacattaaacacagccttggaaaggaaatcgccttaagcttgccttcccccgagggtctttcactaaaggccactccgggcgccgcccacaagctgcccaagaaacaccccgagagatcggagttgctgtctcacctcaggcacgccactgcccaaccagcaagtcaggccggccagaagagacctttctcatgctcatttggggatcatgattactgtcaggttctgcgaccggagggagtgttgcagcggaaggtcctgagatcctgggagccatcgggtgtacacctagaagactggccccaacaaggggctccgtgggcggaagcacaggcccctggaagggaagaggacagaagctgtgatgcaggtgcgcccccaaaagattcaactctgttacgagatcatgagattcgggccagcctcaccaaacatttcggcttactggagacagcactagaggaggaggatctcgcgtcatgcaagagtcccgagtacgacaccgtttttgaggactcatcctcatctagcggcgagagttccttcctgcctgaagaagaagaagaggaaggcgaggaagaggaggaggatgacgaagaagaagattctggggtaagccctacctgtagcgatcattgcccctaccagagccctccgtcaaaagccaaccgccaattgtgcagcagatctcggtctagtagcggaagttccccatgtcactcttggagccccgcaacacgtcggaatttccggtgtgaatcgcggggcccctgcagtgatagaacaccttccatccgacacgcccgcaagaggcgtgagaaagccataggggaggggcgggttgtatatatccagaacctctccagtgatatgtcttctcgtgagttaaagcgtagattcgaagtgttcggcgagatcgaagaatgtgaggttctgactaggaaccgcaggggcgagaaatatggattcattacgtacaggtgctctgagcacgctgccctttcactgacaaagggcgcggccctcagaaagcgcaacgagccttcttttcaattaagctatgggggacttagacatttttgttggccccgctataccgattacgacagtaattctgaggaagccctccccgcctcagggaaatcaaagtatgaagccatggatttcgatagtcttcttaaagaggcccagcagtccctgcattag

SEQ ID NO: 199071 - DNA, 2397 bp, synthetic construct
  misc_feature 1..2397: note = Description of Artificial Sequence: Synthetic coding sequence
  source 1..2397: mol_type = other DNA
atggcctgggacatgtgcaaccaggacagcgagagcgtgtggagcgacatcgagtgcgcagccctcgtcggggaggaccaacctctttgtccagatttacctgagttagacttgtctgagctggacgtcaatgaccttgataccgactcgttcttagggggacttaagtggtgtagtgatcagagcgagatcatttccaaccagtataataatgaaccatcgaacatatttgaaaaaatagacgaagaaaacgaggctaatttactggcagtgcttacagaaacactggacagtcttcctgtcgatgaggacggactgccttcttttgacgccttaacagacggtgatgtaacaaccgacaacgaagcgtccccaagctccatgcccgatggtacacctcctcctcaagaagccgaggagccttccctgcttaaaaagctacttttggctccagcaaacactcaactgtcttacaacgagtgcagcggattgtccactcagaatcacgcaaaccataatcatcgcatcagaactaacccagccattgtcaaaaccgaaaattcctggtctaacaaagccaagagcatctgtcagcagcagaaacctcagcgaagaccttgctccgaattgctgaagtatttgaccactaacgatgacccccctcatactaaacctaccgaaaaccggaactcctctcgcgataaatgcacgtctaagaagaaatcccacacacagtctcaaagccagcacctccaggccaagccaactacactaagtctacccctgaccccagagtccccaaacgatccaaagggtagtccgtttgagaacaagacaatcgaacgcacactcagcgtggaattaagcgggactgctggtcttacaccaccaacaacacctcctcataaagccaatcaggacaatccgtttagggctagccccaaactaaaaagctcttgtaaaaccgtagttcctcccccgtcaaagaagccgcgctacagtgaatcatcaggcacacaaggcaacaacagtaccaaaaagggtcccgagcagtcagaactctacgcacagctatcaaagagctccgtgttaaccggaggacacgaggagcgtaagaccaagcgtcctagcctccgcctcttcggggatcacgactattgtcagagtatcaattccaaaacggaaatcctgatcaatatttctcaggaattgcaggactctcgccagctggaaaataaggacgtctcctcagactggcagggacagatctgtagtagcaccgacagtgaccagtgttacctcagagagaccctggaggcctccaaacaggtgtctccctgttctacccgcaagcagctgcaggatcaggaaatcagggctgaactgaacaagcactttggccacccgagccaggccgtgttcgatgacgaggccgacaaaactggggaactgagagactccgatttcagtaacgaacagttcagtaagcttcccatgtttatcaactcaggtctcgccatggacggactgtttgatgattccgaagatgagtctgataaattatcttacccttgggatgggacccagtcctactccctctttaacgtgagccctagttgcagttcgtttaattccccctgtagagatagtgtgagcccccctaagtccctcttttcacagcgcccgcaaagaatgcggtcccgatcccggtctttctctcgtcataggtcctgcagtagaagcccttatagccggagcagatcaagaagccccgggtcccggagcagctcccggtcttgctattattatgagtctagtcactataggcatcgcactcatagaaatagccccctgtacgtcagaagccgcagccggtctccatactctcgccgtccccgctacgactcatatgaggagtaccagcacgaacgcctgaagcgggaagagtaccggcgagaatacgagaaaagggagagtgagcgtgccaaacagcgggagcggcaacggcagaaggcaatcgaggaaagacgggtgatttatgtaggaaaaatcagaccggatacaactaggacggagctgagggacaggttcgaggtgttcggtgagatcgaggagtgcaccgtgaatctgagagacgacggcgattcctatggttttattacttaccggtacacatgtgacgccttcgctgcgctggagaatggatacactctgcgcaggtcaaacgaaaccgacttcgaactgtatttctgcgggagaaaacagtttttcaagtcgaactacgccgaccttgattcaaacagtgatgacttcgaccccgcttccacaaagtctaaatatgattcattggacttcgactctctgcttaaagaggcacaacggtccctgcggaggtag

SEQ ID NO: 199072 - DNA, 3072 bp, synthetic construct
  misc_feature 1..3072: note = Description of Artificial Sequence: Synthetic coding sequence
  source 1..3072: mol_type = other DNA
atggccggcaacgactgcggcgccctgctggacgaggagctgagctcattcttcctgaactatcttgctgacacccaggggggcgggtctggcgaggagcagctgtacgccgatttccccgaactggacctaagccagttggatgcaagcgattttgactcagctacatgctttggggagcttcagtggtgccccgagaattccgagacggagcctaatcagtactctcccgacgattccgagctctttcaaatcgattctgagaatgaggctctcctggcggagctcaccaagacccttgacgacatcccggaagacgatgtaggcctggctgcatttcctgcactggatggaggcgacgcccttagctgcacgtccgcatcacccgctccttccagcgcaccaccatcacccgcccccgaaaagccaagcgctcccgccccagaggtagacgagctgtcactactgcagaaactgctgttagcgacatcataccccaccagtagttcagacactcaaaaggaggggacagcttggaggcaagctggactaagatccaagtctcagcgtccatgtgtgaaggccgactcaactcaggacaagaaagcgcccatgatgcaaagccagtcccggagctgtaccgagctgcataaacacctaacatctgcacagtgctgtctacaggacaggggtctgcagcctccatgtctgcagagtccacgattgcctgccaaagaggataaggagccgggagaggactgtcccagtcctcagccggcgcctgcatcaccacgggattctcttgccctgggacgagccgatcccggcgccccggtctcccaggaggatatgcaagctatggtgcagctaattcgctacatgcatacttactgcctgccccagcggaagttgccgcctcagactcctgaacctctacctaaggcatgctctaatccaagccagcaggtgcgcagtcggccctggagtagacatcatagcaaggcgtcctgggccgaattcagcatacttcgagaattactcgctcaagatgtgctgtgcgatgtgagcaagccgtaccggttggctacacctgtatacgcgtctttaacaccccgaagtcgaccgcggccccctaaggattcccaagccagccctggacgaccctctagcgtggaagaagttcggatcgcagcgtctcccaagagcactgggccaagaccaagcttgcgccccctgagattggaagtcaagcgagaggtgagaagacccgccagactgcagcagcaagaggaggaagatgaggaagaggaggaagaggaagaagaagaggagaaagaggaggaggaggagtggggtcgcaagcggcctggccgtggcttgccgtggacgaaattaggccgaaaactggagtcaagcgtgtgtcccgtgcggcgttctaggagactgaatcccgagctcggaccttggttgacatttgctgatgaacctctcgtaccctccgagcctcagggagctctgccatcactatgcctggctcctaaggcttacgacgttgagagagaacttggctcccccaccgatgaagactcaggacaagaccagcagcttctgagagggccccagattcctgctctggaatccccctgtgaaagtggctgcggagacatggatgaggacccttcctgcccacagctgcctcctagagactctccgcgctgcctgatgctggctctgtcgcaatccgatccaactttcggaaaaaaaagctttgaacagacattgaccgtggagctgtgcggcacagccggcctaactcctcccacaacccctccctacaagccgaccgaggaagacccatttaaaccagatataaagcatagcctgggaaaagagatcgctttgtccctaccttctccggagggactctcgctcaaggccactcccggtgcggcccataagctacccaaaaagcatccggaaaggtccgaactgctgtctcacctgcgccacgcaacagctcagcccgcttcccaggcagggcagaaacgccctttctcctgctcctttggtgaccatgactactgccaggtgctgagacccgagggggtgctccagcgcaaagtgctgcgctcatgggaacctagcggagtgcaccttgaggattggcctcagcagggtgctccctgggcggaagcacaagctccgggaagagaagaagaccggtcatgcgatgcaggggcaccacctaaggattcaactctccttcgggaccatgaaattcgcgcctcactaacgaagcactttggactgctggagaccgccctggaggaagaggacctcgcctcatgtaagtccccggagtacgacactgtgttcgaagacagcagttcctcatccggtgagagtagctttctgcccgaggaagaagaggaggagggagaagaggaggaggaggacgacgaggaagaagattctggagtatccccaacttgctccgatcactgtccataccagagtcctcccagcaaagccaacaggcaactctgcagcagaagtaggagttcgagcgggagttctccttgccattcctggagcccagccactcgccggaacttcagatgtgaaagcagaggcccgtgttctgacagaacaccttcaattcgacatgcccgcaaaagacgggaaaaggctataggagagggacgcgtcgtgtacatccagaatctcagtagtgatatgagctcgcgtgagctgaagcggagatttgaagtatttggagaaattgaggagtgtgaagtgctgaccaggaaccgaaggggcgagaaatacggtttcatcacttacaggtgctctgagcacgccgccctgagtctcacaaagggcgcggctctccgaaaaaggaacgagcctagttttcagttgagctacggcgggctgagacatttctgttggccacggtatacggactacgacagcaattcagaggaagcgctccccgccagcgggaaaagcaaatacgaagccatggatttcgattcattgttgaaagaggcgcagcagagcttgcactag

SEQ ID NO: 199073 - DNA, 3054 bp, synthetic construct
  misc_feature 1..3054: note = Description of Artificial Sequence: Synthetic coding sequence
  source 1..3054: mol_type = other DNA
atggccggcaacgactgcggcgccctgctggacgaggagctgagcagcttttttctaaactatcttgccgatacacagggagggggaagtggtgaggaacagttgtatgccgatttcccagagttagacctcagccaacttgacgccagtgacttcgactcagctacctgcttcggggaacttcaatggtgcccagagaactcggagactgagccaaatcagtacagccccgacgacagcgagctgttccagatcgattctgagaatgaggccctcttggcagaactgaccaagacactggatgatattccagaggacgacgttggcttagctgcattccccgccttggatgggggcgacgccctgtcttgcaccagcgcttcaccggctccgtcttcagcaccaccatcgccagctcctgagaagcccagcgctccagctccagaggtagatgaactctccctgctccagaaattattgctggctacaagctatccaacttcaagttctgatacccagaaagaaggcaccgcttggagacaagccggattgcggtccaaaagtcagcgaccatgcgtgaaggctgatagcacccaggacaaaaaggcacccatgatgcagtctcagtctaggagctgtaccgaactgcataaacacctgacgagtgcccagtgttgtttacaggaccgcggtcttcagccgccttgcctgcaaagccccagactgccggccaaggaagacaaggagccgggcgaggactgcccctccccccagccggcccccgcctcccctagggatagcctagccctcgggagagctgatccaggcgctccagtgagtcaggaggatatgcaagctatggtgcagctcataaggtacatgcacacatactgtctgccccagaggaagctccccccccagaccccggaacccctccccaaagcgtgctctaacccttctcaacaagtccgatcaaggccttggagccggcatcactccaaggcctcatgggcggaattctccattcttcgggagctactggcccaggatgtcttgtgcgacgtgagtaaaccctacagactcgcgactcctgtctatgcaagcctgacccctaggtctcggccaaggccccccaaggactcccaggcatcaccaggcagacctagttcagttgaagaggtgcgaattgctgctagtccgaagagcaccgggcctcgaccatccctccgtcctctaagactggaggtgaagcgcgaggtgcggaggccagctagacttcaacaacaggaagaggaggacgaagaagaagaggaagaggaggaagaagaagagaaggaggaggaggaggagtgggggcggaagagacccggccgaggtctcccctggaccaagctggggaggaaactggagtcaagcgtttgcccggtaaggcggagcagaagactgaatccggaacttggtccttggttaacctttgcggatgagcctttagtaccaagcgaaccccagggagcattaccttcactgtgccttgcccccaaagcctacgatgtggagcgtgagctgggctctcccaccgacgaagacagcggccaggatcagcagctgctccgtggtcctcaaataccagcactagagagtccatgtgaatctggatgtggagacatggacgaggaccctagttgcccacagctcccccctagagatagtcccaggtgtctgatgctcgcactgtcccagtcagacccaacattcggaaagaagagcttcgagcagactctaaccgtggagttgtgcgggaccgctggactaaccccccccactaccccgccctacaagcccactgaggaagaccctttcaagcccgatataaagcattccttggggaaggaaatcgctctgagtctaccaagccctgagggcttgtcattgaaggcaacgcctggtgcagcccacaaactccccaagaaacaccccgagaggtctgagttactgtcacatctccggcacgctacagctcagcccgcttcccaggctgggcagaagcgaccattttcctgtagcttcggcgaccacgactattgtcaggtgctcaggcccgaaggcgtgctccagaggaaggtgctccgatcgtgggagccaagtggcgtccatctggaagattggccgcagcagggggcaccgtgggccgaggcccaggcacccggccgcgaagaggacaggtcatgcgatgctggcgccccacctaaggactcaactttgctccgagatcatgagatacgtgcatctttgactaagcactttgggcttctcgaaacagctttggaagaagaggatctggctagctgtaagagccccgagtacgacaccgtgttcgaagatagttccagctcaagcggggagtcttcctttctgcccgaggaggaagaagaagaaggggaggaggaagaagaagacgatgaagaggaggattctggtgtctcacctacctgtagcgatcattgtccctatcagtccccaccaagcaaagccaatagacagttgtgctcgcgcagccggagcagttcggggagctcaccgtgccactcctggtcccccgctacgcgaagaaacttccggtgtgagtccagaggaccctgcagcgacagaaccccctctatccgccacgctcgtaagagacgggagaaagctatcggtgagggaagggtcgtgtacatccagaatctgtcttccgatatgtcttcacgtgagctgaagaggcggttcgaggtgtttggggaaattgaggaatgcgaagttctgacaagaaaccgtcggggcgagaaatacggctttatcacataccggtgttccgaacacgcagcactatccctgaccaagggtgccgcattgagaaagagaaatgaaccaagctttcagctcagctacgggggccttcggcacttttgttggcctcgttatacagactatggaaaacctctgaagccttcccattcactagtcagactgaaagcctgggaggcggtgcctagtctgaataagactcagtcttag

SEQ ID NO: 199074 - DNA, 471 bp, synthetic construct
  misc_feature 1..471: note = Description of Artificial Sequence: Synthetic coding sequence
  source 1..471: mol_type = other DNA
atggccgtgggcaagttcctgctgggcagcctgctgctgctgagccttcaactcggtcaggggtgggggcccgatgcccgaggcgtcccagtggccgacggcgaattcagctcagaacaggtcgctaaggctggcgggacttggctgggtacacatagaccactggcacgtttgcgtcgggctttatcagggccttgtcagctgtggtcattgacattgagtgttgcagagttgggcctcgggtacgcttccgaagaaaaagttattttcaggtattgtgccggatcctgccccaggggagcgagaactcagcatggcttggccctggcgaggctgcaaggccaggggagggcgcatggagggccctgttgccggcccaccagatatacagacgtggcatttttggatgacaggcatcgatggcagagactgccacagctctctgcagctgcttgcggatgcggggggtag

SEQ ID NO: 199075 - DNA, 1422 bp, synthetic construct
  misc_feature 1..1422: note = Description of Artificial Sequence: Synthetic coding sequence
  source 1..1422: mol_type = other DNA
atgggccagagcggccggagccggcaccagaagcgggcccgggcccaagcacagttgcgcaacctggaagcatacgcagccaatcctcattcgttcgtgtttacccgcgggtgcacaggcaggaacatccgccagctctcgctggacgttcgacgcgtcatggagcccctgacggcctccaggctgcaggtccggaaaaagaatagcctgaaggattgcgtcgcggtagcaggcccgttgggtgtgacacacttcctgatcttgagcaagaccgagacgaatgtttacttcaaactgatgaggctgccagggggacccaccctcacctttcaagtgaagaagtactctttggtgcgcgatgtagtgtcaagcctgcggcggcaccgaatgcacgagcagcaatttgcccacccacctctgttggtgcttaactcttttggaccccacggcatgcacgtcaagctaatggcaactatgttccaaaacctctttccaagtatcaacgttcacaaggtcaacctaaacactataaaaaggtgtttgctgatcgactataaccccgattcgcaggaactcgactttcgtcactacagcattaaagtagtccccgtgggtgcgagtcgtggaatgaagaagcttctacaggaaaaatttccaaatatgagtcgtctgcaggatatcagcgaactgctggctaccggcgccggcttatctgagagcgaggccgagcctgatggcgatcataacatcacagaacttccacaggctgttgctgggcgcggtaacatgcgcgctcagcagtccgcagtgcggttgacggagatcggcccccggatgaccctgcagctgatcaaagttcaggaaggggtgggcgaagggaaggtaatgttccatagctttgtttcaaagacagaagaagaactgcaggccattctcgaagccaaggaaaagaagctgaggctgaaggcacagcgccaagcccaacaggcccagaacgttcagcgaaagcaggagcagcgtgaggcacaccgcaagaaatccctggaagggatgaagaaggcacgcgttggaggctccgatgaagaagccagcggcatcccatcaaggaccgcttcgttggagctcggcgaagacgacgacgaacaggaggatgacgatattgagtatttctgccaggcagtcggcgaggccccaagtgaggacttattcccagaggcaaagcagaagagactcgccaaaagcccgggacgcaaacggaaacggtgggagatggatagaggaagagggagactgtgtgatcagaagtttcccaagactaaggacaagtctcaaggggcacaggcgcggcgggggcccagaggcgcgagccgggatgggggccgcggtcgcgggaggggccggcccgggaagcgcgtcgcatag

SEQ ID NO: 199076 - DNA, 1383 bp, synthetic construct
  misc_feature 1..1383: note = Description of Artificial Sequence: Synthetic coding sequence
  source 1..1383: mol_type = other DNA
atgggccagagcggccggagccggcaccagaagcgggcccgggcccaagcccagctacgaaacttggaagcctacgctgctaatccacactcattcgtgttcacccgcggctgcaccggcaggaacattcggcagctctcccttgatgtacgaagagtcatggaacccctgacggcgagtcgactgcaggtgcgtaaaaaaaactcccttaaggactgcgtcgctgtggctggcccactcggcgtcacccacttcctgatcttgtctaaaactgagacgaatgtctacttcaaactgatgcgcctgccaggaggacccactttgacatttcaggttaaaaagtatagcctggtacgtgacgtggtcagttctttacgacgtcaccgcatgcacgagcaacaatttgcgcaccctccattactagtgctgaacagtttcggtcctcacggtatgcatgtgaaactaatggcaaccatgttccaaaatctgtttccctctatcaatgtccataaagttaacctcaacaccattaaacgctgtttgctgattgattataacccagattcacaggagttagattttcgccattatagcatcaaggtggtaccagtaggcgcaagccgaggcatgaaaaaactccttcaggagaaatttccaaatatgagcagactccaagacatatcagaactactggctaccggagcaggattatccgaatcagaggccgaacctgatggggatcacaatatcactgagttgccccaggccgtggcagggagaggcaatatgagagcccagcaatctgctgtcaggctcacagaaataggtccgagaatgacgcttcagcttattaaggtgcaggagggcgtcggcgagggaaaagtgatgttccacagttttgtgagcaaaacagaggaagaactgcaggccattctggaggcgaaggagaaaaagctgaggctgaaggctcaaaggcaggctcaacaggcgcagaacgtacagcggaagcaggaacaaagggaggctcatagaaaaaaatccctggagggaatgaagaaagccagggtgggcggttccgacgaagaggccagcggcatcccatcccggacagcctctctggaattgggagaagatgacgatgaacaggaggacgatgacatagaatacttctgtcaggctgtcggagaggcaccctctgaggacctttttccagaggcaaaacagaagagactggctaagtcccctggacggaagcgaaagaggtgggaaatggatcgaggtaggggtcgcctgtgtgaccagaagttccccaagaccaaggacaagtcccaagacggaggacgaggccgcggaagaggcaggccgggtaaaagagtagcttag

SEQ ID NO: 199077 - DNA, 2385 bp, synthetic construct
  misc_feature 1..2385: note = Description of Artificial Sequence: Synthetic coding sequence
  source 1..2385: mol_type = other DNA
atgggccagagcggccggagccggcaccagaagcgggcccgggcccaggcacagcttcggaatttggaggcctatgcagccaacccccactccttcgtgttcacaagaggatgcactggcaggaatatccggcagttgtcacttgatgtgcgcagagtgatggagcctctgactgccagccgccttcaggtgcggaaaaaaaacagtttaaaggattgcgtggcggtggctggacctctgggcgtgacccatttccttattctatccaagacagaaaccaatgtgtattttaagttgatgaggctgcctggaggccctacgctcactttccaggttaagaaatacagtctggtgcgggatgttgtttctagtcttaggagacaccgcatgcatgagcaacaatttgcacacccccccttattggtcctgaactcctttggtccacatgggatgcacgtgaagctgatggcaacaatgtttcagaacctgtttccatcaatcaatgtacataaagtgaacctcaacaccataaaacggtgcctgctgattgattataatccagactctcaggaactggactttagacactactcaataaaggtggtgcctgtgggggcttcacggggaatgaagaaactgctccaggagaagttcccgaatatgtcgcgactccaggacattagcgagctgctggctacaggggctggcttgagtgagtctgaagccgagccagatggcgaccacaatattaccgaattgccccaagcggttgccggccggggcaacatgagggcccagcagtccgctgtgcgactgactgagattggcccccgcatgactttacagctgattaaggtgcaggaaggagtgggcgagggcaaagtaatgtttcactccttcgtgtcaaagacagaggaagaattgcaggcaattctggaagccaaagagaagaaattgaggcttaaggcccaacgccaggcccagcaggcacaaaacgtccagcgaaagcaggaacagcgtgaggctcatcggaagaaaagcttggaaggtatgaagaaagcaagggtgggcggatcagatgaggaggcctccggcattccctcacggacggcaagcttggagctgggtgaagacgatgatgagcaggaagacgacgacatcgagtacttttgccaggcggtgggggaggctcctagtgaagacctatttcctgaggccaagcaaaagcggctcgccaagtctcctggacgtaaaaggaagaggtgggagatggatcgaggagccaagagctgtccagccaactttcttgctgccgcagacgataagctatctgggtttcagggcgacttcctgtggcccatactggtggtggagtttctggtagccgtggccagtaacggcctagccctgtacagattctctattcgcaaacaaagaccatggcacccagctgtggttttctcggtccagctcgctgtcagtgacctcctctgtgcactcacactgccacctctggccgcatatctatatccccctaaacattggagatatggagaggccgcgtgcaggctggaacggttcctgtttacctgtaatctcttgggctccgttatcttcattacttgtatatccctaaaccgatacttggggatcgttcaccctttcttcgcacgcagtcacttgcggcctaagcatgcctgggcagtatctgccgcaggctgggtcctcgccgccttacttgcaatgcccactctatcattttctcatctcaaacgcccccaacagggcgcaggcaattgcagtgtagcccgccccgaggcttgcatcaagtgtctggggaccgccgatcacggcctcgccgcgtaccgagcctactctctggtcctcgccggcctgggatgtggactccccctgttactgacactggccgcctatggtgctctaggccgagccgttctgcggagtcctggaatgacagtggcggagaagcttagagttgcggcgctagtggcctccggcgtcgccctctacgccagtagctatgtcccgtaccacataatgcgcgtgctgaatgtggacgcgagacgccggtggagcaccaggtgccccagtttcgctgatattgcacaggccaccgctgccctggagctggggccatatgttggttatcaggtgatgcgaggtctcatgccattggccttctgtgtgcatccattattatacatggctgcagttccgtccctgggctgctgttgtcgacactgtcccgggtatcgggattcctggaatccagaggatgccaagtccacgggccaggcactgcccctcaatgctacagccgcaccgaaaccctccgagccacaaagtagagaactgtcacagtag

SEQ ID NO: 199078 - DNA, 1374 bp, synthetic construct
  misc_feature 1..1374: note = Description of Artificial Sequence: Synthetic coding sequence
  source 1..1374: mol_type = other DNA
atggcccagcccccccggctgagccggagcggcgccagcagcctgtgggaccccgcctcccccgcccccacttctggcccccggccacgactatgggaggggcaagacgtgctggccagatggaccgatggattgttatacttgggcaccatcaaaaaggtggactcggcacgcgaggtgtgcttggtgcaatttgaagatgatagtcaattcctcgtgctgtggaaagacattagccccgctgcgttgcccggagaagagctgttatgctgtgtgtgccgaagtgagacagttgttccgggtaataggctggtttcctgcgaaaaatgtagacatgcttatcaccaggactgccatgtgcctcgcgccccagctcccggggagggagagggcacttcctgggtatgcaggcagtgtgtttttgctatcgctactaagcgaggcggggccctcaagaagggcccatatgccagagccatgctcggcatgaagctgtccctaccttatggactgaaaggcctagattgggatgcaggacaccttagcaatcggcagcagtcttactgttattgtggaggtcctggcgagtggaatctcaagatgctccaatgtagaagctgtctgcaatggttccacgaggcttgcacccagtgtctttcaaagcctttactgtacggcgaccggttctacgaatttgagtgctgtgtgtgccggggagggcccgagaaggtgagacgcctccagctgagatgggtggacgtggcccacctcgtgctgtatcacctctcagtgtgctgcaaaaagaagtatttcgactttgatagagaaatcctgccattcacatcagagaattgggacagcctgctgcttggggagctctccgataccccaaagggtgaacgaagctcaaggttgcttagcgctttaaactcacataaggacagattcatttctgggcgagaaatcaagaagaggaaatgcttattcggtctgcacgccaggatgccccccccagttgaaccaccaaccggggatggtgccctgacaagagccggcccatggggccgggggctaacatcacccggagaggcacccgaggctggggcccgagcccccgaggaggaagccgagggcgaaagtgggggagccggggccactctgtcctccgcgcagagcgcccgagcacctggcgccgagggggcaggttcttctgccgaaggcacagcagcagcccctagcggatgcctcctgcctagcacgctgctgcccgcccctcagggccccctcgggacagtggacccgcagactggacatccgtggaacttcactcttgtatcaccccagaccagccttaaggttccccccacccgctag

SEQ ID NO: 199079 - DNA, 1704 bp, synthetic construct
  misc_feature 1..1704: note = Description of Artificial Sequence: Synthetic coding sequence
  source 1..1704: mol_type = other DNA
atggcccagcccccccggctgagccggagcggcgccagcagcctgtgggatcccgcttctcccgccccaacctcaggacctcggcctaggttgtgggagggccaggatgtgctggccagatggaccgacggactgctctacctcggtaccatcaagaaggttgacagcgctcgcgaggtctgtctcgttcagttcgaggacgactcacagtttctggtactgtggaaagacatatctcccgccgccctgccgggagaggagcttctctgctgtgtgtgcaggagcgagacagtggtgccaggaaacaggctcgttagctgcgagaagtgcaggcacgcgtatcaccaggattgccatgtcccacgcgctcccgcaccaggggaaggagaaggtacctcctgggtctgtaggcagtgcgtatttgccatcgccacaaaacgtggaggcgcacttaagaagggcccttacgcgagagccatgcttggtatgaaacttagtctgccttatggtttgaagggactggattgggatgccgggcatctctcaaacagacagcaatcttactgttattgtggaggcccgggagagtggaacctcaagatgctgcaatgtagaagctgcctccaatggttccacgaggcgtgtacccaatgcctctccaaaccactgctatacggcgacagattctacgagtttgaatgctgtgtatgccggggtggaccagagaaggtcaggcggctgcagctgcgctgggtggatgtggcgcacctggtcctgtatcacttgagcgtgtgctgtaagaagaagtactttgactttgatagggagatcctccccttcacgtcggaaaattgggactccctgctgctcggcgagttatccgacactccgaaaggtgagcgttcgtccaggctcctgagcgccctgaactcacacaaggatcggttcatatctgggagagaaatcaagaagaggaagtgtctgttcggactgcatgcacggatgcctccccccgtggagcctcccaccggagacggggccctaacgagcttccctagtggccagggaccaggcggaggagtgtcgagacccctgggaaagcggaggcggccagagccagagcccctccggcgccgacagaagggaaaggttgaggaattgggccctccctctgccgtgcgcaaccagcctgagccacaggagcagcgggagagagcgcatctacagcgggctctgcaggccagcgtgtcacccccgagcccttcccccaaccagtcctaccagggctcttctggatataactttcggcctacagacgcaagatgtttgccctcgtctccaatcagaatgttcgccagcttccatccatcagcaagcacagccgggacatctggggatagcggtcctccagatagaagcccactggagctccacattgggttcccaaccgatataccaaaaagtgcacctcacagtatgacagccagttcctcctccgtgtcgtctccttcgccaggcctgcccagacgcagtgcaccccctagcccactgtgcagatccctcagcccaggaaccgggggcggcgtgcggggcggcgttgggtatctctctagaggcgaccctgtgagagttttggcccgcagggtccgccccgacggtagcgtacagtacctcgtggaatggggaggcggcgggattttctag

SEQ ID NO: 199080 - DNA, 732 bp, synthetic construct
  misc_feature 1..732: note = Description of Artificial Sequence: Synthetic coding sequence
  source 1..732: mol_type = other DNA
tgaagcctgctgctgaccgccacccggaccgtgagcttccagggcgagcgccttaggcggggaaacgtgtgtctcgtgtctatgctcggatgcctacctctctggtcaccactgctggagatggagcattcacccggccaggggcccgggggtggggtatctaggcccctgggcaagcgccgccgtccagagccagagcccctgaggcggcgccagaaaggaaaagtcgaggagcttggccccccttcagccgtccgaaatcagccagagccacaggaacagcgggagagggcgcacttgcagagggccctgcaggccagtgtcagtcctccctcacccagccctaaccaatcctatcagggttcttccggttataattttcgcccgacagacgcgagatgccttccaagcccaatccggatgtttgcctccttccaccccagcgcttccacagcagggacctctggtgatagcggtccccccgatcgatccccgctagaactgcacatagggttcccgacagatatccccaagagtgcaccccacagcatgaccgcctcatcatcatctgtttcctcccctagccccggtctgccacgacggagtgctcccccatcaccactatgccggagtctgtcacccggaacaggcggaggcgtgcgagggggagtcggctacctgtcacggggcgacccagtgcgcgtcctcgcgcgcagagtccgacccgattag

SEQ ID NO: 199081 - DNA, 438 bp, synthetic construct
  misc_feature 1..438: note = Description of Artificial Sequence: Synthetic coding sequence
  source 1..438: mol_type = other DNA
atggcccagcccccccggctgagccggagcggcgccagcagcctgtgggatcctgcttcccccgcaccgacatctgggccccggcctcggctgtgggagggacaggatgtactggcacggtggaccgatgggctcctgtacctgggcacgatcaaaaaagtggactccgcccgggaagtttgtctggtgcaatttgaggatgatagccagtttcttgtgctgtggaaggatatcagccctgccgcccttcctggggaggaactgctgtgctgcgtttgtcgtagcgagaccgtggttccaggtaaccgattggtgagctgcgagaagtgccgccacgcttatcaccaggattgccacgttcctagagcaccggctccgggtgagggcgagggaaccagctgggtctgccgccagtgtgtattcgcaatcgccacctag

SEQ ID NO: 199082 - DNA, 546 bp, synthetic construct
  misc_feature 1..546: note = Description of Artificial Sequence: Synthetic coding sequence
  source 1..546: mol_type = other DNA
tggggccacccccagcagtgcgccatcagccccagcccccggagccggggatcgggccttatctgtcgtgggcactgtagacctcaatgcctgcaccaccctccagcgcttacaagggtgactagggctgctgccgccactacaagcgggccccagatgccagccgcctgccctggacatccaatccgcatgttcgcctcttttcatccctccgcctcaacagccgggacttccggtgatagtggtcctcctgacaggtccccactggagttgcatatcggctttcccacagacatccccaagtctgcaccccactctatgaccgcctcctcctcttctgtgtcaagtccgtccccaggactgccacgtcgatcggccccaccaagtcccctgtgcaggtccttgtcaccaggaacaggtggaggggttcgaggaggtgtgggttacctctctcgtggcgacccggtacgcgttttggccaggcgggttcggcccgacggctccgtgcagtatcttgtggaatggggtggcggcgggatcttttag

SEQ ID NO: 199083 - DNA, 438 bp, synthetic construct
  misc_feature 1..438: note = Description of Artificial Sequence: Synthetic coding sequence
  source 1..438: mol_type = other DNA
atggcccagcccccccggctgagccggagcggcgccagcagcctgtgggaccccgccagccccgcccctacttcaggtcccaggcctaggctgtgggaaggccaggatgtgctggctcgctggaccgatgggctgttgtatctgggtactattaagaaggttgattcagcgagggaggtttgcctggtacagttcgaagacgatagtcagtttctggtactttggaaagatatttccccagccgcactgcctggcgaagaactgctgtgttgtgtgtgcagaagcgagacagtggtacccgggaatcggttagtttcctgtgagaagtgtagacacgcttatcaccaggactgtcacgtgccccgcgccccagccccgggcgagggtgagggtactagctgggtgtgccgtcagtgtgtttttgcgatagccacttag

SEQ ID NO: 199084 - DNA, 1704 bp, synthetic construct
  misc_feature 1..1704: note = Description of Artificial Sequence: Synthetic coding sequence
  source 1..1704: mol_type = other DNA
atggcccagcccccccggctgagccggagcggcgccagcagcctgtgggatcccgcgtcgcctgcaccaacgagtggcccccgccccagactctgggaagggcaggatgtattggcccgatggacggatgggcttctgtacctgggcacaattaaaaaggtagattccgcaagggaggtgtgcttagtgcagttcgaagacgatagtcagttcttggttttgtggaaggacatttccccagctgcgctgcccggagaggaacttctgtgttgcgtgtgcagaagcgaaacggtagtgccaggcaacagactggtgagttgcgagaaatgccgacacgcctaccaccaagattgccatgtgccacgcgcacctgcacctggcgagggagagggaacaagttgggtctgtaggcagtgcgtattcgcaattgccactaagcgggggggagccttaaaaaaaggcccttatgccagagcgatgcttggaatgaagctgtcactcccttacgggctaaagggactggactgggatgctggccatctgtctaacagacagcagtcctactgctactgtggcggccccggtgagtggaacctcaaaatgcttcagtgccgcagctgccttcagtggttccatgaagcgtgtacccagtgcctgagcaagcctctcttgtatggcgacaggttctatgaatttgaatgttgcgtgtgtcgaggaggccctgagaaggtgaggaggctacagctgaggtgggtcgacgtagcacacctagtactgtaccatctgagcgtttgctgcaagaagaaatattttgattttgaccgggagatcctcccgtttacgagcgagaattgggactctttactactgggagagctctctgacacccctaaaggtgaacgatccagtaaacttctgtcggccttgaacagtcataaggacagattcatatctggccgggaaattaagaaaaggaagtgtctcttcggcttacatgcaaggatgcctccacctgttgaaccccctaccggcgatggcgcacttacgagctttccatcgggacaaggccccgggggcggtgtgtctcggccgctcggtaagcggaggagacccgagcccgaacccctccgacgaagacagaagggcaaagtggaggaactggggcctcctagtgcagtgcgcaaccagccggaaccacaggaacagcgggaaagagcacacctgcagcgtgccttacaggcctcggtgtcacctcctagtccgtccccaaaccaatcttatcagggatctagcggttacaattttcgacccacagacgccaggtgcctgccctcctcgcctatcagaatgttcgccagcttccatccctctgcatcgactgcaggaacaagtggagacagtgggccgcctgacaggtcccccctggagctccatatcgggtttcctaccgacatccccaaatctgctcctcattccatgacggcttcttcttcatccgtcagcagcccatctcctggcctgccacggcggtccgctcccccaagcccgctatgcagaagcctttcacccggcactggaggaggcgtgcgcggaggcgtaggctacctcagtagaggtgatcctgtgcgggtcttagcacgacgggtcagacccgatgggtctgtccagtatttggtagaatggggaggcgggggaattttttag

SEQ ID NO: 199085 - DNA, 684 bp, synthetic construct
  misc_feature 1..684: note = Description of Artificial Sequence: Synthetic coding sequence
  source 1..684: mol_type = other DNA
atggcccagcccccccggctgagccggagcggcgccagcagcctgtgggaccccgcatcccctgctccaacctctgggccccgtcccaggttgtgggaaggccaggatgtgctggcacgctggaccgacggcctgctgtacctgggaactattaaaaaagtcgatagcgcccgagaagtctgtctcgttcagttcgaggacgactctcagtttcttgttctgtggaaggacatctcacccgccgccctgcctggtgaagaattactttgttgtgtgtgcagaagtgagaccgtggtgcccggcaaccgcctggtgtcctgtgaaaaatgtcggcatgcgtatcaccaagactgtcatgtccccagggcgccggcaccaggagaaggcgagggaacgagctgggtctgccgccagtgtgtgttcgcaatagctaccaagaggggtggggcgctcaagaaagggccctatgctcgggccatgctagggatgaagctgtctttgccctatggcctcaagggcctggattgggacgccgggcacttatcaaacaggcaacaatcatactgttattgcggaggcccgggtgagtggaaccttaagatgttacaatgtcgttcatgcctccagtggttccatgaggcctgcacacagtgcctgagcaagcccctcctgtatggcgattag

SEQ ID NO: 199086 - DNA, 684 bp, synthetic construct
  misc_feature 1..684: note = Description of Artificial Sequence: Synthetic coding sequence
  source 1..684: mol_type = other DNA
atggcccagcccccccggctgagccggagcggcgccagcagcctgtgggaccctgccagcccagcaccaactagcgggccacgcccacggctgtgggagggacaggatgttctggcccggtggacagacggcttgctgtacctcggcactatcaagaaggtggatagcgcgcgagaagtctgtctggtacagttcgaggatgactcacagttcctggttttgtggaaagacatttccccagccgctttgcccggagaggaacttctgtgctgtgtctgtagaagcgagaccgtcgtgcccggtaacagactggtcagctgcgaaaagtgccgccacgcttaccaccaagattgccatgtgccacgggctccggcccctggggaaggagaaggcacctcttgggtctgccgacagtgcgtgttcgccatcgcgactaagcggggcggcgccctgaagaaaggcccctatgcgagagcaatgctaggcatgaaattgtcattgccgtacggacttaaagggttagattgggatgcaggtcacctctccaacagacagcagtcatactgctactgcggtgggcccggggaatggaatttgaagatgctgcagtgtcgctcttgccttcagtggttccacgaagcctgtacacagtgcttgtccaaacccctcctctacggagactag

SEQ ID NO: 199087 - DNA, 1374 bp, synthetic construct
  misc_feature 1..1374: note = Description of Artificial Sequence: Synthetic coding sequence
  source 1..1374: mol_type = other DNA
atggcccagcccccccggctgagccggagcggcgccagcagcctgtgggatcccgccagtccggcgcccacatccggtccccggcctaggctttgggagggtcaggacgtgttggccaggtggaccgacgggctgttgtacctggggaccatcaagaaagtagactctgcccgggaagtgtgtctcgttcagttcgaagacgattctcagttccttgtgctttggaaggatatctcgcctgctgccctccctggagaagagcttttatgttgcgtatgtcggtccgagactgttgtgccaggtaatcggctcgtatcctgcgagaagtgtcggcacgcttaccaccaggattgccacgtccctcgggcccctgcgcctggggagggagaagggacttcttgggtatgcagacagtgtgtgttcgcgatcgccaccaaacgagggggcgcgctgaaaaagggtccctatgcgcgagctatgctggggatgaagctgtcactgccctatgggttaaagggattggactgggatgcaggacacctctccaataggcagcagtcatattgttattgtgggggcccgggcgagtggaacttaaaaatgctgcagtgccgtagctgcctgcaatggtttcacgaggcttgcacccagtgtttgagtaagcccctgttgtatggagacaggttttacgaatttgagtgctgtgtgtgcagaggtggcccagagaaggtacggcgactgcagctccggtgggtggatgtggcccacctggtgctctatcatctatctgtgtgttgtaaaaaaaagtattttgacttcgatcgagaaatccttccgttcacctctgagaactgggattcattactgttgggcgaactttctgacacacccaaaggcgagagaagcagcaagttgctgtcagctctgaactcacataaagacaggttcatcagcggcagagagattaaaaagaggaaatgtctttttggactgcatgccagaatgcctccacctgtggaaccgccaaccggagacggagccctcacaagagccggaccctgggggcggggactgacatccccaggagaagcgcccgaggccggagcacgggctccagaggaagaagcagagggagaaagcggcggcgcaggggcaactctgtcctctgcccagagtgctagagcacctggcgctgaaggtgctgggagtagcgctgaagggactgcggccgcaccctctggctgcctgctaccttcgaccctcctgcccgctccacagggaccgctcggaacagttgatccccagactgggcatccctggaatttcacgctggtgtccccgcagacgtccctcaaagttcctccaaccaggtag

SEQ ID NO: 199088 - DNA, 1497 bp, synthetic construct
  misc_feature 1..1497: note = Description of Artificial Sequence: Synthetic coding sequence
  source 1..1497: mol_type = other DNA
atggccgccgccgccggccccggcgccgccctgagcccccggccctgcgatagtgatcccgcaacccctggcgcccagagccctaaggacgacaatgaagataattccaatgacgggactcaacctagcaaacggcggagaatggggagcggggacagtagtcgctcatgtgagacctctagccaagaccttggcttctcctactatcctgcagaaaacttaatcgagtataagtggcctcccgatgaaacaggtgagtattatatgctgcaagaacaagtttccgaatatctcggcgtgacatcgtttaaaaggaaatatccagatctggagcggcgagatctgagtcacaaggagaagttgtaccttcgggaactcaatgttatcaccgagacacaatgcactctgggcttgaccgctctgaggtccgatgaggtcatcgacctcatgatcaaagaatatcctgcgaagcatgccgaatattccgtgattcttcaggagaaggaaagacagcggatcaccgaccattataaggagtactcccagatgcagcagcagaatacacagaaggttgaggcctcaaaggtcccagagtacatcaaaaaggccgcaaaaaaggctgccgagttcaatagcaacctgaaccgagaacggatggaggagcgtcgggcatacttcgatctacaaacacatgtgatacaggtgccccaaggcaagtataaggtactccctaccgagcgcacaaaagtttctagctacccagtcgctttgattccagggcagtttcaggaatactataaacgctatagccctgacgagctaagatatctcccccttaataccgcgctctacgagccccccctggacccggagctgcccgcgctcgactccgacggtgactcagacgatggagaagacgggcgaggagacgagaagaggaaaaacaaaggcacttctgattccagtagtgggaacgtcagcgagggggaaagtccccccgacagccaggaagattcatttcagggcaggcagaagagtaaggacaaggctgcaactccccggaaggacgggcccaaacgctctgtcctgagcaagtccgtgcctggatataaaccaaaagttatccccaacgctatctgtggaatctgcctgaagggaaaagagtcaaacaaaaagggcaaggctgaaagcctaatccactgcagtcagtgtgaaaacagcggccaccccagttgcctcgacatgacaatggagcttgtctcaatgatcaagacatatccctggcagtgtatggaatgtaagacttgtatcatttgtggccagcctcaccatgaggaagaaatgatgttttgtgacatgtgcgataggggctaccatacattctgcgtgggcctcggagcaattcccagtggtcgatggatttgcgactgctgtcagcgggccccacccaccccaagaaaggttggccggaggggcaagaacagcaaagagggatag

SEQ ID NO: 199089 - DNA, 1491 bp, synthetic construct
  misc_feature 1..1491: note = Description of Artificial Sequence: Synthetic coding sequence
  source 1..1491: mol_type = other DNA
atggccgccgccgccggccccggcgccgccctgagcccccggccctgcgatagtgatcctgctacccctggggcccaatcccctaaggacgacaatgaagacaattccaacgatggcacccagccctctaagcggcgaagaatgggcagcggcgattcctccaggagctgcgagacgagctctcaggacctgggcttttcttactacccagcagagaacctgatcgaatataaatggccccctgatgaaactggcgagtattacatgctgcaggaacaagtctcagagtatctgggcgtaacgagctttaagcggaagtatcctgaaaggagggatctaagtcataaagaaaagctataccttagggagctgaatgtcattactgagacccagtgcactcttggcctgactgcactgcgttctgatgaggtcatcgaccttatgataaaagaataccctgccaagcacgcagaatacagcgtcattctccaggaaaaagaacgacaaaggataacagaccattataaggaatattcccagatgcagcagcagaatactcagaaggtggaagcctcaaaagtgcctgagtatattaagaaagccgccaaaaaggccgctgagtttaacagtaatctcaacagggaaagaatggaggaaagacgggcttactttgaccttcagacgcatgtcatccaagtcccccaggggaagtacaaggttcttcctactgagcggacgaaggtgtctagttacccagtcgcactcatccctggccaattccaagaatactataagaggtacagtccagacgagcttcggtacctgccactcaacaccgctctgtacgagccccccctagatccagaattaccagcgctggactccgatggcgattccgacgatggtgaggacgggaggggcgatgagaagagaaaaaacaaagggaccagtgactctagctctgggaacgtaagtgagggagaatcccctccagacagccaggaggattcctttcagggacgtcagaaatcaaaagataaggcggctactcctaggaaggatgggcccaaacggtctgtgctgagcaaatctgtgcccggttacaaaccaaaggtgattccaaatgcgatctgcggtatctgcctcaagggcaaagaatcaaacaagaagggcaaagccgaatcattgatacactgttcgcagtgcgaaaattcgggacatccttcatgtctggacatgaccatggagttggtatcgatgatcaagacatacccctggcaatgcatggaatgtaagacatgcattatctgcgggcaacctcaccacgaggaggaaatgatgttctgtgacatgtgtgacaggggctatcacaccttctgcgttggacttggagcaatcccatccgggcgatggatatgcgattgttgtcagcgcgcgccacctactccgcgcaaggtggggcgacggggcaaaaattctaaggagggctag

SEQ ID NO: 199090 - DNA, 879 bp, synthetic construct
  misc_feature 1..879: note = Description of Artificial Sequence: Synthetic coding sequence
  source 1..879: mol_type = other DNA
atggagaagcggacctgcgccctgtgccccaaggacgtggagtacaatgtgctctacttcgcacagtcagagaatatcgccgcccatgagaactgtctcctgtatagctctggactggttgagtgcgaggaccaggacccattgaacccagatcgttcattcgatgtcgaatccgtaaagaaggagattcagaggggcagaaagctgaaatgcaagttctgtcataagcgcggcgcaacagtcggatgcgacttgaagaactgtaacaagaattatcatttcttctgcgctaaaaaagacgacgcggtgcctcagtctgacggggttcgcggaatctacaaactgttatgtcaacaacacgcgcaatttcccattatcgcccaatccgccaaattctccggcgttaaaaggaagcggggccgaaagaaacccttgagcggcaaccacgttcaaccgcctgaaactatgaagtgtaacactttcattcgccaggtcaaggaggagcatggtagacataccgatgctacagtgaaagtcccatttctcaaaaagtgtaaagaagcagggctactcaactatctcctggaggaaatcctggacaaggtacactccatcccagagaagttgatggacgagaccacttccgaatcggattatgaagaaattggctcagcccttttcgattgtagactattcgaggatacgttcgtgaatttccaggctgcaatcgaaaagaagatccacgcaagtcagcagaggtggcagcagctcaaagaggaaatagagctgctgcaagaccttaagcagacactatgcagctttcaagagaacagggatttaatgagctcatctacttcgattagctccctcagctactag

SEQ ID NO: 199091 - DNA, 996 bp, synthetic construct
  misc_feature 1..996: note = Description of Artificial Sequence: Synthetic coding sequence
  source 1..996: mol_type = other DNA
atggcccaggccagccccccccggcccgagcgggtgctgggcgcctcctctccagaggcgaggcccgcccaggaggccttgctactgcctaccggcgtttttcaggtggccgagaagatggaaaagcgcacgtgcgctctttgtcccaaagacgtagaatacaacgtcctgtattttgcacagagcgagaatattgccgctcatgaaaactgcttactgtactcctcgggcctggtggagtgtgaggatcaggatccactgaaccccgatcggagcttcgacgtggagtcagttaaaaaagagattcagagagggcgaaaactcaagtgtaagttttgtcacaaacggggggctacggtcggctgtgatctcaagaattgtaacaaaaattaccatttcttttgcgcaaagaaagatgatgctgtgccgcagagcgatggcgtccgtggaatttacaagctcttgtgtcaacagcacgcacagtttcccataatcgcccagtctgccaaatttagcggcgtgaaaagaaagcgcgggaggaagaaacctctctctggaaaccacgtgcaacctcccgagacaatgaagtgtaacaccttcattagacaggtcaaggaagaacatggtaggcatacagacgccactgtaaaggtgccctttctgaaaaaatgtaaggaagctggccttctgaactaccttctggaggagatcttagataaagtccactccattcccgaaaaactgatggacgagactacgtctgaatcagactacgaggaaattggtagcgccctctttgattgcaggctcttcgaagacacattcgtaaactttcaagcggctatcgagaagaaaatccacgcttcccagcaacgttggcagcaactgaaagaagagatcgaattgctgcaggatctgaagcagaccctgtgcagtttccaagagaatagagacctcatgtcgagctcaacaagcatatcctctctcagctactag

SEQ ID NO: 199092 - DNA, 861 bp, synthetic construct
  misc_feature 1..861: note = Description of Artificial Sequence: Synthetic coding sequence
  source 1..861: mol_type = other DNA
tgacggcccggcccccggggctgcagcgcccccgccgcccggcggccagggcccaggcgacgccggtcgagctttccccccttgtactcctccggtctggtggagtgtgaggaccaggaccctctcaaccccgaccggtctttcgatgttgaatcagttaagaaggagatccaacgagggcgaaagctgaagtgcaagttttgccacaagcggggagcgacagtaggttgtgatttgaaaaactgcaacaaaaattatcactttttctgcgctaaaaaagacgacgcggtgccacagtcggacggtgtcagagggatctataagctcctgtgtcagcaacacgcacagttccccatcattgcccagagtgccaaattctccggggtgaagcggaagaggggaaggaaaaaacctctttctgggaaccatgtgcagcccccggaaaccatgaagtgtaatacttttatccgccaggtcaaggaagaacacggaagacacacagacgccacagtcaaggtgcccttcttgaaaaagtgcaaagaggctggattgttaaactaccttctcgaggagatattagataaggtccactccatcccagagaaacttatggacgagactactagcgaatccgactacgaagagatcggcagcgccttgttcgactgccgcttatttgaagatacctttgtaaatttccaggccgccattgaaaaaaagattcacgccagccagcagcgatggcagcagttaaaggaagagatcgaacttttacaggatctgaagcagacactgtgctcctttcaagagaacagggacctaatgtcttcctccacctcaatcagtagcctatcgtactag

SEQ ID NO: 199093 - DNA, 507 bp, synthetic construct
  misc_feature 1..507: note = Description of Artificial Sequence: Synthetic coding sequence
  source 1..507: mol_type = other DNA
atggagaagcggacctgcgccctgtgccccaaggacgtggagtacaacgtgttatacttcgcgcagtctgaaaacatcgccgctcacgaaaactgtttgctgtattctagcggccttgtggaatgcgaggaccaggaccccctcaatcccgatcggtccttcgatgtcgaaagcgtgaaaaaggagatccagcgggggaggaagctcaaatgtaagttctgccacaagagaggcgccacggtgggctgcgaccttaagaactgcaacaaaaattaccacttcttttgcgccaagaaggatgacgctgttccacaaagcgatggcgtgaggggaatatacaagctgctatgtcagcagcacgctcaatttccgataattgcacagtcggcaaaattttcgggcgtgaaaagaaagcgcggcagaaaaaagccgctgtctggcaatcacgtgcaaccaccagagaccatgaagtgtaacacgtttatcagacaggtgaaggaagagtag

SEQ ID NO: 199094 - DNA, 297 bp, synthetic construct
  misc_feature 1..297: note = Description of Artificial Sequence: Synthetic coding sequence
  source 1..297: mol_type = other DNA
atggagaagcggacctgcgccctgtgccccaaggacgtggagtacaacgtgctgtatttcgcccaatccgagaacattgccgcccacgagaattgtctgctgtactccagtggcctggtggaatgtgaggaccaggaccccctcaatccagatcggtccttcgacgtggagtcagtgaagaaggagatccagagaggcaggaagctcaagtgcaagttttgccataaacgcggagctacagtgggctgtgacttgaagaattgtaacaagaattatcattttttctgcgcaaagtag

SEQ ID NO: 199095 - DNA, 879 bp, synthetic construct
  misc_feature 1..879: note = Description of Artificial Sequence: Synthetic coding sequence
  source 1..879: mol_type = other DNA
atggagaagcggacctgcgccctgtgccccaaggacgtggagtacaatgtgttgtacttcgctcagtctgagaacatcgcagcgcacgagaactgcttgctgtacagttctggactggttgaatgcgaggatcaggacccactcaatccagatcgcagcttcgacgtagagagtgtgaagaaggagatccaacgaggaaggaaactcaaatgtaaattctgtcataagcgaggagctaccgtggggtgcgacctcaagaattgtaataagaattaccatttcttttgtgcaaagaaggacgacgccgttccacagtcagacggagttagaggcatatataaactcttatgccaacagcacgcccaatttccaatcatcgcccagagcgctaagttttccggcgtaaaaagaaagagggggaggaaaaaaccactcagtgggaaccacgtacagccgccagagaccatgaagtgcaacactttcatacgacaggttaaagaagaacatggacggcatactgacgccacagtcaaagttcctttcctcaaaaagtgcaaggaggcaggtcttctcaactacctgctggaagagatcctggataaggtgcacagcattccagagaaactgatggacgagacaacgtcagaatctgattatgaggagatcggctcagctctgtttgattgtagattgttcgaggatacattcgtgaactttcaagctgccatagagaaaaagatacatgccagccaacagaggtggcagcaactcaaggaagaaatcgagctgctccaagacctgaaacaaactctctgttcctttcaggagaaccgtgatctcatgtcgtcctcaacttccatatcgagcctgagttactag

SEQ ID NO: 199096 - DNA, 624 bp, synthetic construct
  misc_feature 1..624: note = Description of Artificial Sequence: Synthetic coding sequence
  source 1..624: mol_type = other DNA
atggagaaccgggccctggaccccggcacccgggacagctacggcgcgacttctcacctacctaataaaggcgcgctggcgaaggtgaagaataattttaaggaccttatgagcaagttaacagagggtcaatacgttctgtgtagatggacagatggtctttattatctcggtaagattaagcgagtaagtagtagcaaacaatcttgcctggtcaccttcgaagataattcgaagtactgggtactttggaaggacattcaacacgctggcgtgccaggtgaagaacccaaatgtaacatctgcctgggaaaaacatctggccccttgaacgaaattctcatctgcgggaagtgcggcctgggctaccaccagcagtgccatatacctatcgctggttctgctgaccagccactgctgactccctggttctgccggcgctgtattttcgcactggctgtgcgtgtttctctgcctagttcccctgtgcccgcctcccccgcctcaagctctggcgccgatcagagactgccatctcaatctctatcaagcaaacagaagggccatacctgggccctggagaccgactcagcatctgccacggtcctaggccaggacctgtag

SEQ ID NO: 199097 - DNA, 1743 bp, synthetic construct
  misc_feature 1..1743: note = Description of Artificial Sequence: Synthetic coding sequence
  source 1..1743: mol_type = other DNA
atggagaaccgggccctggaccccggcacccgggacagctacggcgccacaagtcaccttcctaacaagggcgccttggctaaagtcaagaacaacttcaaagaccttatgtccaagctcacggagggccagtatgtgttatgccgttggaccgacggcttatactacctcggcaaaatcaaacgggtgtcttccagcaagcaatcatgcttggttacgttcgaagacaactccaaatactgggttctttggaaggacattcagcacgcgggggtgccaggggaggagcccaagtgcaatatctgcctgggcaagacatccggacctctcaatgaaatcctgatttgtggcaagtgcggtttaggataccaccagcagtgccacattcccattgcaggaagtgccgaccagccattacttaccccttggttctgtcggcgctgtatatttgccctggcagtgaggaaaggtggcgccctcaagaagggcgctatagccaggactctgcaggctgtgaagatggtcctgagctatcagccggaggagctagagtgggactcgccacatcgtaccaaccagcagcagtgttactgctactgcggcggcccgggggagtggtacctcagaatgcttcagtgttacaggtgtcgtcagtggttccatgaggcgtgtacccaatgcttgaacgaacctatgatgtttggcgaccgattttatttgttcttttgctcagtgtgtaatcaggggccagagtacatcgagaggctgcccctcagatgggtggacgtggtacatctggctctttacaacctaggggtgcaatctaagaaaaaatactttgacttcgaggagatactagccttcgtcaaccaccactgggaactgctccagctagggaaactgacgagcacccccgttacagatagggggccacatctgttgaacgccctcaactcctacaagtcccgattcctgtgtggcaaggagatcaagaaaaagaaatgtatcttcagactccggattagagtaccacccaatcctcctggcaaactcctccccgacaaaggcctgctgcctaatgagaatagcgcctcgtcagaactgcggaaacgcggcaaatccaagccggggctcctaccccacgagtttcagcagcagaagcgcagagtctaccgaagaaagagatcaaagtttctgcttgaggatgcaatcccaagtagtgatttcacatctgcctggagcacgaaccatcacttagcgtctattttcgacttcacgctcgatgagattcagtcactgaagagtgcaagctccggacagacattcttttccgatgtggattcaaccgatgcagccagtacaagtgggtccgccagcacgagcctgtcctatgactctaggtggaccgtgggctcacgcaagcgaaagctggccgccaaggcgtatatgcctctcagggcaaagcgctgggccgctgagctcgatggtagatgccccagcgattctagcgcggagggggcctccgtccctgagcgtcccgacgagggcatagattcacacacttttgagagcatttccgaggacgattccagcctgagccacctcaagagctcaataacaaattacttcggcgctgctggacgccttgcatgtggagaaaaataccaggtactggctagaagagtgacgccagaggggaaggttcagtatttagtcgagtgggagggcaccactccctactag

SEQ ID NO: 199098 - DNA, 1116 bp, synthetic construct
  misc_feature 1..1116: note = Description of Artificial Sequence: Synthetic coding sequence
  source 1..1116: mol_type = other DNA
atgctgcagtgctaccggtgccggcagtggttccacgaggcctgcactcagtgtcttaacgagcccatgatgttcggtgatcgtttctacttgtttttttgcagtgtgtgtaatcagggtcctgagtacattgaaaggttgcccctgcggtgggtagatgtggtgcacctcgctctgtacaacctgggggtgcagagtaaaaaaaagtacttcgattttgaggaaatcctggcgtttgtgaaccaccattgggagctgcttcagctcggaaagttgacctcgacacccgttacagacaggggccctcacttgcttaacgctctcaatagttacaagagcaggtttctgtgcgggaaggaaatcaaaaaaaagaaatgtatctttaggctgcgtatccgtgtgccccctaatccacccggtaagttgcttcctgataagggcctcctccccaacgaaaacagcgcaagttcagagctgcgaaagaggggcaagagcaaacccggtcttctcccccatgagtttcagcaacaaaagagaagagtgtataggcggaagcgctctaaatttctgctggaggacgccatacctagctcagacttcaccagcgcctggtcaaccaatcatcacctcgctagtatctttgattttacacttgacgagattcaatccttgaagtccgcctcctctggccagaccttctttagcgacgtagattcaaccgatgctgcgtctacctctggctccgcttcaaccagcttgagttacgatagccgttggaccgtcggtagtcgcaagagaaaacttgccgcaaaggcttatatgccccttagggccaagcgatgggcagcagagctcgacggccggtgtccttccgacagctccgccgagggtgcctccgtaccggaaaggcctgacgaagggattgattcccatacgtttgagtctatatccgaagatgactcatcactgtctcaccttaaatcttcaattaccaactacttcggagcagccggtcgactggcatgcggagaaaagtaccaggtactagcacgccgagtcacaccagaaggtaaagtgcaatacctcgtcgagtgggagggaaccacgccctattag

SEQ ID NO: 199099 - DNA, 501 bp, synthetic construct
  misc_feature 1..501: note = Description of Artificial Sequence: Synthetic coding sequence
  source 1..501: mol_type = other DNA
atggagaaccgggccctggaccccggcacccgggacagctacggcgccaccagccatctgccgaacaaaggggccctcgccaaggtcaagaataattttaaggatttgatgagtaagttgactgaaggccagtacgtgctctgtcggtggacggatggattgtattacctcggaaagatcaagcgtgtctcttcttctaagcaatcatgcctcgtgacctttgaggacaatagtaagtactgggtgctctggaaagacatccagcatgccggcgtcccgggggaagagcccaagtgcaatatttgtctggggaagaccagtggcccactgaatgaaattctgatatgtggcaaatgtgggctcggctaccatcagcaatgtcatattcccatcgccggaagcgctgaccagcctctgcttactccgtggttctgccgaagatgtatatttgccctagccgttcggaagggcggggcactaaagaagggtgcaatcgcctag

SEQ ID NO: 199100 - DNA, 324 bp, synthetic construct
  misc_feature 1..324: note = Description of Artificial Sequence: Synthetic coding sequence
  source 1..324: mol_type = other DNA
atggagaaccgggccctggaccccggcacccgggacagctacggcgccactagccacctaccaaacaaaggcgcactggccaaagtgaaaaacaacttcaaggacctcatgtcaaagctgaccgagggacagtacgttctctgtcgctggacagatggactgtattatcttggtaaaataaagcgtgtctcttcaagcaagcaatcctgcctagtcaccttcgaggacaatagtaagtactgggtactgtggaaagacatacaacacgctggggtacccggggaagagccaaaatgcaacatatgtttaggtaagacatcctag

SEQ ID NO: 199101 - DNA, 1692 bp, synthetic construct
  misc_feature 1..1692: note = Description of Artificial Sequence: Synthetic coding sequence
  source 1..1692: mol_type = other DNA
atggagaaccgggccctggaccccggcacccgggacagctacggcgccacctcccatttgcctaacaaaggggccctggctaaagttaagaataatttcaaagatctgatgagtaaactcactgagggacagtacgtgctttgcaggtggaccgatggcttgtattatctggggaaaataaaacgggtgtccagcagcaaacagtcatgtctggtgacatttgaggacaatagtaaatattgggtgctctggaaggatattcagcacgcgggagtgcctggggaggagccgaaatgtaatatttgtctgggcaagacatctggcccgctgaacgagatcttaatttgcgggaaatgtggattgggctaccatcagcagtgtcacatacccatcgctggatccgctgaccagccactgcttactccctggttctgtcgaagatgcatttttgctctggccgtgcggaagggcggagctttaaaaaagggagctattgcgagaaccctccaggccgtgaagatggttctcagctatcagccagaggaactggagtgggactccccccatcgcacgaaccagcaacagtgctactgctactgcggagggccaggcgagtggtatctgcgcatgcttcagtgctatcgatgtcgccagtggtttcacgaggcctgtacacagtgccttaatgagccaatgatgttcggggaccgcttttatctgtttttctgtagtgtctgcaatcaagggcctgagtatatcgagcggctgcccctgcgctgggtagatgtggttcacctggctttgtacaatcttggagtgcaatctaagaagaagtattttgactttgaggaaatcctggctttcgtgaaccaccattgggagctgcttcagttgggtaagttgactagcactccagtgacagatcgtgggccacatctgctgaacgccttgaattcctataagtcaaggtttttgtgcggaaaagagattaagaaaaaaaagtgcatattcaggcttcgcatcagggtgccccccaatccgccaggaaaactcctcccggataagggtcttctgccgaacgaaaatagtgctagcagtgaattgcgcaaacggggtaagtctaaacctggactcctgccccatgaatttcaacagcagaaaaggcgagtgtatcggcgaaagcgcagtaaattcctgttagaggatgctatcccttcttcagatttcacgtctgcgtggtcgaccaatcatcacctggcctcaatcttcgactttacactcgatgagatccaatcgctcaaaagcgcgagcagtggccaaacattcttctctgacgtggattcaactgatgccgcttcaactagtgggagcgcatccacaagtttgtcctatgacagtaggtggaccgtggggagccgtaagcgaaaacttgccgccaaggcatacatgcctttgcgggcaaagaggtgggcggcggaactggatggtaggtgtccctcggactcctccgccgaaggtgcctccgtgcccgaacgccccgacgaaggaatcgactcccacacattcgaatctatcagcgaggacgatagctccctatcacatcttaaatcatccattacgaattacttcggtgccgccggtcgcctcgcctggggggaagtgcccggagtgggatctgagggccacacttag

SEQ ID NO: 199102 - DNA, 3291 bp, synthetic construct
  misc_feature 1..3291: note = Description of Artificial Sequence: Synthetic coding sequence
  source 1..3291: mol_type = other DNA
atggccaccgtgcccgtgtactgcgtgtgccggctgccctacgacgttacacgttttatgatagaatgcgatgcgtgtaaggattggtttcacgggtcctgcgtgggcgtggaagaggaggaggctccagacattgatatttatcactgtcccaactgtgagaaaacacacggaaaaagcaccctgaagaagaagcgaacctggcacaaacatggacctgggcaggcccccgacgtcaaacctgtccagaacggaagccagttattcataaaagaactgagaagtagaacctttccctcagcagaagatgttgtggcacgcgtccccggaagccagctcacactcggatacatggaagagcacggctttactgaaccaattttggtgcctaagaaggacggcttaggtctcgctgtgcccgcacctacgttttatgtttccgatgtggagaactacgtgggccctgagaggagcgtggacgtcactgacgtgacgaagcagaaggattgcaaaatgaagctaaaagaattcgtggattactactattcgactaataggaagcgtgtgctcaacgtcacgaatctggaattcagcgataccaggatgtcctcttttgtcgaaccgcctgatatcgtgaaaaagttgagctgggtggaaaattattggcctgatgatgcactgttagccaagcccaaagttacaaaatattgtctgatctgtgttaaagactcatacaccgatttccatatagatagcgggggggccagcgcctggtatcatgtgctgaagggcgaaaagacattctacctcattagacccgcttccgctaacatcagcctgtacgaacggtggcgaagcgcatctaatcacagcgagatgttctttgcggaccaagtagataagtgttacaagtgtatcgtgaagcaggggcagactttgttcatccctagtggctggatctacgctaccttaacaccggttgactgtttggcattcgccggccatttcttgcattcattgtctgtggaaatgcagatgcgggcatacgaagtggaacggaggctcaagctcgggtctcttacccaattccccaattttgagaccgcttgttggtacatgggaaaacacctattagaggcttttaaagggagccacaagagcgggaagcaactgccaccacatctggttcagggcgcgaaaatcctaaacggggccttccgtagttggacaaagaaacaagcactggcggaacacgaagacgaactgcctgagcacttcaagccttcacaactgatcaaagatcttgcaaaggagatcaggttatcggagaatgccagtaaagccgtgcgacctgaggtcaacacagtcgcttcaagtgatgaggtctgcgatggggaccgcgaaaaggaagaacccccctcgcccatcgaagcgaccccaccacagtccctcctcgaaaaggtcagtaaaaaaaagactcccaagaccgtgaaaatgccaaaacctagcaagattccaaaacctcctaagccaccgaagccccctcgaccccctaagactctgaaacttaaagatggcggtaaaaagaaggggaaaaaatctcgcgagagcgcaagtcccaccattccgaaccttgatctcttggaggcccataccaaggaggcactgaccaaaatggagccacccaaaaagggcaaagccaccaagtcagtcctctcagtgcctaacaaagacgtggttcacatgcagaatgacgtcgaaaggttggagatacgtgagcagaccaaatcaaaatccgaggctaagtggaagtataaaaattccaaaccagattcactgttgaaaatggaggaggagcaaaagctcgaaaagtcgcctcttgcaggtaataaggacaataaattcagctttagtttctccaacaagaagcttctgggtagcaaggcgttgcggccccctaccagcccgggtgtgttcggggcccttcagaattttaaagaagataagccaaaacccgtccgggacgagtatgagtatgttagcgacgatggggagctcaaaattgacgagtttccaattaggagaaaaaaaaatgcgccaaagcgtgatttatcctttctcctagataagaaggctgtcctacctaccccggtcactaaacccaagctggattcggctgcctataagtcagacgacagtagcgacgaaggttcccttcacatcgatacggacactaagcccgggcgcaatgctcgagtgaagaaagaaagcgggagctccgcggccgggattcttgacctactccaggctagcgaggaagtgggcgccctggaatataacccatcttctcagcctcctgcctctcctagtacccaggaggcgatccagggaatgttgtccatggccaatctgcaggccagtgattcatgcctacagaccacttggggcgcaggccaagcgaagggatcttctctggcggcacacggggctcgtaaaaatggtggcggaagtgggaaatcggccgggaaacgtctgcttaagagagcagcgaagaacagtgttgacctcgatgactatgaagaggaacaggaccacctcgacgcatgctttaaggacagcgactacgtgtacccttctcttgaaagtgacgaggataatccaatttttaaatccagaagcaagaaaaggaaaggatccgacgacgctccctatagtcccactgcccgggtgggaccctcggtgccccggcaagatagacccgtcagggaggggaccagggttgccagtatcgaaactgggctcgctgctgccgcagctaaattatcccagcaggaggagcagaagtcaaaaaaaaaaaaatctgcaaaacgaaaacttacacctaataccacatccccttctactagcaccagtatatctgcaggaaccacatctacatcaacgacaccagcttctacgacacccgccagtacaacccccgcctcaacaagcaccgcatcttcccaagcttcacaggaaggatcgtcacccgagcctcctcctgaaagtcacagcagttccctggcagaccacgaatatacggccgcagggacttttacgggcgcccaggctggtcgaacttcgcagcccatggcccccggagtcttccttacacagcggaggccatcggcttctagccccaacaacaatacagctgcaaagggcaaacgaactaagaagggtatggctaccgccaagcagagactaggtaaaatcctcaagatacacagaaacggcaaattattgttgtag

SEQ ID NO: 199103 - DNA, 984 bp, synthetic construct
  misc_feature 1..984: note = Description of Artificial Sequence: Synthetic coding sequence
  source 1..984: mol_type = other DNA
atggccaccgtgcccgtgtactgcgtgtgccggctgccctacgacgtgacgagattcatgattgagtgcgacgcgtgcaaggactggttccatgggagctgcgtgggcgtggaggaagaagaagccccagacattgacatttatcactgtccgaattgcgaaaaaactcacggaaagtccactttaaaaaagaaacgcacctggcataaacacggccctgggcaggcaccagacgttaaaccaaagaacagtgtagatttggacgattacgaagaggaacaggaccacctggatgcctgctttaaggattctgactatgtctatccgtccctcgaatccgacgaagataacccaattttcaagagccgatctaagaaacgcaaagggtctgacgatgcgccgtactctccgacagcccgggttgggccgtctgtccctcggcaggaccggccagtgcgtgaaggaactcgcgtagcctccatcgaaaccggcctagctgcagccgccgccaagctgtcccagcaggaggaacagaaatctaaaaagaagaaaagtgctaagaggaagcttactcccaacaccacctccccttcgacaagcacctcaatatccgcgggcacaacctccacaagcaccacaccggcctctactactcccgcttcaactactccggcctctacctccacagcatcttcgcaggcatcccaggagggcagttctccggagcccccccctgagtcgcattcctccagccttgcagatcacgaatataccgcagctggtaccttcaccggggcgcaggcaggcaggacctcccagcccatggcgcccggggtcttcctaacacagagacggccctccgccagcagcccaaataataatacagccgccaagggcaaaagaacaaagaagggcatggctaccgccaaacagcgactggggaagattctcaaaattcatagaaacgggaagctcctgttgtag

SEQ ID NO: 199104 - DNA, 2046 bp, synthetic construct
  misc_feature 1..2046: note = Description of Artificial Sequence: Synthetic coding sequence
  source 1..2046: mol_type = other DNA
atggagctgcagaccctgcaggaggccctgaaggtggagatccaggtgcaccagaaactggttgcccaaatgaagcaggaccctcagaatgcggaccttaagaagcaactgcatgagttacaggccaagattacagccctgagcgagaagcagaaacgcgttgtggaacagctaaggaagaaccttatcgttaaacaggaacagccagacaagtttcagattcaacccctacctcaatcagagaacaagctccagaccgcacagcagcagcctcttcagcagctgcagcagcagcagcagtaccaccaccatcacgcacagcagtcagcggccgcgtctcctaacctgactgcctctcagaagactgtgactaccgcttctatgatcaccacgaaaaccctgcccctggttctgaaagcggccacggccacgatgcccgcgtctgtcgtcggtcagcgcccaacaatcgccatggtcaccgcaattaacagtcagaaagcagtattgagtactgacgtgcagaacacccccgtgaacctgcagacctcttcaaaagtcaccggccccggcgccgaggctgttcagatcgttgcaaagaatacggtgacacttcaggtgcaggcgacaccgccacaaccaatcaaagttcctcagttcattccccctcctcgacttaccccccggccaaattttctgccccaagttcggcccaaaccggttgcacagaataatattccaattgcacccgctcccccccccatgctggccgccccgcaactcattcaaaggcctgtgatgctgaccaagtttactcccacaacgctgccgacctctcagaactcaatccaccccgtgcgggttgtgaatggccaaacagccacgattgccaagacgttccctatggcccagctcacctccatagttatagccaccccaggcactagactggccggcccacagacagttcagctctctaaacctagtctggagaagcagacagtgaagtcacatactgagactgacgagaagcaaactgaatctagaacaattacccctccggctgcgcccaaacccaaacgggaggaaaatcctcagaaactggcatttatggtgtctctcggtcttgtcactcatgaccacttggaggaaatccagtcaaagcgacaggagcggaaacgacgaacaaccgcgaacccagtgtattcaggtgccgtgtttgaacccgagaggaagaagagtgccgtgacttatctaaactctaccatgcacccaggaaccagaaagagaggtcgcccccctaaatacaacgctgttctgggattcggtgccctaacccccacctccccccagtccagtcacccagatagcccggagaacgaaaaaacagaaacaacctttacatttccagcccctgtgcaacctgtctcgctgccctccccaacgtcaacagacggcgatatccatgaggacttttgctccgtctgtagaaagagtggccaactcctgatgtgcgatacatgtagtcgggtgtaccacctcgactgcctggatccccctttaaagacgatccctaagggcatgtggatctgccccagatgccaagatcagatgctcaagaaagaggaggccattccatggccagggaccttagccattgtgcactcctacatcgcttacaaagctgctaaagaggaagaaaagcagaaactcctgaagtggagttctgatttgaaacaggaacgcgaacaattggagcagaaggtcaaacagctgtccaactctatcagcaaatgtatggaaatgaagaacactatcctggccagacagaaagagatgcactcttccttggagaaggtgaagcagctgatacggctaattcacgggatcgatctgagcaaacctgtggacagcgaagctactgtcggcgctatcagcaatgggcctgactgcaccccccctgctaacgccgcaacctctactcctgcaccctctccatcctctcaatcctgcacggccaattgcaaccagggagaggagaccaagtag

SEQ ID NO: 199105 - DNA, 1905 bp, synthetic construct
  misc_feature 1..1905: note = Description of Artificial Sequence: Synthetic coding sequence
  source 1..1905: mol_type = other DNA
atggagctgcagaccctgcaggaggccctgaaggtggagatccaggtccatcagaagctggttgctcaaatgaaacaggacccccagaatgccgacctgaagaagcagctgcatgaactccaagctaagattacggctctcagcgagaagcagaagcgagtggttgagcagcttcgtaaaaatcttatcgtcaagcaagaacagccggataagttccagatacaaccgctgcctcagtccgagaacaagctccaaacagctcagcagcaaccgttgcagcagctgcagcagcagcagcagtaccaccaccaccacgctcagcaaagcgcggccgcaagtcctaatctaaccgcaagtcagaagacggtcaccaccgcgtccatgatcaccaccaaaacattgcccttggtgttgaaggcggcaaccgccactatgccggcaagcgtggtggggcaaagacccactattgctatggttacggccatcaactcccagaaggccgtcctgagcaccgacgtacagaatacacctgtcaacctacagacatccagtaaagttacaggtccaggtgctgaggccgtgcagatcgtggcaaaaaacaccgtaacgctgcaggtacaggccactcccccccagcctataaaagtaccccagttcatcccccctcctagattaacaccaaggcccaatttcctcccccaggtgagaccgaagcccgtggcccagaacaatataccaatagcccctgcacccccacccatgttggccgctccacaattgattcagagacctgtgatgctcacaaagtttacaccaactaccctaccaacttctcagaatagcatccatcccgtgagagttgtaaacgggcagacagccacaatcgctaaaactttccccatggctcaactcacctccatcgtgattgcgacccccggaacccgcctggccggaccacagaccgtccaacttagcaagccttcccttgaaaaacaaactgtgaagagccacacagagacggatgagaagcagaccgagagccgtactattactccgcctgctgcacctaagccaaagcgggaagagaatccacagaaactagcctttatggtgtcattagggctggttacccacgaccatctggaagagattcagtctaagaggcaagaacggaagagacgaactacagctaatcccgtgtactctggtgctgtgtttgaaccagaacggaaaaaaagcgccgtgacgtaccttaactcaactatgcaccccggtacccgcaagagagcgaacgaggagcattggcctaagggggacatccatgaggatttttgtagcgtgtgtcgtaagagtggtcagttgctgatgtgcgatacctgttccagagtctatcatttggactgcctggatccccctctcaagaccatccccaagggcatgtggatctgccccaggtgtcaagaccagatgttaaagaaagaggaggccatcccctggccaggcacgctggcaattgtacactcctacattgcttacaaggctgccaaagaagaagaaaaacaaaagcttctgaagtggtccagcgacttgaagcaggagagggagcaactggagcagaaggtcaagcaactgtctaattcaatctccaaatgtatggagatgaagaacactattcttgcgagacaaaaagagatgcattccagtctcgaaaaggtcaagcaattgataaggttgatccatggaatagatctttccaaacctgtggattctgaggctaccgtcggcgccatcagcaatgggcccgactgcacccccccagctaatgccgcaactagcacacctgccccctccccatccagccagtcttgtaccgcgaactgcaaccagggagaggaaaccaaatag

SEQ ID NO: 199106 - DNA, 2043 bp, synthetic construct
  misc_feature 1..2043: note = Description of Artificial Sequence: Synthetic coding sequence
  source 1..2043: mol_type = other DNA
atggagctgcagaccctgcaggaggccctgaaggtggagatccaggtacaccagaagctagtggcacagatgaagcaggacccacagaacgccgatttgaagaagcagttgcacgaactccaggccaagattacagcgctcagtgagaagcagaaacgcgtcgttgaacaactgcggaaaaacctgatcgtgaagcaggagcagcccgacaaatttcagatccagccactacctcagtctgagaacaaactgcagacagcgcaacagcagcctctacagcagcttcagcaacagcagcagtatcaccatcaccacgcccagcaaagcgctgcagcgagcccaaatctgactgcaagccaaaaaacagtgacgacggcaagcatgataacgacgaagaccctcccattggtcctgaaggccgctaccgcaaccatgccagcttcagtggtgggacagcgaccaactatcgctatggtgaccgcaatcaacagtcaaaaggcggtgctgtctaccgacgtccagaatactccagtgaatctgcaaacctcaagcaaagttaccggacctggtgccgaggccgtgcaaatagtggcaaagaacactgtgactctggttcaggcaaccccccctcagcccattaaggtcccccagttcatcccccccccacggctaaccccaagacccaattttctgccccaagtccgcccgaagccggttgcacagaataacatccccatagctcccgcgcctcctccgatgcttgccgctccacaactgattcagcgccccgttatgttaacaaagttcacccctaccacgctccctacctcgcaaaattcaattcacccagtgcgcgtggtgaacgggcagacggctaccatcgcgaaaacttttccgatggctcaactgacctctattgtcatcgctactcctggtacaaggctagctggtcctcagactgtccagttgtctaagccttcacttgagaaacagactgtgaaatcccacacggagaccgatgagaaacaaacagagtcccgcaccataacaccccctgccgctcccaaacctaagagggaggagaacccccagaagctggcctttatggtgtctctagggctggtgacccatgatcacctggaggaaatccagtccaagcgccaggagagaaagaggcgaacaacagctaacccagtctactccggagctgtgttcgagcccgaacggaagaaatcagctgtcacctacctgaatagcacgatgcaccccgggacccgtaagaggggaagacctccaaagtacaatgcagtgctggggttcggggcactcacaccaacgtcgccacagtcctcgcacccagacagccccgagaatgaaaaaaccgagactacttttaccttccctgctccagtccagcccgtctctttgccatcacctacaagtaccgacggagatattcatgaggatttctgttccgtgtgcagaaaaagcgggcagctgctgatgtgtgatacgtgtagccgtgtataccatctggactgcctggaccctcctctaaagaccattcctaagggtatgtggatctgcccccggtgccaggatcagatgctgaagaaggaggaggctattccatggcccggaacactcgccattgtgcatagctacatcgcttacaaagcagccaaagaggaagaaaagcagaagctcctgaaatggtcttctgacttgaaacaggagcgcgaacagctcgaacagaaagtgaagcaactctcaaatagtatcagtaagtgtatggagatgaaaaacacgattttggcaagacagaaagagatgcacagcagcctcgagaaagtcaagcaactgatcagactgattcatgggattgatttaagcaagcctgttgactcagaagctacagtaggcgcaatcagcaatggaccagactgcacacctccggcaaatgcagccacgtccactccagcccctagcccatccagtcagagttgtaccgccaattgcaaccagggcgaagagacaaagtag

SEQ ID NO: 199107 - DNA, 81 bp, synthetic construct
  misc_feature 1..81: note = Description of Artificial Sequence: Synthetic coding sequence
  source 1..81: mol_type = other DNA
atggagctgcagaccctgcaggaggccctgaaggtggagatccaggtccaccagaaactcgtggctcagatgaaacagtag

SEQ ID NO: 199108 - DNA, 36 bp, synthetic construct; identical to SEQ ID NO: 92914
  misc_feature 1..36: note = Description of Artificial Sequence: Synthetic coding sequence
  source 1..36: mol_type = other DNA

SEQ ID NO: 199109 - DNA, 306 bp, synthetic construct
  misc_feature 1..306: note = Description of Artificial Sequence: Synthetic coding sequence
  source 1..306: mol_type = other DNA
atggagctgcagaccctgcaggaggccctgaaggtggagatccaggttcatcaaaagcttgttgcgcagatgaaacaggatccccagaatgccgacctcaaaaagcagctccatgagttacaggccaagattactgccttatctgaaaaacaaaaacgggttgtggagcagctgcgcaaaaacttgatcgtgaaacaagaacagcctgataagttccaaatccagccgctgccacagagcgaaaacaaactccagaccgcccagcaacagccacttcagcagctgcagcagcaacagcagtattag

SEQ ID NO: 199110 - DNA, 30 bp, synthetic construct; identical to SEQ ID NO: 92916
  misc_feature 1..30: note = Description of Artificial Sequence: Synthetic coding sequence
  source 1..30: mol_type = other DNA

SEQ ID NO: 199111 - DNA, 156 bp, synthetic construct
  misc_feature 1..156: note = Description of Artificial Sequence: Synthetic coding sequence
  source 1..156: mol_type = other DNA
atggagctgcagaccctgcaggaggccctgaaggtggagatccaggtccaccagaagcttgtggcccaaatgaagcaggacccacagaacgctgatctgaaaaagcaacttcatgagctgcaggcaaaaatcaccgctctgtctgaaaaacagtag

SEQ ID NO: 199112 - DNA, 477 bp, synthetic construct
  misc_feature 1..477: note = Description of Artificial Sequence: Synthetic coding sequence
  source 1..477: mol_type = other DNA
atgctggaggccatggccgagcccagccccgaggaccccccccccactctcaagccagaaacacagccccccgagaagcgcaggaggaccatcgaagactttaacaaattctgctcttttgttctggcctacgccggttacattccaccatccaaagaggaaagcgattggccagcatcaggttccagcagccctctgcgcggcgagtctgccgccgattccgatggctgggactctgcgccatcagacctgcggaccatacagacttttgtgaagaaggcaaagtcgagtaaaaggcgtgcggctcaagccggcccaacacagcctggtccccctcgaagtacctttagccgtcttcaagcgccagactccgcaaccctgctcgagaagatgaagctcaaggattccctgttcgacctcgacgggccaaaggtcgcatcgcctcttagccccccgtgcgccgccaacactccttag

SEQ ID NO: 199113 - DNA, 1212 bp, synthetic construct
  misc_feature 1..1212: note = Description of Artificial Sequence: Synthetic coding sequence
  source 1..1212: mol_type = other DNA
atgctggaggccatggccgagcccagccccgaggaccccccccccaccctgaaacccgagactcagccacccgaaaagcgccggcggacaatcgaggattttaataagttttgcagtttcgttcttgcatacgcaggatacattcctcctagcaaagaggagtccgactggcctgcaagcggcagctcctccccacttaggggggagtccgctgcggactctgatggctgggattcagcgccatctgacttaagaaccattcagacctttgttaagaaggcaaagtcatcaaagcggcgggccgcacaggccgggccaacacagcccggacccccccgttcgaccttttctcgcctccaggcaccggactctgcgacccttctggaaaagatgaagctgaaggactccttatttgatttggatggtccaaaggtggcctctcccctttctcctacgtcccttacccatacttcaagaccaccggcggcgctgaccccagtgcctctcagccagggagatctgagccacccccctcggaaaaaggaccgcaagaacaggaagctcggcccaggcgccggcgctggattcggcgtcctgaggagacctcgcccgacccctggtgatggcgagaagagaagtcgaattaagaagtccaaaaagcgtaaactcaagaaagccgaacgcggtgatagactgcccccacctggaccacctcaggcccctccatctgacacagacagcgaggaggaagaagaggaggaagaggaagaagaggaggaagagatggcgactgtggtgggcggcgaggccccagtgcctgtgctccctactcccccagaagcaccaaggccaccagccaccgtacatcccgagggtgtgcccccagccgactccgaaagcaaagaagtcgggagcacggagacgtctcaggatggggacgccagcagcagtgagggagagatgagggtgatggacgaagatatcatggtagagtccggggacgatagctgggatttaatcacctgctattgcagaaaaccttttgctggaagaccaatgatagagtgttctctgtgtgggacctggattcacctaagctgcgccaaaataaaaaaaactaacgtgcccgattttttctattgccagaagtgcaaggaactgcggcctgaggccagacgcctgggaggaccccctaaatccggggagccttag

SEQ ID NO: 199114 - DNA, 1200 bp, synthetic construct
  misc_feature 1..1200: note = Description of Artificial Sequence: Synthetic coding sequence
  source 1..1200: mol_type = other DNA
atgcccggcgactgccggcgggaccccccccccaccctgaagcccgagactcagcctcctgagaagcgccgcaggacaatcgaggattttaacaagttctgtagctttgtactggcgtacgccgggtacattccccccagcaaggaggagtccgactggcccgccagcgggagctcatcgcctctccgaggcgagagcgctgctgacagtgacggctgggatagcgccccctctgacctgagaaccattcaaacatttgtgaaaaaggctaagtcctccaagcgcagggctgcgcaggctgggcctactcagcctggacccccaagatctacctttagccggctccaagccccagactcggccacccttctcgagaaaatgaaactgaaggacagtttattcgatctggatggtcccaaagtggcaagtcccctgtcccccacgtcccttacacacaccagcagacctcctgcagcccttacacctgtccccctgagccagggtgacttatcccatccgccccggaaaaaagataggaagaatcgaaaactgggcccaggggccggcgctggctttggagtcctgaggcgacccaggcccaccccgggggatggcgagaagcgcagcagaatcaagaagtccaagaaacggaagttgaaaaaggcagagcgcggcgatagactgcccccacctgggccaccccaggccccgccttccgacacagattccgaggaggaggaggaagaggaggaagaggaggaggaagaggaaatggctacagtggtcgggggcgaggcccccgtgcctgtcctcccaacaccccccgaagctccaagaccccccgccacggttcaccccgagggcgtgcctcccgccgatagcgagtccaaagaggtaggcagcactgagacgtcacaggatggcgatgcgtcatcctcagagggggaaatgcgcgtgatggatgaagacatcatggtcgaatcaggggacgactcttgggatttgattacatgctactgccggaagccttttgcgggccggccaatgattgagtgcagtctgtgtgggacctggattcacctttcatgtgctaagattaagaagaccaacgtaccagacttcttttattgccagaaatgcaaggagctgcgaccagaagcccgcagactgggcggaccaccaaaatcgggagaaccttag

SEQ ID NO: 199115 - DNA, 6120 bp, synthetic construct
  misc_feature 1..6120: note = Description of Artificial Sequence: Synthetic coding sequence
  source 1..6120: mol_type = other DNA
atggacatcgtggacaccttcaaccacctgatccccaccgagcacttagacgatgcgcttttcctggggagtaatctggagaatgaggtttgtgaggactttagcgcttcacagaacgtactggaagactctctgaagaacatgctatcagacaaagaccctatgctggggagcgcatctaatcaattctgcttacccgtgttggatagcaatgatcctaatttccagatgccgtgctccaccgttgtgggcttagacgacataatggatgagggagtagttaaagaaagtgggaacgacacgatcgatgaggaagaactcattctccctaaccgcaatctgcgcgataaggtggaagagaacagcgtgcgttcacctcgcaaatcgcctagattgatggcgcaggagcaggtgcgcagtctgcgccagagcacaatcgctaagaggtctaatgccgctccactgtcaaataccaaaaaagcctctggaaagacggtgtctactgcaaaggccggcgtgaagcagccagaacgctcccaggttaaagaagaagtgtgtatgagtctgaagccggagtaccacaaggagaatcgccgatgttctagaaatagtgggcagatcgaggtcgttcctgaagtgtctgtcagctcctctcacagcagcgtgagttcttgcttagagatgaaggacgaggatggcctcgattcaaagcacaagtgtaacaatcccggcgaaatagatgtgcccagtcacgagctgaactgctccctgctgagcgaaacgtgtgtgacgattggcgagaagaaaaacgaggccctgatggaatgcaaagcgaagccagttggatcgccgctgttcaagtttagcgacaaagaggaacacgaacagaacgattcaatctccggcaaaacaggtgagactgtcgtggaggaaatgattgccacgcgaaaagtggagcaggatagcaaggaaacagtgaagctctctcatgaggacgaccacatactggaggatgcagggagctccgacataagctccgacgccgcctgcactaaccccaacaaaactgagaactcacttgttggccttccctcctgcgttgacgaggtgacggagtgcaatctggagctcaaagatacgatgggcattgcagataaaactgaaaatacccttgaaagaaataagatagaacctctcgggtactgtgaggacgccgagtccaatcgtcagttagagagtacggaattcaataaatcaaatctggaggtcgtggatactagcactttcggtcccgaaagcaacatcctggagaatgctatttgcgacgtgcccgatcagaatagtaagcagcttaatgctattgaatcaactaaaatagagagccacgagactgccaacctccaggatgaccggaattcccagtcaagtagcgtttcatacctagagagcaaatctgtcaagtccaaacataccaagcccgtcattcactccaaacaaaacatgacgaccgatgcccctaagaaaattgtggcggcgaagtacgaagttatccactctaaaacaaaggtaaatgtgaagtctgtcaagagaaatacggatgtgcccgaatcacagcagaattttcaccgtcctgtaaaagtccgcaagaaacaaatagacaaagagcctaagatccaatcctgtaattccggggtaaagagcgtgaaaaatcaggcccactccgtactgaagaaaaccctacaggatcaaactttggtacagatcttcaaaccactcacacacagcctgtcagataaatcgcatgcccatccaggttgcctgaaggaacctcatcaccccgctcagacaggacacgtgagccactcatctcagaagcagtgtcacaagccccagcaacaggcacctgccatgaagaccaacagtcatgtgaaggaagaactggaacacccgggagtagaacacttcaaggaggaagataagttgaagctgaaaaagcctgagaagaatcttcagccccggcaaagacgttcctccaagagtttttccctcgacgaacctccattgttcatccccgataatatcgcgacgatccgccgggaggggtctgatcattcgagctcatttgagtctaagtatatgtggacaccttcaaagcagtgcggattctgcaagaaaccacacggcaatagatttatggtggggtgtggcagatgtgacgactggttccacggtgactgtgtaggactgtcactgtctcaggcccagcaaatgggggaggaggacaaggagtatgtgtgcgtgaagtgctgcgccgaagaggacaagaagaccgagatactggatccagacactctggaaaatcaggccaccgttgaattccactccggtgataaaaccatggagtgtgaaaagctcggcttatccaaacatacaaccaacgaccggacaaagtacattgacgataccgtgaagcataaggtgaagattctcaaaagagagtccggcgaggggaggaactcgtccgactgtagagataacgaaattaagaaatggcagctggccccactgagaaagatgggccagccggtgctgccaagacggtccagtgaggaaaagtctgaaaaaattccaaaagagtcgacaaccgtcacctgtaccggtgagaaggcctcgaaacccggtactcatgagaagcaggagatgaaaaaaaaaaaagttgaaaaaggagtcctaaatgtccacccggccgctagcgccagtaaacccagcgctgaccaaatccggcagtctgtcaggcacagcttaaaggacattctgatgaaacggttgaccgactcgaatctaaaagtgccagaggagaaggctgccaaggtcgctaccaaaatagaaaaggagcttttctcttttttcagggatacagatgcaaaatacaaaaacaagtataggagtctcatgtttaacctgaaagatcccaagaataacatcctgtttaagaaggtactgaagggagaggtcactcccgaccaccttattagaatgtcaccggaggaactagcaagtaaggagctggctgcatggagaaggcgcgagaacagacatacaatagaaatgattgagaaggaacagcgcgaggtggaaagaaggcctatcactaagataacccacaagggagaaatcgaaatcgagtctgatgcgccaatgaaagagcaggaagccgctatggaaattcaggagcctgcggccaataaatccctggaaaagcccgaaggatccgagaaacagaaggaggaggtggattcgatgagtaaggacactacttcccaacaccggcagcatctctttgacctgaactgcaaaatttgcattgggcgcatggctcctccagtggacgatctgtcgcccaaaaaggtcaaggttgtggtgggagtcgccagaaaacactccgataacgaggctgaatctattgccgatgccctctccagtacatccaacatattagctagcgaattctttgaggaagaaaaacaagagagccctaagagcacgttctcgcccgctccccggcctgagatgcctggaactgtcgaagtggaaagcacatttctagcgagactgaacttcatctggaaaggtttcataaacatgccttccgtcgccaaatttgtcacaaaagcttacccggtctcaggtagccctgagtacctcacggaagacctccccgacagtatacaagtggggggacgcatctcacctcaaacagtctgggactatgttgaaaagattaaggctagcggcacaaaggaaatctgtgtagtccgattcacccctgtgactgaggaggatcagatcagttacaccctcctctttgcgtacttctctagccggaagcgctacggcgtggcagccaataacatgaagcaggtcaaggatatgtacctcattcctctgggggccacagacaagattccccaccccctagtgccattcgacggtcccggtttagaactgcacaggcccaacctgttgctgggcctgataattcgccagaagctgaagcggcaacatagcgcttgcgcctctacttcccacatcgccgaaacccctgagtccgctcctcccattgcccttccccccgacaagaaatccaagatcgaagttagtactgaagaagcccctgaagaagagaacgactttttcaactcctttacaaccgtgttgcacaagcaacgcaataagcctcaacagaatctgcaggaagatctcccaactgccgttgagcccctgatggaggtcacaaaacaggagccccccaaaccactcaggtttctgcctggagtacttatcgggtgggaaaatcagccaacgaccctcgagctggccaacaagccattgccagtcgacgatatcctacagtcactgctggggaccacagggcaagtgtacgaccaggcccagagcgttatggagcagaataccgttaaggagataccattcctgaacgagcagaccaactctaaaatcgaaaaaactgataatgtcgaagtaactgatggggagaataaagaaataaaagttaaagttgataatattagtgaatcaacagataagagtgctgagattgagacctcagttgtcgggtcgtcttctatttccgcaggctcactgaccagcctatccctgcgtggaaagcctcctgatgtgtcaacagaagcctttttaacgaacctgagcattcaaagtaaacaggaggagaccgtcgagagtaaagaaaagaccctgaagcggcagctgcaggaagatcaggagaacaatttgcaggacaaccaaacatcaaattcatctccatgtagaagcaatgtgggcaaaggcaacatagatggaaacgtgtcctgctccgaaaacttggtggccaacactgctaggtcaccccaatttatcaacctgaagcgtgatcctcggcaggccgctggcagaagtcagccagttactacttcagaatcaaaggacggcgactcctgtcggaatggagaaaaacacatgctgcccggcctcagtcataacaaggagcatctgaccgagcagattaacgtcgaggaaaagctgtgtagtgcggaaaaaaactcctgcgtccagcagtccgacaatctgaaggttgcccaaaacagtccgagcgtcgagaatatccagacctctcaggcggagcaagcaaagcccctgcaagaggacattcttatgcagaatatagagaccgttcatcctttccgcagagggtccgccgtggcaacctcccattttgaagtaggtaatacatgtccgagcgaatttccctctaagtccattacctttactagccgctctacctctcctaggacgtcaactaatttctcacccatgagaccccaacagcccaatctgcagcatcttaaatcctctccgcctggcttcccattccccggtccaccgaacttccctcctcaatcgatgtttgggttccctccacacctgccccccccactgctgcctccaccgggattcggcttcgcacaaaatccaatggtcccctggcctcctgtggtgcaccttccgggtcagccccaacgcatgatgggcccgctcagccaagcctctagatatatcgggccccaaaatttttatcaggttaaggatattcgcaggccagagagacggcattctgacccctggggcagacaggaccagcagcagctggatcgccctttcaacagggggaagggagaccggcagcgtttctattctgacagtcaccacctgaagcgggagagacacgagaaagaatgggagcaggaatccgaacgacacagaagacgcgacaggtcccaggataaagaccgggataggaaaagtagagaggaaggtcataaggataaggagagagctcgcctgtcgcatggcgatcgcggtaccgatgggaaggcttccagggactcacgcaacgttgacaaaaagcctgataagcctaaatccgaagattatgagaaggataaagagagagaaaaaagcaaacacagggagggggagaaagacagggatcgttaccacaaggatagggaccacacggatagaaccaaaagtaaacgatag

SEQ ID NO: 199116 - DNA, 6120 bp, synthetic construct
  misc_feature 1..6120: note = Description of Artificial Sequence: Synthetic coding sequence
  source 1..6120: mol_type = other DNA
atggacatcgtggacaccttcaaccacctgatccccaccgagcacctcgacgatgcccttttccttggtagtaatctggaaaacgaggtgtgtgaagatttctccgccagccagaacgttctggaggactccctgaaaaacatgctgagtgacaaggacccaatgctgggaagtgcttctaatcagttctgtctgcctgttctcgactccaacgaccctaatttccagatgccgtgcagtaccgtggtaggtctcgatgacatcatggatgaaggagtggtaaaagaatctggcaacgacaccattgatgaggaggaactaatcctgcccaatcgtaatctaagggacaaagtagaggaaaattcagtgcggtcaccgcggaagtccccgcggctgatggcacaagagcaagtgcggtctcttagacagtcaaccattgctaagaggtctaacgccgccccgcttagcaatacaaagaaggccagcggaaagacagtcagcacagctaaggctggggttaaacaaccagaaaggagccaagttaaagaggaggtgtgcatgagccttaagccagagtatcacaaggagaatcgtaggtgctcccgcaactcaggtcaaattgaagtggtccccgaggtttcagtgtcttcatctcacagctccgtgtcgtcatgtctggagatgaaagacgaagacggactagactctaagcacaaatgtaataatccgggtgagatcgacgttcccagtcatgagctgaactgttccttgctctctgagacatgtgtgactataggcgagaagaaaaacgaggctcttatggagtgtaaggcaaagcctgtcggatccccactttttaaattttctgacaaagaggagcatgagcagaacgacagcatttctggcaaaactggggaaaccgtggtggaggaaatgattgcgacaaggaaggtggagcaagattccaaggagacagtaaaacttagccacgaggacgaccacatactggaggacgccggctctagcgatattagttctgacgcagcctgtacaaatcctaataagacggaaaattcgcttgtgggactgccctcttgcgttgacgaggtgaccgaatgcaatttggaactgaaggacacaatgggcatcgcagataagactgagaataccctagaacgcaataagattgaaccactggggtattgtgaggacgctgagtctaatagacaacttgagtcaacggaatttaataagtccaatctggaggtggttgatacgtcgacttttggtccagagagtaatattctggaaaatgccatttgtgatgtccctgatcaaaatagcaaacagctgaacgcgatcgagtctaccaagatagagagccacgagaccgcaaacttacaggatgatcgcaatagccaaagttcaagcgtgtcatacctggaatctaagtccgtgaaatccaagcacacaaaaccagtcatccactccaagcagaacatgacaactgacgcccccaagaaaatcgtcgccgccaagtacgaggtgatacatagcaaaaccaaggttaatgtgaagtcagtcaagcgtaataccgacgtgcccgaatctcagcagaacttccataggccagtcaaagtccgtaagaagcagatagataaggaaccgaagatccaaagttgtaattctggcgttaagagcgttaagaaccaggcacattccgtcctcaagaaaacactgcaggaccagacgctggtgcagatcttcaagccccttacccattccttgtccgacaaaagtcacgctcaccccggatgcctgaaggaacctcatcaccccgcccaaacaggtcatgtgagtcacagcagtcagaaacagtgtcacaagccccagcagcaggcccctgctatgaagaccaatagtcatgtcaaggaggagctcgaacatcccggcgtggagcactttaaggaggaggataagctgaagctgaagaagccagagaaaaacctgcaaccgaggcagagaagatctagtaagagcttcagcctcgacgaaccgcccttgtttatacctgataacattgcaacaatcagaagagagggctctgaccatagctcttcctttgaatctaaatatatgtggacgccctcgaaacagtgcggattttgcaaaaagcctcatggaaacagattcatggtagggtgtgggaggtgtgacgactggtttcatggggattgcgtcggcctctctctgtcccaggcccagcagatgggtgaggaggacaaggagtacgtgtgcgtcaaatgttgtgcagaggaggacaagaagactgagatcctggaccccgatactttagagaaccaggcaaccgtggagttccattccggagataagacgatggagtgcgaaaagttggggttatccaaacacacaacgaacgatagaactaaatacatagacgacacagtgaaacacaaggtgaaaatccttaaacgagagtcgggggaggggcgtaactcaagcgattgtcgggacaacgagattaagaagtggcaactggcccccctccgaaagatgggtcagcctgtgctgcctaggaggagctccgaggagaagagcgaaaagatccccaaagagagcaccacagtcacttgcacaggcgagaaagcctcaaaaccaggaacccatgagaaacaggagatgaagaaaaagaaggtcgaaaagggtgttctgaacgttcacccagcggcctccgcctccaagccatcagccgatcagatacggcaaagcgtcaggcattccttaaaggatattctcatgaaaaggctcacggacagtaaccttaaagtacctgaggaaaaagcggccaaagtggcaactaagattgagaaggagctattttctttttttagagacaccgacgctaagtacaaaaacaaataccggtcgcttatgttcaatctgaaggaccctaagaataatattctgtttaagaaggttctgaaaggggaggtcacccccgaccacttgattcgaatgtcgccagaagagcttgccagcaaggagctcgcggcgtggaggaggagggaaaacagacacacaattgagatgatcgagaaggagcagcgggaggtcgagaggcgccccatcactaagatcacccacaagggcgaaatagagatcgagagcgatgccccaatgaaagagcaggaagcagccatggagattcaggaacctgcagcaaacaagtcactggaaaaacctgagggctccgaaaagcagaaggaagaagtggacagtatgagcaaggatacaactagccagcacaggcagcacttatttgacctgaactgtaaaatctgcatcggtagaatggcgcctccagtggacgacctctcacctaagaaagtcaaagtggttgtgggggtcgcgaggaagcatagcgacaacgaagccgaaagcattgctgatgctctgagttctacctccaacatacttgcctccgagttttttgaggaggaaaagcaggaatcacctaagtctaccttttctcctgctccccgacccgagatgcccgggacagtcgaagttgaatcaactttcctcgctaggctcaatttcatatggaagggctttattaacatgccctctgttgccaagtttgtcacaaaagcatatccagtgagcggaagccctgagtaccttactgaggacctacccgatagtatccaggtcggaggaaggatctcgcctcagaccgtttgggattatgttgagaaaatcaaagcctccggtacaaaggaaatttgcgtggtacgcttcactccagtcacagaagaagaccaaatctcatacacattgctgttcgcttacttttcgtctcggaaacgctacggagttgccgcaaacaacatgaaacaggtgaaagacatgtatttgatacctctgggcgccacagacaagatcccacatccactggtgccatttgacggtccaggactggagcttcaccgccctaatctgctcctcggattgatcatcagacagaagttgaagaggcagcacagcgcctgcgccagtacctctcacatcgcagaaacccctgagtccgccccacccatcgctctgccccctgataaaaagtctaagatagaagtgtcaacagaggaagcccccgaggaagagaacgatttctttaactccttcaccacggtgctgcataaacagcgcaacaaaccccagcagaacctacaggaagacctgcctacggcagtggaacccttgatggaggttacaaaacaggaacctccgaagcctcttagatttctgcccggggtgcttatcgggtgggaaaatcagccaacaacgctggagctcgccaacaagcctctgcctgtggatgatatcttgcagagcctgcttggcacaacgggccaggtgtacgatcaagctcaatccgttatggagcaaaacacagtaaaagagataccattccttaatgagcagaccaacagcaaaatcgaaaaaacggataacgtggaggtcactgacggtgaaaataaggaaatcaaagtaaaagtcgacaatattagtgagtccactgataagtcagccgagatagagacctccgtcgtcggatcttcttccatcagcgccgggagtctgacgtctctgtctctccgcggcaaacctcctgacgtgagcacggaagcattccttactaacctctctatccagtcaaagcaagaagaaaccgtcgagagcaaagaaaagacattaaagaggcagctccaagaggatcaagagaacaatctccaggataatcagacctccaattcttctccatgcaggtccaatgtgggcaagggcaacatcgatgggaacgtctcctgttcagaaaatctggtggccaacactgcccgctcccctcagtttattaaccttaagcgtgacccacggcaggcggcaggaagaagtcagcctgttaccacgagcgagagcaaagacggcgacagctgtcgcaatggagaaaagcacatgctgcccgggctgagccataataaggagcacttgacagagcagatcaacgtggaagagaagctgtgcagtgccgagaaaaatagctgcgtgcagcagtccgataatctgaaggtagcacaaaattcacctagcgtcgaaaatattcaaacctctcaggctgaacaagctaagccactgcaggaggatattcttatgcagaatattgagaccgttcacccctttaggcggggcagtgcggtggcgacaagccattttgaagtgggaaatacctgcccatccgaattccctagcaagtccatcacttttacgtcaagaagtacatccccccggaccagcacaaacttttcccctatgcggccccaacagccgaacctccaacatctcaaaagctctcctcccggttttccctttccgggtcccccaaacttcccaccgcagagcatgttcggtttcccaccccacctaccgccgcccttactgcccccccccggattcggtttcgcccaaaatcccatggtcccgtggccacccgtggtccacctgccaggccagccacagcgcatgatggggcctctatctcaagcctcacgttacatcggtccgcagaacttttatcaggtgaaagacatccggcgccctgaaagaagacatagcgacccttggggccggcaggatcagcagcaactcgacagaccttttaataggggcaaaggagaccggcagaggttctattccgactctcaccacctgaaacgtgagcgtcacgaaaaagagtgggagcaggagtccgagcggcacaggcggcgggataggtcacaggataaggatcgggaccgtaagagtcgggaagagggccacaaggacaaagaacgagccagactgtctcacggggaccggggcactgacgggaaagcatctcgcgacagccggaatgtcgacaaaaagcccgataaacctaaatcggaagattatgagaaagacaaggaacgagagaagagcaaacatcgagagggcgagaaggatagagatcggtatcacaaggacagggatcacacggatcgaaccaagagtaagaggtag

SEQ ID NO: 199117 - DNA, 1098 bp, synthetic construct
  misc_feature 1..1098: note = Description of Artificial Sequence: Synthetic coding sequence
  source 1..1098: mol_type = other DNA
atgagcagcagcgtggagcagaagaagggccccacccggcagcggaaatgcgggttttgtaagagcaaccgcgacaaagaatgtggacagctcttgatttccgaaaaccaaaaggtggccgcacaccacaagtgcatgctcttcagttctgcgcttgtgagcagccacagtgataacgagtccctggggggattcagcattgaggatgtgcagaaagagatcaagcgaggaacaaaattgatgtgctccttgtgccactgcccgggcgctaccataggctgtgatgtcaagacatgtcatagaacttatcattaccattgcgccctgcatgataaagcccaaattagggagaaacctagccagggcatatatatggtctactgcagaaagcacaagaaaacagctcacaactccgaagctgaccttgaggagtcgttcaacgagcatgaattggagccttctagtccgaagtctaagaagaaatcacgcaagggaaggcctcggaaaaccaacttcaagggattgagtgaagacactcggtcaacatcatcacacggtactgatgagatggagtcctcttcttaccgagaccgaagcccacaccggtcctccccttccgacaccagacccaaatgcgggttttgtcatgtaggagaagaggaaaacgaagcgaggggcaaacttcacatcttcaacgcaaaaaaggctgctgctcactacaagtgtatgcttttcagcagtggaactgtgcagctgactaccacctcaagggccgagttcggcgatttcgatatcaagaccgtactgcaggagataaaaagaggaaaacggatgaagtgtactctctgtagccaaccaggcgcaactataggttgtgaaatcaaagcatgcgtaaaaacctatcattaccactgtggagttcaggacaaggctaaatatatcgagaatatgtctagaggaatttataagctgtactgcaagaatcactctgggaatgatgaaagagatgaagaggacgaagagagggaaagtaagtctcgcggtaaggttgagattgaccagcaacagctgacccaacagcagctgaacggaaattag

SEQ ID NO: 199118 - DNA, 975 bp, synthetic construct
  misc_feature 1..975: note = Description of Artificial Sequence: Synthetic coding sequence
  source 1..975: mol_type = other DNA
atgagcagcagcgtggagcagaagaagggccccacccggcagcggaaatgcgggttctgtaagtcaaatcgcgataaggagtgcggccagctcctcatttccgagaaccagaaggtagcagctcaccacaaatgcatgctatttagcagcgctctggtctcctcccacagcgataacgagagcctcgggggcttttctattgaggacgttcagaaagagattaagagaggcacaaaactgatgtgctcactgtgccactgcccaggggccaccatcgggtgcgatgtgaagacatgtcaccgaacctaccattatcactgtgcccttcacgataaagctcagatcagagagaaaccttcacagggcatctacatggtgtattgccgcaagcacaaaaagacggcccacaattctgaggctgcggacctcgaggagtcttttaacgagcacgaattggagcctagttccccaaaatccaagaagaagtctagaaagggtagaccgaggaagacaaattttaaaggactgtccgaagatactagaagcacgtcatcacacggtactgacgaaatggaatctagctcttacagagaccgcagtcctcaccgctcgagccctagcgatacgcggcccaaatgcggattctgccatgtgggtgaagaggagaatgaggcgcgggggaaactccacatcttcaacgccaagaaggccgctgcccattacaagtgcatgctgttctcttctggcacggtgcagttgactactacaagcagagctgagttcggggacttcgatattaaaaccgttctgcaggagattaaacgcgggaagcgcatgaaatgtacactctgttcacaaccaggcgcaacaattggctgcgagattaaggcctgcgtaaaaacttaccactaccattgcggtgtgcaggacaaggccaagtacattgagaacatgtcccgcggtatctataagtag

SEQ ID NO: 199119 - DNA, 939 bp, synthetic construct
  misc_feature 1..939: note = Description of Artificial Sequence: Synthetic coding sequence
  source 1..939: mol_type = other DNA
atgagcagcagcgtggagcagaagaagggccccacccggcagcggaagtgtggcttttgtaagagcaatagggacaaggagtgcggccagctgctgattagcgaaaatcagaaagtagctgcacatcataaatgcatgctgttctcgtcggccctggtatcttcgcacagcgacaatgaatctctgggcggcttctcaatcgaagacgtgcagaaggagattaagaggggtacgaagctaatgtgctcattgtgccactgtccgggggccaccatcggctgtgatgtgaaaacctgtcatcgaacctatcattaccattgcgctctccatgataaggcccaaatccgtgaaaagccgtcgcagggaatctacatggtatactgtcggaaacacaagaagactgctcacaattccgaagccgccgacttagaagaatcgttcaatgagcacgagctggaaccctcctcgccaaaatccaagaaaaaatcccgaaaaggtcggccacgaaaaactaattttaagggccttagtgaggatactagaagcacatcatcacacggcaccgacgagatggagtcctcctcctaccgggaccgttcaccgcacagaagtagcccatccgacaccaggcccaagtgcggcttttgtcacgtcggcgaagaagagaacgaggcaaggggtaagttacacattttcaatgcgaaaaaggcggctgctcactataagtgcatgctgttttcatcgggcactgtacagttgaccacgactagtcgtgccgaatttggagacttcgacataaaaacagtgctgcaggagatcaaaagaggcaaaaggatggtttgctcattctacatctgttatgccacgctgcaccttatctgctgttttaagttccgtgtacacccaaagttcattcaaagctctgagaacctgaagtag

SEQ ID NO: 199120 - DNA, 1098 bp, synthetic construct
  misc_feature 1..1098: note = Description of Artificial Sequence: Synthetic coding sequence
  source 1..1098: mol_type = other DNA
atgagcagcagcgtggagcagaagaagggccccacccggcagcggaagtgcggcttttgcaagagtaacagagacaaggaatgtggccagctcctcatttctgaaaatcagaaggtggctgcccaccacaagtgcatgctttttagctctgccctggtctcatcccacagcgataacgagtctttgggcggcttcagtattgaagacgttcagaaagaaatcaaaaggggaaccaagctaatgtgttcattgtgccactgtcccggggctactatcgggtgtgatgtgaaaacctgtcataggacgtaccactatcactgcgcactgcatgataaggcccagatacgtgaaaaaccaagccaaggaatctacatggtatattgccgaaagcataagaaaaccgcacataactccgaggcggatctggaggaaagcttcaatgaacacgaactggagcccagttcacccaaatcaaaaaaaaagagccgcaagggaagaccaagaaagaccaatttcaaaggtctaagcgaggatacccgatctacctctagccatgggaccgacgaaatggaatcatcttcgtatcgagacaggtctccccatcgatcctccccttccgatacaaggcctaagtgtgggttctgccatgtgggagaagaggagaacgaggctcggggaaaacttcatatatttaacgccaagaaggccgcggcccactataagtgtatgctcttttcctccggcacagtgcaactgaccacgactagtcgcgcagagttcggagactttgacatcaaaacagtacttcaggaaattaagcgcggaaagaggatgaagtgcactctttgtagccagcccggagcaacaataggatgcgaaataaaagcctgcgtgaagacctaccactatcactgtggtgtccaagacaaagctaaatacattgagaatatgtctcgaggcatttataagctatactgtaaaaatcactccggtaatgacgagcgcgacgaggaggacgaggagcgcgaatctaagagccgcggaaaagtggagattgatcaacagcaactcactcaacaacagctgaacgggaattag

SEQ ID NO: 199121 - DNA, 1101 bp, synthetic construct
  misc_feature 1..1101: note = Description of Artificial Sequence: Synthetic coding sequence
  source 1..1101: mol_type = other DNA
atgagcagcagcgtggagcagaagaagggccccacccggcagcggaagtgcggattctgtaaaagtaacagggacaaggaatgcgggcagttattgattagcgagaatcagaaagtggcggctcatcacaaatgcatgctctttagttcggccctagtttctagccactcagacaacgagtccctgggaggcttctcaatcgaggacgtgcagaaagagatcaagcggggcacgaaactaatgtgtagtctgtgtcactgtcctggagcaacgatcgggtgcgacgttaaaacctgtcaccgtacgtatcactaccattgcgctcttcatgacaaagctcaaatccgggaaaaaccctcccaagggatttacatggtgtactgcagaaagcacaagaagaccgcccacaatagtgaagcagcggatcttgaagagagcttcaacgaacatgaacttgagcctagtagccccaagtccaagaagaaaagcagaaaaggcaggcccaggaagaccaatttcaaaggcctttcagaagacactcggtcgacaagtagtcatgggacagatgaaatggaaagttcttcatacagagaccgctccccgcaccgaagctcaccctctgacacacggcccaagtgcgggttctgccacgttggagaagaggaaaacgaagctaggggaaagctgcacatctttaacgccaagaaggccgccgcacactataagtgcatgctgttttcatccgggactgttcagttaactactactagtcgagccgaatttggcgactttgatatcaaaaccgtgctgcaagagatcaagcgcggaaaacgcatgaaatgcaccttgtgttcccagccaggcgccacaataggatgtgagatcaaggcttgtgtgaaaacgtaccactaccattgtggcgttcaggataaagctaagtacatcgaaaatatgagcagagggatctataagctgtactgcaagaatcacagtggaaacgatgaaagagacgaagaggacgaagagcgggagtctaagagccgcggtaaggttgaaatcgaccagcagcagttgacccagcaacaactgaacggaaattag

SEQ ID NO: 199122 - DNA, 996 bp, synthetic construct
  misc_feature 1..996: note = Description of Artificial Sequence: Synthetic coding sequence
  source 1..996: mol_type = other DNA
atgagcagcagcgtggagcagaagaagggccccacccggcagcggaagtgcggattctgtaaatcgaatcgcgataaggaatgtggtcagctgttaatctctgagaatcagaaggtggccgcccatcataaatgcatgatgtgctcactgtgccactgccctggcgccacaattggctgtgacgtcaagacttgccacagaacatatcattatcattgcgcccttcacgacaaggcacagatccgagagaagccttcacaagggatatacatggtgtactgccgaaagcacaagaagactgctcataatagcgaggccgacctcgaggaatcatttaacgaacatgagttggagccttcctccccaaagagcaagaaaaagtccaggaaggggcgtcctcggaagacgaactttaagggtctgtcagaggacacacgaagcacttctagtcacggaacagacgaaatggaatcctcctcttacagggatcggtctcctcatagaagttccccatcagatacccgacccaagtgcggtttctgtcacgtgggcgaggaggaaaatgaggctcggggaaaactgcacatctttaacgcgaaaaaagccgctgctcattacaagtgtatgctgtttagctctgggacggtgcagctgaccacaacctcccgcgccgagtttggggattttgatatcaagactgtgctccaggagattaagcggggtaagcgcatgaaatgcacactctgttcacagccaggggcgacgattgggtgtgagatcaaagcctgcgttaagacctaccactatcattgtggggtgcaggacaaagccaaatatattgagaacatgtcacgcgggatctataagctgtattgcaagaaccattccgggaatgacgaacgcgacgaggaagatgaggaacgcgagtcaaaaagtcgcggaaaagttgagatcgaccagcagcagttaacccaacaacagctgaacggaaactag

SEQ ID NO: 199123 - DNA, 3075 bp, synthetic construct
  misc_feature 1..3075: note = Description of Artificial Sequence: Synthetic coding sequence
  source 1..3075: mol_type = other DNA
atggccagcgtgcccgtgtactgcctgtgccggctgccctacgacgtgacccgtttcatgatcgagtgtgacatgtgtcaggactggtttcacggctcatgcgtgggggtggaggaggagaaggctgcggacattgatctctaccattgtccaaactgcgaagtgctacacggtccatctatcatgaaaaagaggcgaggttcttcaaagggacacgatacccataagggcaagcccgttaaaacgggctctcctaccttcgtgcgggagctccgcagtagaactttcgactccagcgacgaggttattctgaaacccaccggaaaccaactgacagttgaattcctggaagaaaattccttttcagtccccattctggtactgaaaaaggacggcctcggcatgactcttccgtcccctagtttcacggttcgcgatgtcgagcactatgtggggagcgacaaggaaattgacgtgatcgatgtcacacgccaggcagattgcaaaatgaagctgggcgactttgtcaagtattattattctggcaaaagggagaaagtgctcaacgttatttccctggaattcagcgatactcggctgtcaaacctcgtggagactcccaagattgtccgcaagctctcctgggttgaaaacttgtggcccgaggagtgtgtgttcgaaaggccgaatgtgcaaaaatattgcttgatgagtgtgcgtgactcctataccgacttccacattgacttcggcggtaccagcgtgtggtatcatgtgctgaaaggcgagaagatcttttacctgattcgcccaaccaacgcgaatttgacattgttcgagtgctggtctagttcatcaaaccagaacgagatgttcttcggggaccaagtggataaatgttataaatgctctgttaaacaggggcagactctttttatccctacagggtggatacacgctgtactgaccccggtggactgtctggccttcggtggaaattttcttcactctctgaatatagaaatgcagctaaaggcatacgaaatcgagaagagactatccacagccgacctgtttaggtttccaaatttcgaaactatatgctggtacgttgggaagcacatactggacatctttcgaggtctcagggaaaaccggcgccatccagccagttacctggtccatggggggaaggccctgaatttggcttttagagcatggacccgaaaggaggctcttcccgaccacgaagacgagatccctgagacagtgaggacagttcagttgatcaaagatctcgcaagggagatccgcctggttgaagatattttccagcaaaatgtcgggaagacaagcaacatattcggattacagaggatcttcccagcaggtagcatccccttgactcggccggcacattctacttctgtttcaatgtctcggctgtcactgccaagcaaaaacgggtccaagaagaaggggttaaaaccgaaggaattattcaaaaaggcagagcgaaagggcaaagaaagcagcgccctgggacctgccggacagctgtcttacaatctgatggatacatactcccatcaggcactgaaaactggatcgtttcagaaagctaagttcaatatcacaggtgcctgccttaacgactctgatgatgactccccagacctggatctggatgggaacgagagccctctggctttgttaatgtctaacggtagcaccaagcgggtcaaatcactatcaaagagtaggagaaccaaaattgccaagaaagtggacaaagcaagactcatggccgagcaagtgatggaggacgagtttgacctggattctgacgatgagttgcagatagacgagagactcggtaaggaaaaggccaccctgattattcgtccaaaattccccaggaagctcccccgggcaaagccttgcagcgacccaaacagagttagagaacccggagaagttgagttcgatattgaggaggattacaccactgatgaagatatggtcgaaggggtggagggaaagctcggtaacggtagtggtgcaggtgggatcctggacctccttaaagcttcaagacaggttggtggtcctgactacgccgccctcacagaggcaccggcgagcccttcaacacaagaggctatccagggcatgctgtgtatggccaacctgcagagcagtagttcctcccctgctacctccagcctgcaggcttggtggactggaggacaagatcgcagctccggaagctcctcgagtggtctcgggactgtcagcaatagcccggcctcccagcggaccccgggtaagcgacccatcaagaggccagcatattggagaaccgaatcagaggaggaggaggagaatgcatcactggatgagcaagattcacttggcgcgtgcttcaaggacgctgagtacatctaccccagcctagaatcagatgatgacgaccctgctctgaagtcccgtcccaaaaaaaagaagaactccgacgatgcaccatggtccccaaaagcacgtgtgacacccacccttcccaaacaggatagacctgtgagagaggggacccgcgttgcgtctattgagaccggactggcagcagcagcggccaagcttgcccagcaggagttgcaaaaagcccaaaagaagaaatacataaaaaagaagcccctcctgaaggaggtggaacaaccacggcctcaggactcgaatttatctttaacagtgccagctcccacagtagccgccactccacagctcgtgacaagcagcagtccattgccccctccggagcctaaacaggaggcactgagtggctccctggctgatcacgagtacaccgcacgccccaacgcgtttggtatggcccaagccaaccgaagcacaactccaatggcacctggagtttttctgacacaacgtaggccgtctgttggatcgcagagcaatcaagcgggacaggggaagaggcccaagaaaggcttagccacagctaagcagaggctgggtcgtattctgaaaattcaccggaacggcaagcttctattatag

SEQ ID NO: 199124 - DNA, 2847 bp, synthetic construct
  misc_feature 1..2847: note = Description of Artificial Sequence: Synthetic coding sequence
  source 1..2847: mol_type = other DNA
atggccagcgtgcccgtgtactgcctgtgccggctgccctacgacgtgacacgcttcatgatcgaatgtgacatgtgtcaggactggtttcacggcagctgtgtgggtgtggaagaggaaaaggccgccgacatcgatttgtatcactgccctaactgtgaagtactacacgggccatcaattatgaagaagcgccgaggatcctccaaggggcatgacactcacaaggggaaacctgtgaaaacaggcagccccaccttcgtgagagaactgaggagccgcacttttgatagtagtgatgaggtgatccttaaaccaacggggaaccagctgaccgtggaatttcttgaggagaacagcttttctgtgcctattctggtgttgaaaaaagatggcctgggaatgaccctgcctagccctagtttcacagtaagagacgtcgagcattacgtcggctcagataaggaaatcgacgtgattgatgtcacacgacaggctgattgcaaaatgaaactcggcgattttgtcaaatactactacagtggcaagagagagaaggtgctgaacgttatttccctcgaatttagcgacactcggctgtccaacctggttgaaacccctaaaatcgtcagaaagctttcgtgggtggaaaacctgtggcccgaagagtgtgtatttgaacggcccaatgtgcaaaagtactgcctgatgtccgtgagggactcctatactgatttccatattgacttcggcggtactagtgtctggtaccacgtgctcaagggtgagaagatcttttatcttattcggcccaccaacgcaaacctgaccctgttcgaatgctggagcagcagttcaaatcagaatgagatgttctttggggaccaggtcgacaagtgctataaatgttccgttaagcagggtcagaccctcttcatccccaccgggtggattcatgcagtgttgacaccggtggactgcctcgcatttggagggaatttcttacactctctaaacatcgagatgcaactgaaggcctatgagatagaaaagcggcttagcacagccgacctcttccgcttcccaaacttcgagaccatttgttggtacgtagggaaacacattcttgacatcttcaggggtttgcgcgaaaatcggcgtcaccctgcatcctacctggtgcatgggggaaaagccttgaacctcgcctttagagcttggactaggaaagaagcactcccagaccatgaagatgagatacccgagacggttcggacagtgcagttgattaaggacctcgctagagaaatcaggcttgtcgagttcaacataacaggagcctgcctgaacgattccgacgacgactcccccgacctcgacttagacggcaatgaatcaccactggctctcctgatgtctaatggttccacgaagagggtgaaaagtctcagcaagtcacggcggactaagatcgccaaaaaagttgacaaggcacggctgatggcggagcaagtcatggaagacgagttcgacctggattctgacgacgagcttcagatcgacgagagactcggtaaggaaaaggccactctgatcatacgccccaagttcccgagaaagctgcctcgcgccaaaccatgttcggacccgaaccgcgtgagggaaccaggggaggttgagtttgacatcgaggaagattatacaacggacgaagacatggttgagggcgttgaggggaagttggggaacgggagtggcgccggtgggatcctagatcttctaaaggcctccagacaagttgggggccccgactatgccgcacttacagaggctcccgcttcacctagtactcaagaagctatccagggcatgctttgtatggccaacctacagagctcatcctctagtccagccacaagctcccttcaagcctggtggacaggggggcaggaccgttcctcgggttccagctcctcggggctaggcacagtttcgaacagccctgcaagtcagcggacccctgggaaacgccctattaagaggcccgcatactggagaacagagagtgaagaggaggaagaaaatgcaagtttggatgagcaagactccctgggtgcctgttttaaagacgcagagtatatatacccaagtctggaatctgatgacgacgacccagctcttaagagccggccgaaaaagaagaaaaacagcgacgacgctccttggtccccgaaagcccgcgttacccccactttacccaagcaggaccggcctgtgcgggaaggtacccgtgtcgctagcatcgagactggtctggctgctgccgctgctaagttggctcaacaggagctgcaaaaggcccagaaaaagaagtacattaagaaaaaaccgctgttgaaggaggtggagcagcctagaccacaggactctaacctgtcgcttacagttccggctcctacagtggccgcaacccctcagctggtcacatcatcttccccccttccccctcccgaaccaaagcaggaagccctttctggcagcctcgctgatcacgaatataccgcccggcctaatgcatttggtatggcccaggccaaccggagcacaaccccaatggcccctggcgtcttcctgacccaacggcgccccagtgtgggctctcaaagcaaccaggcgggccaggggaagcggcccaagaaagggctggcaaccgccaagcagcgtctgggtcggatcttgaaaatccatcgaaacgggaaactcctcctgagacaagttatcgtgcaggccgagtgtcgccaggctatccacgaacccaagctgaagaggagggacgctcacccctag

SEQ ID NO: 199125 - DNA, 3183 bp, synthetic construct
  misc_feature 1..3183: note = Description of Artificial Sequence: Synthetic coding sequence
  source 1..3183: mol_type = other DNA
atgaaccggagccgggccatcgtgcagcggggccgggtgctgccccccccagcgcctctggacactactaatctggcaggacggcgtaccctccagggacgcgccaagatggcttcagtgcccgtttactgtctgtgtcgcctaccatacgacgttacgaggttcatgatcgagtgtgacatgtgccaggattggttccatgggtcctgtgttggcgtggaggaggaaaaggccgcagacatcgacttatatcattgtcccaattgtgaggtactgcacggcccttcgattatgaagaagagaagaggttccagcaaaggacatgatactcacaagggtaagcctgtcaaaaccggctcccccacatttgtgcgcgaactgaggagccggacctttgatagtagtgatgaggtcatcctcaaacctaccggcaaccagctgaccgtcgagtttctagaagagaattcatttagcgtgcccattctggttctcaagaaagatgggctgggcatgacattgccctcgcccagttttaccgtgcgagacgttgaacactatgtcgggagcgacaaagaaattgatgtgattgatgttacccgtcaggcggactgtaagatgaagctgggtgattttgtcaaatattattactctgggaagagagagaaggtcctgaacgtgatctcacttgagttctcagatacccgattatccaacctggtcgagactcccaagatcgtgagaaaactgagttgggtggagaacctgtggccagaggaatgcgtgttcgagaggccaaatgtgcagaagtattgcctcatgagtgtccgggactcttataccgacttccatattgatttcggaggtacgtccgtgtggtaccacgtgcttaagggggagaaaatattctatctgatccgccccactaacgccaatctcaccctcttcgagtgttggtccagttctagcaaccagaatgaaatgttcttcggagatcaggtggacaaatgttacaagtgtagtgtgaagcagggacaaacgctctttatcccaacaggctggattcatgcagtgctaaccccagtcgactgccttgcatttggaggcaacttcctccactctctgaatatcgagatgcagctgaaagcctacgagatcgagaagcgcctttctacagcagatctgttccgcttcccaaacttcgagaccatctgctggtacgtgggcaagcatatcctcgacatcttccgcggcctcagggagaacaggcggcaccccgcctcctatttagtccatggggggaaagcccttaacctggcctttagagcatggacgcgaaaggaggcactccccgatcacgaagacgagataccggaaacagtgcgaaccgtccaattgatcaaagacttggcgcgggaaattagactcgtcgaggacatttttcagcagaacgtggggaaaacctccaatatcttcggcttgcaaaggattttcccagcaggaagcatcccgttgacacgacccgcgcattccacctccgtgtctatgtccagactctccctgcccagtaaaaacggctccaagaaaaagggcctgaaacccaaggagctgttcaagaaagcagagagaaaagggaaggagtcttccgccctcggcccagccggccagctaagctataatctgatggacacctatagtcaccaggctttaaaaacaggctcctttcaaaaggcgaagtttaatataaccggagcttgccttaatgattccgacgatgattctcccgacctcgatctggatgggaacgagagcccgctggcactgctcatgtccaatggtagtaccaaacgggtgaaatctctcagcaaatccaggaggacaaagatcgctaaaaaggtggacaaagcaaggctgatggcagagcaagtgatggaagacgagtttgacctcgattcggatgacgaactccagattgacgagcgtcttggtaaggagaaggccaccctgatcatccggccgaagttcccacgcaaactgcctagagcaaagccgtgcagtgatcctaaccgcgtccgcgagccaggcgaggtagagttcgatatcgaggaggattatactaccgatgaagacatggtagaaggcgtagagggaaaactcggtaacggctccggggcaggcggaatcctggaccttttaaaagcatctcgccaggtgggcggccctgactatgcagccttaacggaagctccagctagcccctccacacaggaagctatccaggggatgttgtgtatggcaaatttgcagagctcatcaagcagccccgccacatcgagcctgcaggcctggtggaccgggggccaggatagatcctcaggttcttcgtcgtcagggctgggaacagttagcaatagccccgcaagccaacggacaccaggcaaaaggccaatcaaacggcctgcctattggcggaccgaaagtgaggaagaagaggagaacgcttctttggacgagcaggacagtctgggcgcctgtttcaaagatgccgagtacatttatccgtctctggagagtgatgacgatgatcctgccctgaagtctaggcccaaaaagaagaaaaatagtgatgacgctccttggagtcccaaggcccgcgttacccccactcttcctaagcaggacagacctgttcgagagggcactagagttgcttccatcgagactggcctcgcagctgctgccgctaaattagcacagcaagaattgcagaaggctcagaaaaagaaatatattaagaagaagcccctcctaaaggaggtggaacaacctcgtccccaagactcaaacctcagcctcacagtaccggctcctactgtggccgccacaccgcaattggtgactagcagcagcccgctcccgccaccagaacctaagcaggaggcattatccggctccctcgctgatcatgagtataccgcaaggcccaatgcgttcggcatggcccaagccaaccgatccaccacacccatggctccaggagtgttcttgacccagagacggccatctgtgggctcccagtcgaaccaggccgggcagggcaagaggccaaaaaaaggcctggcaacagcaaagcaacggctcggccggatactcaagatacacagaaacggaaagctgctgctgtag

SEQ ID NO: 199126 - DNA, 912 bp, synthetic construct
  misc_feature 1..912: note = Description of Artificial Sequence: Synthetic coding sequence
  source 1..912: mol_type = other DNA
atggacacctacagccaccaggccctgaagaccggcagcttccagaaggccaagttcaatatcactggcgcatgtctgaatgactctgacgatgattctcccgatttggatttagatggaaatgagtctcctcttgcgctgctaatgtcgaacggctctacaaaacgtgtgaagtctctgagtaagagccgacgaacaaagatcgcaaagaaagttgataaagcccgcttaatggctgagcaagttatggaagatgaattcgatttggattcagacgatgagctacagattgatgaacggcttggcaaagagaaagctaccctcatcattaggcccaagttcccacggaagttgccgcgggcttcactggctctgaccccaaccgagttcgtgaaccaggagaaactcagtctgacattgcggcgaactattcagcagatgaggacttggtggaaagggctgaaagcaagcctggggatggtggtggccctggtcgcttttctgatctgttcccgacctgctgggagatggggtgatctgacaatgctcccttctcctaggccccagctgttgcccgctctaagacgaccaagccgtgcttgctgcgcttggcccacttgttctccacacaggccacaccgactgcctctcgcatgtcggccaggcgggttaggagaccggatcgaagccgttggcgccccagccgtggggtgggcacagtgtctgaccgtgctgcttccctccgcaccacaggggtcgggcccttcatccggccagcacacaggagaaccacgcgcccgcaggcgccgaagaactcccgtgtggatgaataggacagcttgggaaagggcgagccgaatgcagtctatctctatcttacactggtcactgatgatgatgacgctcctgtag

SEQ ID NO: 199127 - DNA, 2862 bp, synthetic construct
  misc_feature 1..2862: note = Description of Artificial Sequence: Synthetic coding sequence
  source 1..2862: mol_type = other DNA
atcgtgcagcggggccgggtgctgcccccccccgcccccctggacaccacaaacctggccggccgtcgcactttacaagggagagctaagatggcaagtgttcccgtctattgtctttgcaggttaccctatgatgtgaccagatttatgatagagtgtgatatgtgtcaggactggtttcatggttcctgtgtgggagttgaagaggagaaggccgccgatatagacctgtatcattgcccaaattgcgaggtgctacacggtccttccataatgaaaaagagaaggggtagttctaagggccatgatacgcacaagggtaagccagtcaagactggcagccctactttcgtgagggagcttcgcagtaggaccttcgatagttcagacgaagtaatcctgaaacctactgggaatcaactgactgtggagtttctcgaggaaaatagtttttcggtgccgatcctggtgttaaagaaagatggactgggtatgacactgcccagtcccagcttcacagtgagggacgtggagcactatgtgggaagcgataaggagattgatgtaatagatgtgactagacaggcagattgcaagatgaaactaggcgacttcgtcaagtactattatagcggtaagcgagaaaaagttctgaacgtcatctcccttgaattttccgatactcgtctgtcaaacttggtagaaactcctaagatagtgaggaaactatcttgggtcgaaaatctctggccggaagaatgtgtgtttgagcgccctaacgttcagaagtactgtttgatgagcgtgcgggactcatataccgacttccatattgactttggcggtacttctgtttggtatcacgtgctgaaaggggagaagattttttatttaatccggccgacaaatgccaatcttacccttttcgagtgctggagctcctccagtaatcagaacgagatgttcttcggcgatcaagtcgataagtgctataagtgttccgtgaagcagggtcaaaccctgtttatccctacagggtggatccatgccgtactaactcctgttgactgtctcgctttcgggggcaactttctccattccctgaacatcgagatgcaactgaaggcctacgaaattgagaagcgtctgtcaacagccgacctttttaggttcccgaacttcgaaacaatctgctggtacgtgggcaagcatatactggacatctttcgcggcctgagagagaatcggagacatcccgcttcctatctggtccacgggggaaaggcactgaatctggcatttcgcgcgtggacacggaaggaagccttgcccgatcacgaagatgagatacctgagaccgtgaggacagtgcagctgatcaaggacttagcacgcgaaattcgactagtcgagtttaacattacaggcgcttgccttaacgactctgacgatgattccccggatctggatctagatggcaatgaaagccctctggccctgctaatgagtaacggatccaccaagcgcgtaaagtccctgtcgaagtccaggcggaccaaaatcgccaaaaaggtcgacaaagcaaggcttatggctgaacaagtgatggaagatgaattcgatcttgacagtgacgacgagctgcagattgatgaacggctgggcaaagaaaaggcaactttgataattcggccgaagtttcctcggaagctcccaagggcaaagccttgctctgaccctaatagagtccgggaaccgggcgaggtggaattcgacatcgaggaggattataccaccgacgaggacatggttgagggagttgagggcaaacttggaaatggcagcggggccggcggtatcctcgatctgttaaaagctagcagacaggtaggcggcccagactatgccgctctaaccgaggccccggccagcccgagcactcaagaggcaattcagggtatgctatgcatggccaacctgcagtcttcatcttcttcccctgccaccagtagcctgcaggcttggtggaccggggggcaggatagatctagcggatcgtcctcaagtggtttgggaactgtgagcaatagccctgcttctcagagaacccctggcaagcggcccatcaagcgtccagcttactggcgtacagaaagtgaggaagaagaggaaaacgcgagcctcgacgagcaggacagtctcggcgcatgttttaaggatgctgaatacatatatccgtctttggaatctgacgatgatgaccccgcacttaagagcaggcccaagaaaaagaagaatagcgatgacgcgccatggtcgcctaaggcacgggtgacacccaccctccctaaacaggatcgacctgtgcgcgaaggtactagggtggcgtctattgagaccggcctcgctgccgctgccgccaagctggcccagcaggaactgcaaaaggcccagaaaaagaaatacatcaagaagaaacctcttctgaaagaagtggaacagccccgaccacaggactctaacctgagcctgacggttcccgccccgaccgtcgctgccacgcctcaattggtgacaagttcctctccgcttcctcccccggagcctaaacaggaagctctttcagggtctttagccgatcacgagtacaccgcccgcccgaacgcttttggaatggcacaggctaatcggagcacaacaccaatggccccaggagtattcctgacgcagaggagaccctcagtcggatcacagagcaaccaggcagggcagggaaaaagacctaaaaaaggcttagcgaccgccaagcagcgcctgggacgcatcttgaagatccatagaaatgggaagctcctcctgtag

SEQ ID NO: 199128 - DNA, 345 bp, synthetic construct
  misc_feature 1..345: note = Description of Artificial Sequence: Synthetic coding sequence
  source 1..345: mol_type = other DNA
atggccagcgtgcccgtgtactgcctgtgccggctgccctacgacgtgactaggttcatgatcgagtgcgatatgtgccaggactggtttcacgggtcatgtgttggggtggaggaagagaaggcagccgacatcgatctgtaccactgccccaactgcgaggtgctgcacggccccagcattatgaagaagcggaggggatcttccaagggccacgacacgcataaagggaaaccggtgaagactggctctccgacctttgttagggagctgcgcagtcggacctttgactcctccgatgaggttatcctcaagcccaccggtaatcaactgacagtggagtag

SEQ ID NO: 199129 - DNA, 381 bp, synthetic construct
  misc_feature 1..381: note = Description of Artificial Sequence: Synthetic coding sequence
  source 1..381: mol_type = other DNA
atggccagcgtgcccgtgtactgcctgtgccggctgccctacgacgtgactcgttttatgatagagtgcgatatgtgtcaggactggttccatggctcttgtgtcggtgtcgaagaggaaaaggctgcagacattgacttataccattgcccaaactgcgaagtgctgcacggtccgagtattatgaagaaacggcgaggaagcagtaagggtcacgatacgcataaaggaaagccggttaaaaccggttcaccaacattcgtgcgagagctcaggagccggacattcgattccagtgatgaagtgattttgaaaccgactggcaaccaacttaccgtagaattcctggaagaaaattccttctccgtgcctatattatag

SEQ ID NO: 199130 - DNA, 294 bp, synthetic construct
  misc_feature 1..294: note = Description of Artificial Sequence: Synthetic coding sequence
  source 1..294: mol_type = other DNA
atggccagcgtgcccgtgtactgcctgtgccggctgccctacgacgtgactcggttcatgattgagtgcgacatgtgtcaggactggttccatgggagctgcgttggcgtagaggaggagaaagccgcggatattgatttgtatcactgtcctaactgcgaggtgttgcacggcccgtccataatgaaaaagagacgaggttcctctaaaggacatgatactcacaaggggaagcctgtaaaaaccggcagccccactttcgtcagggagttgcgtagcagaacttttgattag

SEQ ID NO: 199131 - DNA, 348 bp, synthetic construct
  misc_feature 1..348: note = Description of Artificial Sequence: Synthetic coding sequence
  source 1..348: mol_type = other DNA
atggccagcgtgcccgtgtactgcctgtgccggctgccctacgacgtcactcgttttatgatcgaatgtgatatgtgtcaagactggtttcatgggtcttgcgtgggcgtggaagaagaaaaggcggcagacattgatctgtaccactgccccaattgtgaagtgctgcatggtccgtccatcatgaaaaagcggcgcggaagcagcaagggacatgatacacacaaaggtaagcccgtgaaaaccggttcacccaccttcgtaagggaactgcggtcacgtacttttgactctagcgatgaagtgattctgaagcccaccgggaatcagcttacggtcgagttttag

SEQ ID NO: 199132 - DNA, 294 bp, synthetic construct
  misc_feature 1..294: note = Description of Artificial Sequence: Synthetic coding sequence
  source 1..294: mol_type = other DNA
atggccagcgtgcccgtgtactgcctgtgccggctgccctacgacgttacacgtttcatgattgagtgtgatatgtgtcaggactggtttcatggctcgtgcgttggagtagaagaggagaaagcagcagacattgatctgtatcattgcccaaactgcgaggttttacatggacctagtattatgaaaaagaggagagggtcctccaagggccatgacactcataagggcaagccggtgaagactggctcccctaccttcgtgagagagctcagaagccggaccttcgactag

SEQ ID NO: 199133 - DNA, 447 bp, synthetic construct
  misc_feature 1..447: note = Description of Artificial Sequence: Synthetic coding sequence
  source 1..447: mol_type = other DNA
atgaaccggagccgggccatcgtgcagcggggccgggtgctgcccccgcccgccccccttgacactacaaatctggcaggccggagaactctgcagggccgcgccaagatggccagcgtccccgtttattgtctctgtcggctgccttatgatgtcaccaggttcatgatcgagtgcgatatgtgccaggactggttccacggatcctgtgtcggggtggaggaagagaaggccgctgacatcgatttatatcattgccctaattgcgaagtgctgcacggccctagcatcatgaagaaacggagaggatcttctaagggacacgatactcacaagggtaaaccagtcaaaacgggctccccaacctttgtgagggaactccggagcaggacctttgatagcagtgatgaagtcatcctgaaacctactgggaaccagctgacttag

SEQ ID NO: 199134 - DNA, 2637 bp, synthetic construct
  misc_feature 1..2637: note = Description of Artificial Sequence: Synthetic coding sequence
  source 1..2637: mol_type = other DNA
atggccagcgtgcccgtgtactgcctgtgccggctgccctacgacgtcacacgcttcatgattgagtgcgacatgtgtcaagattggttccatgggagctgtgtgggagtggaggaggaaaaggccgccgacatcgacctatatcactgcccaaactgcgaggtgcttcacggaccttcgataatgaagaaaaggcgaggtagtagcaagggccatgatacacataaagggaaaccggtcaagaccggatccccaactttcgttcgggagctgaggtcaagaacgttcgattccagcgacgaagtgatcctcaaacctaccgggaaccaactgactgtagagttcctcgaagagaatagcttcagcgtccccatcctggtcctgaagaaggatgggctgggcatgacacttcccagcccatcttttactgtccgggatgtagaacattacgtagggtcagacaaagagattgacgtgatcgacgtcacacgccaggccgactgcaagatgaagctcggggactttgtgaaatactactattccgggaaacgtgaaaaagtgttaaatgttatctctctggagttttccgacacccgattgtcaaacctagtggaaaccccgaagatcgtcaggaagttgagctgggttgaaaacctgtggccagaagagtgcgtctttgagaggcccaatgttcagaagtactgcttgatgtctgttcgcgacagctataccgattttcatattgactttgggggcactagcgtatggtaccacgttctaaagggggagaaaatcttctacttgatacggccaacaaacgccaacttaaccctgttcgagtgctggtcgagctcttcgaaccaaaatgagatgtttttcggtgaccaggtagacaagtgttataagtgctctgtcaagcagggccaaactctatttatacctacgggttggatccatgccgtgctaactccagtagactgtctagcttttggtggcaacttcctgcatagccttaacattgaaatgcagctcaaagcttacgaaatcgaaaaaaggctgagcacggccgatctgtttcgttttccaaattttgagacaatttgttggtacgtgggcaaacacattcttgatatcttccggggcctccgtgagaaccgccggcatcccgctagctatctagtgcacggtggaaaagctcttaatctggcattcagagcctggacacggaaagaggccttgcccgatcacgaagacgagataccggagacagtgaggaccgttcagttaatcaaggaccttgcgagggaaattcggctggtcgaggacatattccaacaaaacgtgggtaaaaccagcaatatcttcggtctgcagcgtatctttccagctggctcaattcctctcacccggccagcacattccacatccgtctctatgtccagactcagtctcccatcaaagaacggaagcaaaaagaaaggtctgaagcccaaagagctctttaaaaaagccgagcgaaaaggaaaagaatccagtgcgctgggaccggccgggcagctcagttacaatcttatggatacttacagccatcaggcgcttaaaacagggagcttccagaaggccaaatttaatataacaggtgcatgtcttaacgactccgatgatgacagccccgatctggacttagacggaaatgaaagccccttagcactactcatgagcaatggctcaacgaaaagagtcaagagtttgtccaagtccaggcgtacaaagatcgccaaaaaggtagataaagctagactgatggctgagcaggtgatggaggatgaatttgacctggattccgatgacgaactacagattgatgagagactgggtaaagagaaggcaactctcataatccgacccaaattccccagaaagctcccgagggccaagccctgtagtgatccgaatcgagtgagggaaccgggcgaggtggaatttgacattgaggaggattatacgacagatgaggatatggtggagggcgttgaagggtaccagacagctacccccgcaccagcacaaggggcctctgaggcgccagcctctccaagcactcaggaagctatccaggggatgctttgtatggccaacctgcagtcttcttcatcttctcccgcgactagctccctgcaagcctggtggactggaggtcaagaccggtcttcaggaagttcttcatccgggctcggcaccgtgagcaacagccctgcctcccagcgaactcccggcaagaggccaatcaagcgccctgcctactggaggaccgagtccgaggaagaggaggagaacgcctcgctggatgagcaggatagcctgggcgcctgcttcaaggatgcggagtacatttaccccagtttggaaagcgacgacgatgacccagcactaaaaagtaggcctaagaagaaaaaaaactctgacgatgctccctggtcccctaaggctcgagtaacgcctacgctgccaaagcaagatcgacctgtgagagaaggtacgcgagtggccagcatcgaaaccggcctcgcggcggccgccgccaaactcgctcagcaagtgaaaaagatgaaactctcactgaccgattccggctag

SEQ ID NO: 199135 - DNA, 417 bp, synthetic construct
  misc_feature 1..417: note = Description of Artificial Sequence: Synthetic coding sequence
  source 1..417: mol_type = other DNA
atgaagctgcccatcttcatcgccgacgccttcaccgcccgggccttcaggggcaacccagccgcagtctgcctcctcgagaacgagctggacgaggacatgcaccagaagatcgctcgggaaatgaatttgtccgaaacagctttcatccgcaagctccatcctaccgataatttcgcccaaaaaaacatgaactctacacttaccttcgtgactctcagtggtgaattgagggctaggcgcgcagaggacggtatcgttctggacctgcccttgtaccctgcccacccacaggatttccatgaggtggaagacctcattaagaccgccattgggaacacattggtgcaagatatctgctacagcccggatacccagaaattgctcgttcgcctttctgacgtctacaacagatag

SEQ ID NO: 199136 - DNA, 867 bp, synthetic construct
  misc_feature 1..867: note = Description of Artificial Sequence: Synthetic coding sequence
  source 1..867: mol_type = other DNA
atgaagctgcccatcttcatcgccgacgccttcaccgcccgggcctttcggggaaatcccgccgctgtgtgtttgttggagaacgagctggatgaagacatgcaccagaagattgctagggagatgaacctgagcgagaccgcctttatccgcaagcttcaccccaccgataactttgcccagagcagctgctttgggcttcgctggtttacacccgcaagtgaggtaccgttatgtgggcatgccaccctagcctccgccgcagtcttgtttcacaagatcaaaaatatgaactccacactgacctttgtgacgctgtcaggggaactgagggctcgccgcgctgaggatgggatcgtgctggatcttcccctgtatcctgctcacccacaagattttcatgaagtggaagacttgattaagactgccattgggaatacgttggtgcaggacatctgctattcccccgatacacagaaactccttgtccgcctttccgacgtgtacaaccgatcgttcttggagaacttgaaagttaacacagaaaatcttttacaggttgagaatacagggaaggtgaagggcttgattttgacattaaagggggagcctggggggcagacacaagcttttgacttctactcacggtatttcgctccttgggtcggggtcgctgaggatcccgtaacagggagcgcccacgccgtgttaagcagctactggagccagcatttgggcaaaaaagaaatgcacgcatttcagtgcagccacaggggcggcgaattaggtatcagcctgcgacccgatggtcgagtcgacattagagggggagccgcagtcgtccttgaagggacactgactgcttag

SEQ ID NO: 199137 - DNA, 768 bp, synthetic construct
  misc_feature 1..768: note = Description of Artificial Sequence: Synthetic coding sequence
  source 1..768: mol_type = other DNA
atgcaccagaagatcgcccgggagatgaacctgagcgagaccgcctttattcggaagctgcatccgactgataactttgcgcaatcatcttgcttcggcctcagatggttcacacccgcctcagaggtgccactctgtgggcatgcaaccctcgcaagcgcagccgttctcttccataaaattaagaatatgaactcaactcttacattcgtaactttgtctggcgagctgcgagccaggcgtgccgaggatggtattgtgcttgacctgccgctttaccccgcccatccgcaggattttcatgaagtcgaggatttaataaagaccgccattgggaatactctggtacaggacatatgctattcccctgacacacagaagctcctggtgaggctgtctgacgtgtataaccgatccttcctggagaacctgaaggttaacacagagaacctgctccaggtcgagaacaccggcaaggtcaaggggctgatcctcactctgaagggagagcccgggggacagacccaggctttcgatttttactcccgatattttgccccctgggttggagtagcagaggaccccgttactgggagtgctcacgctgtcttatcctcctattggagccaacacttgggcaagaaagaaatgcatgctttccaatgctcccaccggggtggggagctaggcattagcctgcgccccgacggacgcgttgatattcgagggggggccgctgtcgtcttggagggcactctgaccgcctag

SEQ ID NO: 199138 - DNA, 867 bp, synthetic construct
  misc_feature 1..867: note = Description of Artificial Sequence: Synthetic coding sequence
  source 1..867: mol_type = other DNA
atgaagctgcccatcttcatcgccgacgccttcaccgcccgggcctttcgggggaatcccgcggcagtgtgtctgcttgaaaatgagttagatgaggatatgcatcagaagattgcaagggaaatgaaccttagcgagacagctttcatccgcaaactgcatccgactgacaattttgcacagtcatcctgctttggtctgcggtggtttacccctgcctccgaggtgcctctctgtgggcatgcaaccctcgcctccgcggccgttctcttccacaagataaaaaacatgaactcgactctaacatttgtcacattatcaggcgaattgcgcgcacgccgagccgaagacggcatcgtgcttgatctgcctttgtacccggcccatccgcaagatttccacgaggttgaggatttaattaaaaccgctattggcaatacactggtgcaggacatctgctattccccagacactcaaaaactactggtgcgcctgtccgacgtttacaaccggtcctttctggagaacctcaaggtgaatacggaaaatttactgcaggtggagaataccggcaaggttaagggtctgattctcacactcaaaggggagccaggaggccaaacccaggcctttgatttttactctcgctacttcgctccctgggtgggggtcgccgaggaccctgtgacgggcagcgcgcacgcggtcctctcttcatattggtctcagcaccttgggaagaaggagatgcatgcattccagtgcagccaccgtgggggggaactgggcatatcactgcggccagatggccgggtggacatcagaggtggagccgccgttgtgcttgagggtacgttaaccgcatag

SEQ ID NO: 199139 - DNA, 843 bp, synthetic construct
  misc_feature 1..843: note = Description of Artificial Sequence: Synthetic coding sequence
  source 1..843: mol_type = other DNA
atgaagctgcccatcttcatcgccgacgccttcaccgcccgggcctttcgggggaatcctgcagctgtctgcctgctggagaacgagctggatgaggacatgcaccagaagatagcaagagaaatgaatttatcggagacggccttcattagaaagcttcatccgacggacaatttcgcccagtcttcttgtttcggactgcggtggttcacccccgcctccgaagtgcccctgtgtggacacgctacgctagcttctgccgcagtgcttttccacaagatcaagaacatgaacagtacactaacttttgtcacactgagtggagaactccgcgcaaggcgggccgaggatgggattgtgctcgacttgcctctgtatcctgcccacccgcaggattttcacgaagttgaagatctaattaagaccgctattggcaataccctagttcaggacatctgctactcccctgacactcaaaaactgctcgtcaggttgagtgacgtttataatcgcagtttcctggaaaacctcaaagtcaacactgaaaatctgctgcaggtggaaaatactggaaaagttaagggcttaattctcacactgaaaggagaacctgggggtcagactcaggcatttgatttctactcaagatactttgctccctgggtgggggtggctgaggatcccgtcactggttctgcgcatgctgtccttagcagctactggtctcagcacctgggcaaaaaagaaatgcatggaaggacagctctttaccagtttctgttctatttgcccaattctaagctggtgtttctgctaatatgtaccattcctctcaagatgtag

SEQ ID NO: 199140 - DNA, 1356 bp, synthetic construct
  misc_feature 1..1356: note = Description of Artificial Sequence: Synthetic coding sequence
  source 1..1356: mol_type = other DNA
atggtgggcagcgccctgcggcggggcgcccacgcctacgtgtacctcgtgagcaaggcttcccacatctcgcgcggtcaccagcatcaagcttggggctccaggccccccgcagccgagtgcgctacccagcgcgcccctggctccgtggtcgaacttcttggcaagagctatccacaagatgatcactccaacctgactcgaaaagtattaacccgcgtaggccgcaatctgcataaccagcagcaccacccattgtggctgattaaagagcgcgtaaaggagcacttttataagcagtacgtgggtcggttcggcactcccctctttagcgtgtatgataatctctctccagttgtaactacctggcagaatttcgactctttactgattccggccgaccatcccagcaggaaaaaaggggacaattactatttgaataggacacacatgctgagggcgcacacttccgcacatcagtgggacctcctgcacgccggcttggacgctttcctggtcgtcggggatgtatatcggcgggatcagatagatagccagcattatccgatttttcatcagctggaggcggtcagattatttagtaagcatgagctgttcgctggcattaaggatggtgaatccctgcagttgttcgagcagtctagcagaagcgctcacaagcaggaaacacacaccatggaagctgtaaaactggtcgaattcgacctgaagcagacgctgacccgcctgatggcacatttatttggcgacgagctcgagataagatgggtggattgttatttcccatttactcatccatcatttgagatggaaatcaattttcacggagagtggctggaggtcttgggatgtggcgtcatggagcagcagctggttaactctgctggggcccaggaccgtattgggtgggcgtttggtctcgggcttgaacgcttagcgatgattttgtacgatattcccgacataaggctcttttggtgcgaagatgaaagattcttaaagcagttctgtgtcagcaatatcaaccagaaggtgaagtttcaacctttatcgaaataccctgcagtaattaatgatatcagcttttggctcccaagcgaaaactatgccgagaacgacttttatgatctggtgagaactattggcggagatttagtcgaaaaagtggacctaatcgacaaatttgtccacccaaaaacccacaagacctcccactgttaccgcatcacctatagacacatggagagaaccctgtctcaaagggaagtgaggcatatccaccaggctcttcaggaggccgccgtgcagttgcttggagtggaagggagattttag

SEQ ID NO: 199141 - DNA, 1356 bp, synthetic construct
  misc_feature 1..1356: note = Description of Artificial Sequence: Synthetic coding sequence
  source 1..1356: mol_type = other DNA
atggtgggcagcgccctgcggcggggcgcccacgcctacgtgtacctggtgagcaaagccagtcacatatctcggggccaccaacaccaagcctggggaagcaggccgcctgccgctgagtgcgcaactcaacgggcgcccggaagtgtagtcgaactactcggcaaatcatatccccaagatgatcactctaatctgactcggaaggtgctgacaagagtagggcggaacctccacaatcagcaacaccatcccttatggttgattaaggaaagggtcaaagaacacttttacaaacagtatgttgggcggttcggcacacctctttttagcgtgtatgacaacctctccccagtcgttaccacatggcagaattttgactctctcttgataccggccgatcacccttctcggaagaagggagacaactactatcttaataggacgcacatgctgagggcgcacacgtctgcgcatcagtgggatctgttgcacgccggcctggacgcgtttctcgtggtgggagatgtctaccgaagggatcaaattgactctcagcactacccaattttccaccagctggaagcggtgcggcttttttctaagcacgagcttttcgctggaataaaagacggggagtccctgcagctgttcgagcagagttctaggagtgctcataagcaggagacccacaccatggaggcagtaaaattagtagagtttgacttgaagcagaccctcactaggcttatggcccatctgtttggggacgaactggaaatcaggtgggtagattgttatttcccctttacgcatccctctttcgaaatggagatcaattttcacggcgagtggctggaggtcctcggctgcggagtgatggagcagcaactagtgaatagtgcgggggctcaagataggatcggatgggccttcgggttaggactggagcggctggctatgattctgtacgatatcccagatatcagactgttttggtgtgaagatgagcggttccttaaacaattctgcgtttcgaatattaatcaaaaagtgaaatttcagccattgtctaaatatccagctgtgatcaacgacatctccttctggttaccctccgagaactatgctgaaaacgacttttatgacttggtgagaaccataggaggggatctcgtggagaaggtggacctcatcgataaattcgtgcatcctaagacccataaaactagccactgctaccgcatcacctataggcatatggagcgcacattgtctcagcgggaagttagacacatccaccaagctctgcaggaggcagcagtccagttgctgggcgtggagggacgtttctag

SEQ ID NO: 199142 - DNA, 468 bp, synthetic construct
  misc_feature 1..468: note = Description of Artificial Sequence: Synthetic coding sequence
  source 1..468: mol_type = other DNA
atgctgcgggcccacaccagcgcccaccagtgggacctgctgcacgccggactcgacgctttcctcgtggtcggcgatgtgtaccgacgggatcagattgactcacagcactaccccatcttccaccagctcgaagccgtgaggttgttttccaaacacgagctgtttgccgggatcaaagacggcgagtcactacagctgtttgagcagtcatcccgctcggcccataagcaagaaacacacactatggaagcagtgaagctggtggaatttgatctgaaacagactcttacgcgcctgatggctcacctatttggggacgaactggagattcgctgggtggattgttatttcccctttacccacccgagttttgagatggagatcaatttccatggggagtggctggaagtcctgggatgcggagtcatggagcaacagctcgttaattctggaggggctacttag

SEQ ID NO: 199143 - DNA, 306 bp, synthetic construct
  misc_feature 1..306: note = Description of Artificial Sequence: Synthetic coding sequence
  source 1..306: mol_type = other DNA
ctgttcgccggcatcaaggacggcgagagcctgcagctgttcgagcagtcttcgagatctgcacataaacaagaaactcatacaatggaggcagtcaaactggttgagttcgacctgaagcaaaccctgactagactgatggcccacctgttcggtgacgagctggagatccggtgggtggattgttactttcccttcacacatcccagtttcgaaatggagatcaacttccacggagagtggttggaggtcctgggttgcggcgtcatggaacagcagctcgtaaatagcggaggagccacgtag

SEQ ID NO: 199144 - DNA, 849 bp, synthetic construct
  misc_feature 1..849: note = Description of Artificial Sequence: Synthetic coding sequence
  source 1..849: mol_type = other DNA
atgagcggcgccgaccggagccccaacgccggcgccgcccccgacagcgctcctggccaggccgctgtcgccagcgcttaccagagattcgagcccagagcctacctcaggaacaactacgcgccccctagaggcgacctgtgcaaccccaatggcgtgggcccatggaagctgcgttgtctggcccagaccttcgctaccggagaagtctctgggcgcacgctcatcgacatcggtagcgggcctaccgtctatcagctgctgagcgcatgctcgcatttcgaggacattaccatgaccgacttccttgaggtcaatcgccaggaactcggccggtggctgcaagaagaaccaggggcctttaactggtccatgtacagccaacacgcctgcttgatcgaagggaagggcgagtgctggcaggacaaggaacgccagctgcgagcgcgtgtcaaaagagtgctgccgatagatgtgcatcaaccacagccattaggggcaggctcaccagctccactgcccgcagacgcattggtatctgcattctgcttggaggctgttagccccgacctcgcttcctttcagcgggcactcgatcacattactacgctgttgcgcccaggaggtcatcttctccttattggtgccctggaggagagctggtatctggctggcgaggcacggctaacagttgtgccagtgagcgaagaagaagtccgagaggcgctggtcaggagtggatacaaagtgcgcgaccttcgcacctacataatgcctgctcatcttcaaactggagttgacgacgtgaagggggtttttttcgcctgggctcagaaagttggtctgtag

SEQ ID NO: 199145 - DNA, 555 bp, synthetic construct
  misc_feature 1..555: note = Description of Artificial Sequence: Synthetic coding sequence
  source 1..555: mol_type = other DNA
atgaccgacttcctggaggtgaaccggcaggagctgggccggtggctgcaggaagaacctggcgcattcaactggtctatgtattcccaacacgcctgcctgatagagggaaagggtgaatgctggcaggacaaggagcggcagctgagggcccgagtcaaaagggtgctgcctatcgatgttcaccagcctcaacccctgggcgcgggctcaccagctcctctccccgcagatgccctggtgtctgccttttgcttggaagcagtttccccggacctcgcctctttccagagggccctggaccacatcactacactgctgaggccagggggccatttgttgctgattggggccctggaggaaagctggtacctggctggagaagcacgattgaccgtcgtgcctgttagcgaagaggaggtgcgagaggctctcgtacgcagtggttacaaggtgagggacttacgaacatatattatgccagcacacttgcagactggggttgatgacgtgaagggagtgtttttcgcatgggcccagaaggtgggactgtag

SEQ ID NO: 199146 - DNA, 741 bp, synthetic construct
  misc_feature 1..741: note = Description of Artificial Sequence: Synthetic coding sequence
  source 1..741: mol_type = other DNA
atggaggaggccaagagccagagcctggaggaggacttcgagggccaggcaacgcacactgggcctaaaggggtgataaatgattggcgaaagttcaaacttgagagccaggactctgattccatccccccctccaaaaaggagatcctccgacagatgtcaagtccacagagcaggaatggcaaagactctaaggagcgcgtatccaggaaaatgtcaatccaggaatatgagctgatccataaggagaaggaggatgagaattgcctgaggaagtaccggcggcagtgtatgcaggatatgcatcagaagctcagctttggccctcggtacgggttcgtgtacgagctcgagaccggcaagcaattcctggaaaccatagaaaaggagctcaagattacaacaatcgtcgttcacatctacgaagacggtatcaagggctgtgacgctttgaactccagcctgacctgtcttgccgccgagtatcccatcgtgaagttttgtaaaatcaaggctagtaacaccggcgccggggacaggttctccctcgacgtactacccacccttttgatttacaagggtggggagttgatttccaattttatctcggtggctgagcagttcgccgaagaattctttgccggggatgtggagtcctttctgaacgaatatgggctactgcctgagcgcgaagtgcacgtcctcgaacacaccaaaatcgaagaggaggacgttgaatag

SEQ ID NO: 199147 - DNA, 741 bp, synthetic construct
  misc_feature 1..741: note = Description of Artificial Sequence: Synthetic coding sequence
  source 1..741: mol_type = other DNA
atggaggaggccaagagccagagcctggaggaggacttcgagggccaggccactcacactgggcccaaaggggtgataaatgactggcgtaagtttaagctggaaagtcaggactccgattcgataccacccagtaaaaaggagattctacgccagatgtctagtccgcagtcccggaacggcaaggattctaaagagagagtgtctcggaagatgtctattcaggagtatgaactaatacataaagagaaagaagacgagaactgtctccggaagtaccggcgacagtgcatgcaggatatgcaccagaagctgtcctttggcccccgctacgggttcgtttatgaactggaaacagggaaacaatttcttgaaacaatcgaaaaggagttaaaaatcacaactattgtagttcacatctatgaggacgggataaagggatgtgatgccctcaacagcagcctgacttgcctagccgcggagtaccctattgtgaagttttgtaagatcaaagcctccaatacaggagccggggatagattctctttagatgttttgcctacgctcctgatctacaaagggggagaactgatcagcaactttatctcggtggccgaacagtttgctgaagaattttttgctggagatgtggaatcattcctgaacgagtacggcctgcttccagagagagaagtgcatgtattagagcatacgaaaatagaagaggaagacgtcgaatag

SEQ ID NO: 199148 - DNA, 585 bp, synthetic construct
  misc_feature 1..585: note = Description of Artificial Sequence: Synthetic coding sequence
  source 1..585: mol_type = other DNA
atgagcagcccccagagccggaacggcaaggacagcaaggagcgggtcagcaggaaaatgtctattcaggaatacgaactgatccataaggagaaggaagatgagaactgtttgaggaaatacagacggcagtgcatgcaggatatgcaccagaagctgagcttcggcccccggtacgggtttgtctatgaattagagactgggaaacaattcttagagaccatcgaaaaggaactcaaaataaccactatcgtggtgcatatctacgaggacggcattaaagggtgcgatgccctgaatagtagtctgacttgcctcgccgcggagtatcccattgttaagttctgcaagatcaaggccagtaatactggagccggggacagatttagtcttgatgtcctccctaccttgctcatttataaggggggagaactgatctcaaactttatttccgtggctgagcagttcgccgaagaattctttgctggcgacgtggaaagcttcttgaacgagtacggattgctcccggaaagagaagtgcacgtgctggagcacacaaagattgaggaggaggatgttgagtag

SEQ ID NO: 199149 - DNA, 585 bp, synthetic construct
  misc_feature 1..585: note = Description of Artificial Sequence: Synthetic coding sequence
  source 1..585: mol_type = other DNA
atgagcagcccccagagccggaacggcaaggacagcaaggagcgggtgtctaggaaaatgagcattcaggagtacgagttaatacataaggaaaaagaggacgagaattgtctccgcaagtatagaaggcaatgcatgcaggatatgcatcaaaaactcagctttgggcctaggtacgggtttgtgtatgaactggagaccgggaagcagtttctggagacgatcgaaaaggagcttaagatcactacaattgtcgtacacatctacgaggatggaattaaggggtgcgacgccctcaattccagcttgacatgtttagccgccgagtatcccattgtgaaattctgtaagatcaaagcctctaacacaggcgccggagatcgtttctcgcttgatgtcctccctaccttgctcatctataagggcggggagcttattagcaatttcattagcgtggccgaacagttcgcagaagagtttttcgccggggatgtggaatcatttctgaacgaatatggtttactcccagagagagaggtgcacgtgttggagcacacaaaaatcgaagaggaggatgtggaatag

SEQ ID NO: 199150 - DNA, 906 bp, synthetic construct
  misc_feature 1..906: note = Description of Artificial Sequence: Synthetic coding sequence
  source 1..906: mol_type = other DNA
atgaccaccctggacgacaagctgctgggcgagaagctgcagtactattacagctcaagcgaagatgaggattctgaccacgaagacaaggatagaggcagatgcgcccctgccagttcgtccgtccctgcggaggcggagcttgccggtgagggcatctctgttaacaccggcccaaaaggtgtcatcaacgactggcgacgcttcaagcagttagagaccgagcagcgcgaggagcaatgtcgggagatggaaagactgattaagaaattaagcatgacttgcaggtcccacttagatgaggaggaagagcagcagaaacaaaaagacttgcaagaaaagatttcaggtaaaatgaccctgaaagaatttgcaatcatgaatgaggatcaagatgacgaagagtttctgcagcagtacagaaaacagcggatggaggagatgcgtcaacagctgcataagggaccccagttcaaacaggtgttcgagatctcatctggcgaggggttcctagacatgatcgataaggaacagaaaagtatcgtcattatggtccacatctacgaagacggtatcccgggaacagaggctatgaatggatgcatgatttgcctggccgctgagtatccagccgtcaagttttgcaaagtaaaaagctcggtgattggggccagttcccagttcaccaggaatgcgcttccggccctgttgatttataaagggggtgaattgattgggaactttgtgagagtgaccgaccaactgggtgacgacttcttcgctgtcgatttggaggctttccttcaggagtttggacttctgcctgagaaggaggtgcttgtgctgacgtccgttaggaactccgcaacctgccacagcgaagattcggaccttgaaatagattag

SEQ ID NO: 199151 - DNA, 330 bp, synthetic construct
  misc_feature 1..330: note = Description of Artificial Sequence: Synthetic coding sequence
  source 1..330: mol_type = other DNA
tgactgcagtactactacagcagcagcgaggacgaggacagcgaccacgaagacaaagacaggggccggtgtgcccctgcttcctcgtctgtccctgccgaggctgaattggccggtgagggcattagcgtcaacacaggaccgaaaggcgtgatcaacgactggagaagattcaagcagttagagaccgagcagagagaggaacaatgtagagaaatggaacgtctcattaaaaagctttccatgacttgccgctcgcatctggatgaggaggaggagcagcagaaacagaaggacttacaggaaaagattagcgggaaggaacgctag

SEQ ID NO: 199152 - DNA, 276 bp, synthetic construct
  misc_feature 1..276: note = Description of Artificial Sequence: Synthetic coding sequence
  source 1..276: mol_type = other DNA
tgatgcgcccccgccagcagcagcgtgcccgccgaggccgagctggccggggaaggcatttccgtaaacactgggccgaagggggttatcaacgattggcgcaggtttaaacagctcgagacagagcaaagggaagagcagtgtagggagatggaaagactgatcaaaaaactgagcatgacttgtagatcacatctggatgaggaggaggagcagcagaaacagaaggacctccaggagaaaatcagcggaaaaaaaagctgggctattttgtag

SEQ ID NO: 199153 - DNA, 726 bp, synthetic construct
  misc_feature 1..726: note = Description of Artificial Sequence: Synthetic coding sequence
  source 1..726: mol_type = other DNA
atgcaggaccccaacgaggacaccgagtggaacgacatcctgcgggattttggaattctgccgcccaaagaggaatcaaaagatgaaattgaggagatggtcttaagactacagaaagaggcgatggtgaagccctttgagaagatgacactggcacagttgaaggaggcggaagatgagtttgatgaggaagacatgcaggccgtcgaaacatacagaaagaaacggttgcaggaatggaaggccttaaaaaagaagcagaagtttggtgagcttcgcgagatttcagggaaccagtacgtgaacgaggtcaccaacgccgaagaggacgtttgggtgatcatccatttgtatcgttcatccattccgatgtgtctcctggtgaaccaacatctgagcctcctggcgcgcaagttcccagaaaccaaattcgtgaaggctatcgtcaactcatgtatccagcattaccacgacaactgtctaccgaccatttttgtctacaaaaacggccaaatcgaggctaagttcattggcataatagaatgcggtgggattaatctgaagctcgaggagcttgagtggaagttggctgaagttggggcgattcaaacggacctcgaagagaatccccggaaagatatggtggacatgatggtgtcctccattcggaacaccagcattcacgatgattccgactccagcaatagcgataacgacacaaaatag

SEQ ID NO: 199154 - DNA, 720 bp, synthetic construct
  misc_feature 1..720: note = Description of Artificial Sequence: Synthetic coding sequence
  source 1..720: mol_type = other DNA
atgcaggaccccaacgccgacaccgagtggaacgacatcctgcggaagaaagggatcctgcctcccaaagagagtttgaaggaactcgaggaagaagctgaggaggagcagcggatccttcaacaaagtgtggttaagacctacgaagatatgactctggaagaattggaggaccatgaggacgagttcaatgaagaggatgagagagctattgagatgtaccgccgccgtcgactagcagaatggaaggccactaagctcaaaaataagtttggggaagtgttggagatcagcggtaaagactatgtccaggaggtgacaaaggcaggagagggcctgtgggttatcctgcatctatataagcagggcatccctctgtgtgccctgattaaccagcatctctctggtctggcgcgtaagttccccgacgtgaagttcataaaggcgattagtacaacttgtatacccaactaccctgatcgcaacttaccaaccatatttgtgtatctagagggagatatcaaagcccagttcatcgggccgctggtgtttggcggcatgaatttgacccgagatgagctcgaatggaagctatctgaaagcggagccattatgacagacctggaagagaacccaaagaagcccattgaagacgtgctcctgtcctcagtaaggcggagcgtcttgatgaagcgcgactcagatagcgaaggcgactag

SEQ ID NO: 199155 - DNA, 1104 bp, synthetic construct
  misc_feature 1..1104: note = Description of Artificial Sequence: Synthetic coding sequence
  source 1..1104: mol_type = other DNA
atggacgcccagtgcagcgccaaggtgaacgcccggaagcggcggaaggaagctcccggccccaacggagccactgaagaagatggcgtccccagcaaagttcagcgctgcgccgtgggtcttcggcagccagcgcccttttccgacgaaatcgaagtcgactttagtaagccttatgttcgggttacaatggaagaggcatcccgcggtacaccttgcgagagacccgtgcgtgtttatgccgacggcatttttgacctctttcactccggtcacgcacgagctctgatgcaagcaaagaatctttttccaaacacttacctgatcgtgggggtgtgttccgacgagttgactcacaatttcaaaggttttaccgtgatgaacgaaaacgagcggtatgacgccgttcagcattgtcgctacgttgacgaggtggtccggaatgctccatggaccctcacacccgagtttctggccgagcaccgcattgattttgtcgctcatgacgatatcccatattctagtgccggatctgacgatgtgtacaagcacatcaaagaagctgggatgttcgcccctacgcaacgcactgaggggatctcaaccagcgacattattaccagaatcgttcgggactacgatgtctacgccagacgaaacctgcaaagagggtacacagctaaagaactgaacgtgtcattcatcaacgaaaagaagtatcacctccaggaaagagtcgacaaagtgaaaaaaaaggtgaaggatgtggaggagaagtctaaggagtttgtgcagaaggtggaagagaaatccatcgatctcattcagaagtgggaagagaaaagcagagagtttatcgggagcttcctggagatgttcggcccagagggggctctgaaacatatgttgaaagagggaaaggggcggatgctgcaggccatttcccctaaacagagcccatcctcttctccaaccagagagaggtctcctagcccttcattccgctggcctttttccggaaagacctctcccccatgctcacctgctaatctcagtcggcacaaggcggcggcttacgatatttccgaggacgaggaggattag

SEQ ID NO: 199156 - DNA, 882 bp, synthetic construct
  misc_feature 1..882: note = Description of Artificial Sequence: Synthetic coding sequence
  source 1..882: mol_type = other DNA
atggacgcccagtgcagcgccaaggtgaacgcccggaagcggcggaaggaagcccctggcccgaacggcgcaacagaggaagatggcgtgccatccaaagttcaaagatgcgccgtgggattgcgtcaacccgcgccattttctgatgagatcgaggttgatttcagcaaaccatacgtccgagttactatggaggaggcctcccgaggcaccccatgtgagcgccccgtgcgcgtctacgccgatgggatttttgacctgtttcactccggtcatgcccgtgcgctaatgcaagctaaaaacctctttcctaacacatacctaatagtaggggtatgcagcgatgagctcacccacaacttcaaaggtttcaccgtgatgaacgaaaacgagcggtatgacgctgtgcaacattgccggtatgtagacgaggtagtcaggaatgccccatggacactcactcctgagttcctggccgaacacagaattgactttgtggcccatgacgatattccctactcgtctgctgggtctgacgatgtctacaagcacatcaaggaagcgggtatgttcgccccgacccagcggactgagggtatcagcacatcagatatcatcactcggatagtgcgggactacgacgtctatgcacgtaggaacctgcagcgcgggtacaccgccaaggagcttaatgtgtcctttatcaatgagaaaaaataccacctgcaagagagagtggataaggtcaagaagaaggttaaagatgtggaggagaagtctaaagaattcgtccagaaggtggaagaaaagtccattgatctgatccagaagtgggaggaaaagtccagggaattcataggctccttcctggagatgttttag

SEQ ID NO: 199157 - DNA, 402 bp, synthetic construct
  misc_feature 1..402: note = Description of Artificial Sequence: Synthetic coding sequence
  source 1..402: mol_type = other DNA
atggacgcccagtgcagcgccaaggtgaacgcccggaagcggcggaaagaggcccccggcccaaatggggctactgaggaggatggagtgccctctaaagtgcaacgatgcgccgtagggctaaggcagccggctcctttcagcgacgagatcgaggtcgatttctcaaaaccttacgttcgtgtaaccatggaagaggccagtagggggaccccctgtgaacggcccgtgcgggtgtatgccgacggtatttttgacctgttccattctggtcacgctcgagctctcatgcaggctaaaaatctttttccgaacacctatctgattgtcggagtgtgcagtgacgagctgacccacaattttaaagggtttacagtcatgaacgaaaacgaaaggtattag

SEQ ID NO: 199158 - DNA, 987 bp, synthetic construct
  misc_feature 1..987: note = Description of Artificial Sequence: Synthetic coding sequence
  source 1..987: mol_type = other DNA
atggacgcccagtgcagcgccaaggtgaacgcccggaagcggcggaaagaagcgcccggccctaatggagccaccgaggaggcttccagaggaaccccttgcgagagacctgtcagagtgtacgccgacggcatcttcgacctgtttcactccggccatgcccgagccctgatgcaggctaaaaatctgttcccaaacacctatctaatcgtcggggtgtgttccgacgagctgacccacaattttaaaggatttacggtcatgaacgagaacgagcggtacgatgccgtgcaacactgcaggtacgtggatgaggtcgtacggaacgctccatggactttaaccccggagtttcttgcggagcatagaattgacttcgtggctcatgacgatattccatattcaagtgcaggcagtgacgacgtctacaagcatattaaagaagccggtatgttcgcccctacccagcgaactgaaggcatcagtacttctgatatcattacgaggatagtcagagactatgacgtttacgcacgaagaaacctccagcggggatacacggcaaaggagcttaatgtctctttcatcaatgagaagaagtaccatcttcaggagagagtagataaggtgaagaagaaagtcaaggacgtggaggagaagagtaaagagttcgttcaaaaggtagaagagaaatctattgacctcatacagaagtgggaagaaaaaagccgcgagttcattggctccttcctcgaaatgttcggccccgagggtgcgctgaagcacatgcttaaggagggtaagggccgcatgttgcaggctattagcccaaaacagagcccctcctcctcaccgacacgcgagagatctccaagcccatcattccgctggcccttttccggcaaaacgagccctccctgctctcccgcgaaccttagtagacataaagcagccgcctacgacataagcgaagatgaagaagactag

SEQ ID NO: 199159 - DNA, 1104 bp, synthetic construct
  misc_feature 1..1104: note = Description of Artificial Sequence: Synthetic coding sequence
  source 1..1104: mol_type = other DNA
atggacgcccagtgcagcgccaaggtgaacgcccggaagcggcggaaagaggctccagggccaaatggcgcaactgaggaagacggtgtaccttccaaggtacagaggtgcgccgttgggttacggcagcctgctccattctctgatgaaatcgaagtggacttctcaaagccgtacgtgcgggtgaccatggaagaggccagccgggggaccccgtgcgaaagacccgtgagggtgtacgccgatggcatcttcgacttattccactctggtcacgccagagctttgatgcaggcaaaaaatttgtttcctaacacctatctcatcgtcggcgtctgttcggatgaactgacccataacttcaaggggttcaccgtgatgaacgaaaatgagcgatacgacgcagtgcagcattgtcgctacgtggatgaggtggtacgaaacgccccctggactcttacgcctgaatttctggctgaacacaggattgactttgtagcacatgacgatattccatactccagtgcaggtagcgacgacgtttacaagcatatcaaggaagccggaatgttcgctcccacacagagaactgaaggaatctctacaagcgacatcatcactcgtattgtgagagactacgacgtatatgcaaggagaaatttgcagcgaggatatactgccaaagagctaaacgtgagcttcattaacgagaagaagtatcatcttcaagaacgcgtggacaaggtgaagaaaaaagtgaaagatgtagaagagaagagcaaggaattcgtgcaaaaggtggaagagaagtctattgatctgatacagaagtgggaggagaagagccgggaattcatcggtagttttttggagatgtttggccctgaaggggccctcaagcacatgctgaaagagggcaaagggcgaatgttacaagctatcagcccgaagcagagccccagtagttccccaactcgagaacggtctccgtcccccagcttcaggtggcctttttccgggaagacatcacccccgtgcagccccgccaatctgtctcgccataaggccgccgcctacgacatctccgaggacgaagaagattag

SEQ ID NO: 199160 - DNA, 348 bp, synthetic construct
  misc_feature 1..348: note = Description of Artificial Sequence: Synthetic coding sequence
  source 1..348: mol_type = other DNA
atggacgcccagtgcagcgccaaggtgaacgcccggaagcggcggaaagaggcaccaggtcctaacggggcaacagaggaggacggcgttccttcaaaggtgcagcggtgtgccgtggggctaaggcagccagcaccctttagcgatgagatcgaggtcgactttagcaagccctacgtgcgcgtcacaatggaggaagcctccagaggcaccccttgcgaaaggcccgttcgggtgtacgctgacggaatttttgatttgtttcactcaggacacgctagggccctgatgcaggccaagaacctgttcccaaacacatatttaatcgttggtgtatgcagtgactag

SEQ ID NO: 199161 - DNA, 2250 bp, synthetic construct
  misc_feature 1..2250: note = Description of Artificial Sequence: Synthetic coding sequence
  source 1..2250: mol_type = other DNA
atggaggccgagaccggcagcagcgtggagaccggcaagaaggccaatcggggtactaggattgccttggtagtgttcgtgggcggcactctcgttctgggcaccatactgtttctggtgtctcaggggctccttagcttgcaggctaagcaggagtattgtctgaaaccggagtgcatcgaggcggcagccgccatcctcagtaaggtcaatctttccgtagatccctgtgacaattttttccgcttcgcatgcgacggatggatttccaacaatccaatccctgaggatatgccttcttacggcgtgtatccctggttaaggcacaacgtggatttaaaactgaaggagttgctggagaagtccataagcaggagaagggacacagaagccattcaaaaggcgaagattctgtatagctcctgtatgaatgaaaaggcgattgagaaagctgacgctaagccgctgctccatattctgaggcactcaccgtttagatggcccgtcctagagtccaacattgggcccgagggagtctggtcagagcggaagttctccttgcttcagacgctggccactttcaggggacaatattctaatagtgttttcatccgcctgtacgtgagtcccgacgataaggcctcaaacgagcatatcctgaaactggaccaggcgacattaagtttagctgttcgggaagactacctggacaattcgactgaagcaaaatcatatcgcgatgcattgtataaatttatggttgataccgcggtcctgctgggcgcaaacagcagccgagctgaacatgatatgaagtccgtgctgaggcttgagattaaaatagcagagataatgatcccacatgagaatagaacgtcggaggccatgtacaacaagatgaatatctcagagctgagtgccatgatccctcagtttgattggctgggctacatcaagaaggtgatcgatacccggctctacccccaccttaaggatatttccccctcagagaacgtggtggtcagggttccacaatacttcaaggacctgttcaggattctgggttccgaaaggaaaaaaaccattgccaactatctagtatggcggatggtctactccaggatccctaatcttagcagacgcttccagtatcggtggctcgagttcagcagggtgattcagggcactaccaccctcttgccacagtgggataaatgcgtgaacttcattgaatctgcgcttccctacgttgtcggcaagatgtttgtggatgtgtatttccaggaggataagaaggagatgatggaagaactggttgagggagtgcggtgggccttcatcgatatgttagaaaaggaaaacgagtggatggacgctggcaccaagaggaaagccaaggagaaggcacgcgcagtgcttgccaaagtcgggtatccagaattcattatgaatgatactcacgtgaatgaagatttaaaggcgatcaagttctctgaggctgattattttggcaacgtactgcaaactcggaaatatttagctcagagtgactttttttggcttagaaaggctgtcccgaaaactgaatggttcaccaatcccaccaccgtgaatgccttctacagcgcttccaccaaccagattaggttcccagcaggggaattgcaaaaaccctttttttgggggaccgagtaccctagatccttgagctatggtgccatcggtgtaatagtgggccacgagtttacgcatggtttcgacaataacggtcgcaagtatgataaaaatggcaatctcgatccctggtggagcactgagtcagaagagaaattcaaagagaagaccaaatgcatgattaaccagtatagtaattactattggaagaaggctggtctgaacgtgaaagggaagcgcacactgggagaaaacatcgccgataacggcgggctcagagaggcctttcgcgcgtaccgaaagtggataaacgatcgtcgccagggcctggaagagccattactgcctggcatcactttcactaataaccagctgttcttcttatcatacgcacacgtgcgctgcaacagttacagaccagaggccgccagagagcaagtgcagatcggcgctcactccccgccacagttcagagtgaatggggcaattagcaatttcgaagagtttcaaaaggcctttaactgcccgcctaattccactatgaatcggggcatggattcttgtcggctgtggtag

SEQ ID NO: 199162 - DNA, 1359 bp, synthetic construct
  misc_feature 1..1359: note = Description of Artificial Sequence: Synthetic coding sequence
  source 1..1359: mol_type = other DNA
atgatccacctgccccggccccccaaggtgctgggcctgcagttcgactggctgggttacatcaagaaggtaattgatacgcgcctttacccacatcttaaggacatctcaccatctgagaatgtggtcgtacgtgtcccacagtactttaaagacctttttaggattctgggctccgaacgtaaaaaaaccattgctaattatctggtgtggcgaatggtgtactctcgcatcccaaatctgtcgaggaggttccagtataggtggttggaatttagtagggttatccaggggacgaccacgctgttgcctcaatgggataagtgcgttaattttatagaatccgcattgccctacgtggtgggaaagatgttcgtggacgtctacttccaggaagacaagaaagagatgatggaagagctggtggagggggttcggtgggcttttattgacatgctcgagaaggagaatgagtggatggacgctggcaccaagagaaaagccaaggagaaagcaagagccgtgctagcaaaggtcggctacccagaattcataatgaatgacacccacgtgaacgaagatcttaaagccataaagttctctgaggccgactatttcgggaatgttttgcaaactaggaaatatctcgcccagagcgacttcttctggttacgtaaagccgtgcccaagacagagtggtttacaaatcctacgaccgtgaacgccttctattctgcaagtacgaaccagattcggttcccagccggagaattgcaaaagcccttcttctgggggaccgagtacccccgctcactctcttatggcgctatcggagtgatcgtcggacacgagttcacacacggctttgacaataatggcaggaaatatgataagaatggcaacctggatccttggtggtccacagagtctgaagaaaaattcaaggagaagactaaatgcatgattaaccaatactccaactattactggaagaaagccggtctgaatgtcaagggcaaacggacattgggagagaacatcgcggacaacggggggcttcgggaggcctttcgtgcctaccggaaatggattaacgataggcggcagggactcgaggagccactgctgccagggattactttcacgaataaccaactgttttttctaagctacgcccatgttcgctgtaattcctaccgacccgaggcggccagggaacaggtccagattggtgctcacagccctcctcagttccgtgtgaacggcgccatttctaatttcgaagagtttcagaaagcctttaactgtcctcccaatagcaccatgaatagaggcatggatagttgcagactttggtag

SEQ ID NO: 199163 - DNA, 1959 bp, synthetic construct
  misc_feature 1..1959: note = Description of Artificial Sequence: Synthetic coding sequence
  source 1..1959: mol_type = other DNA
atgcccagctacggcgtgtacccctggctgcggcacaacgtggacttaaagctcaaggaactcctggagaagagtattagccggcggcgagatacggaggcgattcaaaaggccaagatcctgtactcctcttgcatgaatgaaaaagccatcgaaaaggccgatgccaagcctctgctgcacatattgcgccactctccattcaggtggccagtgttggagagcaatattgggccggagggggtttggtctgaacgtaaattcagcctgctacagaccctggctactttccgcggacagtactctaatagtgtcttcatccgcctctacgtgtcccccgacgataaagcctctaatgaacacattctaaagttggaccaggcaacacttagtctcgcagtgcgcgaggattacctggataatagcacagaggcaaagtcatatagggacgcactttacaagtttatggtggatacagccgtgcttctgggagcgaacagcagccgagccgaacatgatatgaaatctgtgctgagactggagattaaaatagcagagatcatgattccccacgagaatcggacaagtgaggcaatgtataacaagatgaacattagcgaactgagtgccatgatcccccagtttgactggctagggtacatcaaaaaagtcattgatacccgtctctatccccaccttaaggacattagcccttctgaaaacgtcgtcgtccgggtaccacagtactttaaggacctcttcagaattctaggaagcgaaagaaagaagactatcgccaactatctggtttggagaatggtgtatagtagaattccgaacttgtccagaagatttcagtatagatggctggaattctccagggtgatccaaggaactacaacactgctcccacagtgggacaagtgtgtcaactttattgaatctgcccttccctacgttgtggggaagatgtttgtcgatgtctacttccaggaggataagaaggagatgatggaggagctggtggaaggagtaaggtgggcattcattgacatgttggagaaggaaaatgaatggatggacgcagggacaaagaggaaagccaaagaaaaagcgagggccgtactggcaaaagtgggatacccggagttcatcatgaacgacacccacgtaaatgaagatctgaaggccattaagttctcggaagccgattattttggaaatgtgttacagactagaaagtatttagctcagtccgacttcttctggcttcgtaaggccgtacctaagaccgagtggttcacaaatcccacgaccgttaacgctttttattccgcatccaccaatcagattcgatttccggccggcgagcttcagaagccgttcttctgggggactgaatacccccgcagcctaagctatggggctatcggagtgattgtgggacatgagtttacccacggattcgataacaacggacgtaagtacgataagaatggaaacctggacccatggtggagtacagagagcgaggaaaaatttaaagagaaaactaaatgtatgatcaaccagtattctaactactattggaagaaagcaggcctcaatgtaaagggcaaaaggaccttaggcgaaaatatcgcagacaatggaggcctcagagaggcctttcgggcgtaccgtaagtggattaatgacaggcggcaggggctcgaggagccccttctgccgggcatcacttttactaataaccagctcttttttctctcttatgcccacgtgaggtgcaatagctatcgccctgaagccgccagagagcaggtccagatcggagctcactcgccaccccagtttcgcgtcaatggagcaatttccaacttcgaggagtttcagaaagcctttaattgcccgccgaactctactatgaaccgaggcatggactcctgtcgcttatggtag

SEQ ID NO: 199164 - DNA, 2088 bp, synthetic construct
  misc_feature 1..2088: note = Description of Artificial Sequence: Synthetic coding sequence
  source 1..2088: mol_type = other DNA
atggaggccgagaccggcagcagcgtggagaccggcaagaaggccaatcgcggaactaggatcgcacttgtagtctttgttggcggtaccctcgtgttgggtacaatattgttcttggtgagtcagggactcttgagtctccaggccaaacaagagtattgtctcaaacccgagtgcatagaagccgctgccgccattctgtccaaggtgaatctgagcgtcgatccttgtgacaatttcttcagattcgcctgtgatggctggataagcaacaatccaattccagaggatatgcctagttacggggtgtatccatggctgcgtcacaacgtggatcttaagttaaaggaactgcttgaaaaatcaattagccgccgacgggacactgaagccattcagaaagcaaaaatattgtactcctcttgcatgaatgagaaagctatagagaaggccgatgccaaaccattgctacacatcttacggcatagtcctttccgatggcccgtactggaatcaaatattggaccagagggggtctggtcagaaaggaagttttctttgctgcagaccctcgccacatttcggggacagtatagcaatagtgtgtttatccggctgtatgtttcaccagatgacaaagctagcaatgaacatatcctgaaattggaccaggcaaccctgagtctggctgtccgagaggactatctggataattctactgaggcaaagagttaccgcgacgccctgtacaagtttatggtggacacggctgttctcctgggtgccaactcatccagggccgagcatgatatgaaatcagtcctccggctggagatcaagattgcagaaattatgatcccccacgaaaatcggacgagcgaggcaatgtacaacaaaatgaacatttccgaactgagtgctatgattccacagtttgactggttgggatatatcaaaaaggtcatcgacactagactatacccccatctgaaagatatttcaccaagtgagaatgtcgtcgtcagggtacctcagtatttcaaggacttatttaggatccttggatccgagcggaagaagacaattgcaaactatctggtgtggcggatggtttactctaggatcccaaatctgagtcgaagatttcagtaccgatggctggagttttcccgcgtgatccaaggaacaactactctgttacctcagtgggataaatgtgtaaacttcattgagtcagcactgccttatgtcgtgggcaagatgtttgtcgacgtctatttccaggaggataagaaagaaatgatggaggaactggtcgagggcgtgcgctgggcttttattgatatgctggagaaggaaaatgagtggatggacgccggtaccaagcgaaaagccaaggagaaagccagggcggtgttggccaaagtcgggtacccagaatttatcatgaacgacacacacgtgaatgaggacctgaaggcaatcaagtttagcgaggctgactatttcggcaatgttctgcagactcggaaatacctggcccagagcgactttttttggttaaggaaggcggttccaaaaacagagtggttcactaaccccaccacagtcaatgcattctattcagcctcaaccaatcagattaggttccccgcaggcgagcttcaaaaaccatttttttgggggacagagtacccaagaagcctgtcgtacggcgctataggcgtgattgtgggtcacgagttcactcacggatttgacaacaacggcaggaagtatgacaagaatggcaacctggacccctggtggagcaccgagtcagaggagaaattcaaggaaaaaaccaagtgcatgatcaatcagtattcaaactactattggaaaaaggctggactcaatgtgaagggaaagcgcacgcttggggaaaatattgctgacaacgggggtctgagagaggcttttcgcgcctaccgcaagtggattaatgacaggaggcagggactggaagagcctctgctccccgggattacattcacaaacaaccagctgtttttcctgagctacgcccacggccagtggtgcaactag

SEQ ID NO: 199165 - DNA, 888 bp, synthetic construct
  misc_feature 1..888: note = Description of Artificial Sequence: Synthetic coding sequence
  source 1..888: mol_type = other DNA
atgcccagcccccggcggagcatggagggccggcccctgggcgtgagcgcatcatcttcttcttcgtccccaggatcccctgctcatgggggtggcggagggggctctcggttcgaattccagagcctcctgtcaagtagggccacagccgtggacccaacgtgcgcgcgcctccgggcctcagaatcccctgttcacaggcgcggttcttttccactggcagctgcagggccctcccaatctcctgcccctccgcttcctgaggaagatcgaatggacctgaatccctcgttccttggtatcgctcttcggtcccttctggcgattgatctgtggttatctaaaaaattgggggtctgcgccggggagtctagttcgtggggttccgttcgccccctcatgaaattattagagattagtggtcacgggattccatggttgcttggcacattgtactgcctgtgccgtagtgatagctgggcaggaagagaagtcctgatgaatttactgttcgcgctgctcttagatctgttgctggtggccctcattaagggactggtgcggcggcggcggccagcccataaccagatggatatgttcgtgaccctgtcagtggacaagtacagctttccaagtggtcatgcgacacgggcagcactcatgagtaggttcatcttaaatcatctggtgctcgcaatccctctgcgcgtattggttgtattgtgggctttcgtactggggctgtccagagttatgttaggccgtcacaatgttacggatgtggcttttgggttcttcctgggttatatgcagtattcaatcgttgattactgctggcttagtccccacaacgccccagttctctttctcctgtggagccaaaggtag

SEQ ID NO: 199166 - DNA, 615 bp, synthetic construct
  misc_feature 1..615: note = Description of Artificial Sequence: Synthetic coding sequence
  source 1..615: mol_type = other DNA
atggacctgaaccccagcttcctgggcatcgccctgcggagcctgctagctatcgatctgtggctgtctaagaaactgggagtgtgcgccggcgagtcctcatcatggggttcggtgcggccacttatgaaactgctggagatttcaggacacggtataccatggctgctgggaaccctctattgcctgtgtagatcggatagctgggcaggcagggaggtgctcatgaacttgttgtttgccctgctgctggacctccttctggtagcattaattaagggcctcgtacgccgccggcgacctgcccacaaccagatggatatgtttgtgaccctcagtgttgacaaatactcctttccaagcgggcacgccacgagagcagccttaatgtccaggttcatcctgaaccacctggtgctcgccattccactgagggtgctggtcgttctgtgggcctttgtccttggtctgtcccgggttatgctgggacgacacaacgtcacagacgtggcattcggctttttcctaggttacatgcaatactccatcgtcgactactgctggctttctccccacaatgcacccgttctgttcctgctctggagccagcggtag

SEQ ID NO: 199167 - DNA, 645 bp, synthetic construct
  misc_feature 1..645: note = Description of Artificial Sequence: Synthetic coding sequence
  source 1..645: mol_type = other DNA
atggagctggccgccggcagcttcagcgaggagcagttctgggaggcctgcgcagaattgcagcagccggccttagcaggcgccgactggcaactccttgttgagacatctggaatatccatatatcgcctcctggacaagaaaacaggcctgtacgagtacaaagtgttcggtgtgcttgaagattgttcacctacactcctggccgatatctacatggatagcgattacagaaaacagtgggaccagtacgtcaaagagctttacgaacaagaatgcaacggggagacagttgtttactgggaagtgaaatacccgttcccaatgtccaatcgagactacgtttatttacggcagagacgcgacctggatatggagggccgtaagatccacgttattctagccagatcaactagcatgcctcagctaggagagcggtctggtgtgatccgcgtgaagcaatataagcaatcacttgctattgaatcggacgggaagaagggatcaaaagtgtttatgtactatttcgataatcccggagggcagattccctcatggttgattaattgggctgctaagaatggtgtgcctaacttcctcaaagacatggctcgcgcatgccagaattatctgaagaagacatag

SEQ ID NO: 199168 - DNA, 582 bp, synthetic construct
  misc_feature 1..582: note = Description of Artificial Sequence: Synthetic coding sequence
  source 1..582: mol_type = other DNA
ctggcccagggccggtgcctgcaggtgaccgccgtgcagatccagggatcttggaaggtgaccggtgtccagcctcagaaaacaggtctctatgagtacaaagtttttggggtgctggaggattgttccccaacactcctcgctgacatttacatggatagcgattatcgcaaacagtgggaccaatatgttaaagaactctatgagcaggagtgcaacggagagaccgtggtctattgggaggtgaagtaccccttcccaatgtccaatagggactacgtgtacctgagacagcgccgggacctcgacatggaagggagaaaaatccatgttattctcgcacgcagtacatcaatgcctcagctcggtgagcgctccggtgtgatacgagttaagcagtacaaacagagtctggcgatagagtctgatgggaaaaaaggtagcaaagtgttcatgtactactttgataatcccggtggtcagataccatcctggttgatcaattgggccgcgaagaatggagtgcccaattttctgaaggatatggccagagcttgccaaaactacttaaagaagacttag

SEQ ID NO: 199169 - DNA, 429 bp, synthetic construct
  misc_feature 1..429: note = Description of Artificial Sequence: Synthetic coding sequence
  source 1..429: mol_type = other DNA
atggacagcgactaccggaagcagtgggaccagtacgtgaaggagttatatgagcaggaatgcaatggagaaactgttgtgtactgggaagtgaaatatccttttcccatgagtaacagagactatgtgtatctccgtcagcgaagggatctcgacatggagggcaggaaaatccatgtgattttggcaaggtccacatctatgccacaacttggtgaacgcagtggtgtaatcagagtgaaacaatacaagcaatccctcgctatcgagtcggatggcaagaagggcagtaaagtctttatgtattactttgataatcccgggggtcaaatcccttcatggctcatcaattgggccgccaaaaatggcgtccccaacttcctgaaggatatggccagagcctgtcagaactatctcaagaagacttag

SEQ ID NO: 199170 - DNA, 564 bp, synthetic construct
  misc_feature 1..564: note = Description of Artificial Sequence: Synthetic coding sequence
  source 1..564: mol_type = other DNA
atgcccgtggacctgagcaagtggagcggccccctgagcctgcaggaggtcgatgagcagccacagcaccctctgcacgtgacgtacgctggtgcagcagttgacgagctcggcaaggttttgacaccaacacaagttaagaatcgaccaacgtcaatcagctgggacggcctcgatagcggcaagttatacaccctcgttcttacagatcccgatgcccctagccgtaaggaccctaaatatagggagtggcaccacttccttgtggtcaatatgaagggaaatgatatctcatcaggcacggtcctgtccgattatgtcggctcggggcccccaaaaggaactgggcttcatcgatacgtgtggctggtgtacgaacaagatcgacccctcaagtgtgatgagcctatcctcagtaaccgaagtggcgatcatcgaggaaaattcaaagttgcaagcttccgcaaaaagtacgaactacgagcacccgtggcaggcacgtgctatcaagccgaatgggatgactacgtccccaagttgtacgagcaattgtctgggaaatag

SEQ ID NO: 199171 - DNA, 468 bp, synthetic construct
  misc_feature 1..468: note = Description of Artificial Sequence: Synthetic coding sequence
  source 1..468: mol_type = other DNA
atgcccgtggacctgagcaagtggagcggccccctgagcctgcaggaggtggacgagcagccacaacatccccttcatgtgacctacgcgggcgctgccgtagatgaactggggaaagttctgaccccaacacaagtgaagaacaggcctactagtatctcctgggatgggctggatagcggcaaattatatacgttggttctgaccgatcccgatgccccttcaaggaaggatcctaaataccgggagtggcatcactttcttgtcgtgaatatgaaagggaatgatatcagttccggcaccgtactgagcgattatgtcgggtctggcccccctaagggcactggtctgcatagatacgtgtggctggtatacgaacaggatcgtccactcaaatgcgacttttcctgctgtctagcgtttattattctgttaactcacagcgacctgtgtttcgaccagatctag

SEQ ID NO: 199172 - DNA, 6135 bp, synthetic construct
  misc_feature 1..6135: note = Description of Artificial Sequence: Synthetic coding sequence
  source 1..6135: mol_type = other DNA
atgtgccccgtggacttccacggcatcttccagctggacgagcggcgccgcgacgcagtgatcgctctgggaatcttcctgattgagtccgacctgcagcataaggactgcgtggtgccctatctgctgagactcttgaagggtctccctaaggtttactgggtcgaagaaagtaccgccagaaaggggaggggtgcattgcctgtagcggaatcgttcagcttctgtctggtcactcttctgtccgatgttgcataccgggatccctccctcagagacgaaatactagaggtgttgctgcaggtattacatgttttgctaggaatgtgtcaggcgctagagatccaggacaaggaatacttatgcaaatatgccatcccatgcttaattgggatctctcgcgccttcggtcgatattctaacatggaggaatcacttctgagcaagctcttccccaaaattccgcctcacagtttacgtgttttggaggagctggagggtgtgcgtcggagatcgttcaatgattttagatcaatcttgcctagtaatttgcttaccgtgtgccaagagggcacccttaaaagaaagacctctagcgtgtcttctattagccaggtgtctcccgagcggggaatgccccccccgtctagcccagggggatctgccttccactactttgaagcctcctgtttaccagatggcacagcgcttgaacctgaatactacttctctactatatcgagcagcttctcagtctcccctctgttcaacggagtgacttacaaggagttcaacattcctctggaaatgctgcgagagttattaaacctggtgaagaagatcgtcgaggaagccgtcctcaagtcactggatgccatcgtggccagtgtgatggaggccaatccatctgccgacctatactacaccagctttagtgaccccctctacctgaccatgttcaagatgttgagagacaccctctactatatgaaagacctgcccacctccttcgtgaaagagatacatgatttcgtcctagaacagttcaacaccagccagggcgaactccagaaaattctccatgacgccgacagaatccacaacgagttgtcgcctctgaaattgaggtgccaggccaatgcggcttgtgttgatttaatggtttgggccgtcaaggatgaacagggggccgagaatctttgcatcaagttaagtgagaagctccagtccaaaacatccagcaaagtcattatcgcccacttgcccctgcttatctgctgtttgcaaggcctgggtagattgtgcgaaaggttccccgtggtggtgcacagtgtgactccttctctgcgggattttcttgtgattccctccccagtgttggtcaagctatacaaataccactcccagtaccataccgtcgccggaaatgatattaaaattagcgtgacaaacgagcactcagaatccacattgaacgtgatgtccggtaagaaatcacagcccagcatgtatgaacagctcagagatattgctattgacaatatatgtcggtgtctgaaggcagggctcacggtggaccctgtgatcgtggaggcttttcttgcgtcattgtcgaacagactgtatatctcacaggaatccgataaagatgctcatttgattccagatcatactatccgggcgctggggcatatcgcggtagcgttgagggacacacctaaggtgatggaacctatcctccaaatattacagcagaaattttgtcaacccccaagtcccctggatgtcctcataattgatcaactggggtgcctggttataaccggtaaccagtatatctaccaggaggtctggaatctgtttcaacagatctcagtgaaggcctcaagcgtcgtgtattccgctaccaaagattacaaggaccatggatataggcattgctcattggccgttattaatgctctggccaacatcgctgctaacatacaggacgaacatctggtcgacgaactcctgatgaatcttttagagctgtttgtgcagcttggtctggaggggaagagggcctctgaacgtgcctcagagaagggacccgcgctcaaggccagttcatcagctgggaatctgggcgtgttaattccagtcattgccgtcctgacccggaggctccccccgatcaaggaggctaaaccccggctgcagaagttgtttcgagacttctggttgtattccgtactgatgggtttcgccgtcgaaggatccggcctttggcctgaggaatggtatgagggggtgtgtgagatagctacgaagtcacctttgctcacttttccctccaaagaaccgttacggagtgtgctgcaatacaacagcgccatgaaaaacgacaccgttacacctgctgagctgagcgagttaaggtcaaccataattaatctgctcgatcccccccccgaggtgtctgctcttatcaataagcttgattttgctatgtcaacttacttgctttctgtgtatagactggaatacatgagggttctgcgatctacagatcctgaccgattccaggtgatgttctgttacttcgaagacaaagccatacaaaaggacaagtcaggaatgatgcagtgcgtcatagctgtggccgacaaagtgttcgacgcattcctgaacatgatggccgataaagcgaagaccaaggagaacgaggaggagctggaaaggcacgctcaattcctgctggtgaatttcaaccacattcataagaggatacgaagagtcgctgacaagtacctgtcaggcctggtagataagttcccgcatctgctctggagtgggactgtgctcaagacaatgctagacatcctgcaaacgctcagtttaagtctttccgcagacatacataaggaccagccttattacgatattcccgatgcaccataccgcattacagtgccagacacctatgaagctcgcgaaagtatcgtcaaagacttcgctgcacggtgcggcatgatccttcaggaggctatgaagtgggcccctacagtgaccaaatctcatctgcaagagtatttgaacaagcaccagaactgggtcagcggcttgtcacagcacacaggcctggccatggctaccgagtcaattttgcacttcgcaggatataacaaacagaacaccacccttggcgccacccagttgtcggaacgacccgcctgcgtaaaaaaggactattctaattttatggcaagcctcaacttgcggaataggtatgctggcgaagtctatggtatgatccgcttttcgggaacaaccgggcagatgtccgacctaaataagatgatggtacaagatctccactccgctctcgacagaagccaccctcaacactacactcaggccatgtttaaattgacagctatgctgatcagtagcaaggactgcgatccccagctgctccatcatttgtgctggggacccctgcggatgttcaacgagcacggcatggaaacagcattggcttgttgggagtggctcttggctggtaaagatggtgtggaggtgccctttatgagagagatggccggtgcttggcacatgaccgtcgagcaaaaattcggtctcttttcggccgagatcaaggaggccgaccccctggctgctagcgaggccagccagccaaaaccctgtcccccagaagtgactcctcactatatctggattgacttccttgtgcagcggttcgagatagcgaaatattgttctagcgatcaggtggaaatattttctagcctcttgcagcggagcatgagcctgaacatcggcggtgcaaagggcagtatgaaccgacacgtggctgccataggtcccagattcaagctgcttaccttaggcttgtctctgctgcacgctgatgtagttcctaatgctaccatacgaaacgtgttgcgagaaaagatatactcaactgcattcgactattttagctgcccccctaagttccctacacagggagagaagcgtctgcgtgaagacatttctattatgattaagttttggactgctatgttcagtgataaaaaatacttaacagcctctcagctcgtgccccccgacaaccaggataccagatctaatctggatatcaccgtgggtagccggcagcaggctacccaaggctggatcaacacataccccctctcttccgggatgtcaaccatctcaaagaaaagtgggatgagtaagaagacgaacagggggagtcagttacacaagtactacatgaagagacgcactctcctgctgtccctgctcgctacagaaatcgagcgcttgataacttggtacaaccctctgagtgctccagaattggagcttgatcaggccggagagaattccgtggctaactggcgctccaaatatataagcctgtccgaaaaacagtggaaggacaacgtgaatttagcctggagcatctctccctaccttgcagtgcaactgccagctcgcttcaaaaacaccgaggccattggcaacgaagtgactaggctcgtgcggctggaccctggggcagtgagcgacgtgccagaggccatcaagttcttggtgacatggcacaccattgatgcggacgcccccgagctttcccatgtgctgtgctgggcacctacagacccgcccactggtcttagttacttcagcagcatgtacccgccacaccccttgacagcacagtatggagtcaaagtactgcggtcatttccccctgatgccattctattttacattcctcaaattgtacaggctctcagatacgacaaaatggggtatgtgcgagagtacattctgtgggcggcttctaaatcccagctgctcgctcaccagtttatatggaacatgaaaactaatatttatttagacgaggaaggccatcagaaggatcctgacataggcgacctcctggatcaattagtcgaggagataacaggcagcttgagcggtccagcaaaggatttctaccaacgcgaatttgacttctttaataagattacgaacgttagtgcaatcattaagccatacccaaagggtgacgagcgcaagaaagcctgtctgtccgccctgtccgaagtcaaggtacagcccggctgctacttaccaagcaaccccgaggcgatagtattggatatcgattacaaatcggggacaccaatgcagagcgcagcgaaagccccatatttagcgaagtttaaggtcaaaaggtgtggcgtttctgaactggaaaaggagggccttcgctgtcggtctgacagcgaggacgagtgctctacacaagaggcagacgggcagaaaatcagttggcaagccgccatctttaaggtgggtgatgactgcagacaagatatgctggccttgcagatcattgaccttttcaaaaatattttccaactggttggacttgatttgttcgtcttcccttatcgtgttgtggccacagccccagggtgtggggtgattgagtgcataccggattgcacctcacgagatcagctgggtcgccagaccgacttcggtatgtatgattactttacaaggcagtacggagacgagtcaactctcgcgttccagcaggctcggtataacttcatccggtctatggccgcatacagcttgctgctgttcttactgcagattaaggacagacacaatggaaacattatgctcgacaaaaaagggcatataatacacatagacttcgggttcatgtttgaatcttccccagggggcaatctgggctgggagcccgacatcaagctaactgatgagatggtcatgattatgggtggtaagatggaggccacaccctttaaatggttcatggaaatgtgtgtgagggggtacttggcagttaggccttacatggacgccgttgtgtcccttgtgacactcatgttggacaccggcttgccctgtttcaggggtcagactatcaagctattgaagcatcggttcagtcctaacatgactgaacgtgaggccgctaattttataatgaaagtgatacaatcatgtttcctgagcaaccggagcaggacctacgacatgatccagtattatcagaacgatataccttactag

SEQ ID NO: 199173 - DNA, 1440 bp, synthetic construct
  misc_feature 1..1440: note = Description of Artificial Sequence: Synthetic coding sequence
  source 1..1440: mol_type = other DNA
atggacgagaccagccccctggtgagccccgagcgggcccagcccccggattatacatttccaagcggcagcggcgctcatttccctcaggtacctggcggagccgtacgggtcgcagctgctgccggatctggaccgtccccaccaggatcaccgggacatgatcgagaacgccagcccttgctcgatagagcacggggagctgctgcccagggccagacacaaacagtggcagcacaggcccaggcccttgcggcccaggccgctgccgccgcacacgccgcccaggcacatagagagagaaatgaatttcccgaggaccccgaatttgaagcagtggtccgacaggccgagctggctatagagcgctgcatattccctgagcgtatctatcaaggcagtagcggatcctatttcgtgaaagacccacagggacgaatcatcgccgtgttcaagcctaaaaacgaggagccatacggccatcttaatccaaaatggaccaagtggctgcagaaactctgttgcccatgttgcttcggtagggactgcctggtgctaaatcaaggatatctgtccgaggcgggcgcgtccttagtggatcagaagctagagctcaacattgtgccccgcacaaaagtcgtttatctggcctctgagactttcaattattccgcgattgaccgtgtgaagtccagaggaaagcggctggcactggaaaaagtgccaaaagtggggcaacggtttaatagaattggactgcccccaaaagttggatctttccagctctttgttgagggttacaaggatgccgactactggctgcgaagatttgaggcggagcccttgcccgaaaacacgaaccggcagctgctacttcagttcgagagactggtcgtcctagactacattatcagaaacactgataggggaaacgacaactggttgattaagtacgactgtcccatggatagcagcagcagccgtgatactgactgggtcgtggttaaggagcccgtcatcaaagtggcggctatcgacaacgggctggctttcccgcttaaacatccggactcatggcgcgcgtatcctttctactgggcatggctcccccaggcaaaggtccctttttcccaggagattaaggatctgatcctgcccaaaatttctgacccaaacttcgtgaaggacctcgaggaggacctttatgagctgttcaaaaaggaccctggctttgaccggggccagtttcataagcagatagccgtgatgagggggcagatccttaatctgacccaggccctgaaggacaacaaaagccccctgcacttggtccagatgcctcccgtgatcgtggagaccgccagaagtcatcaacggagcagcagtgaatcttacacacagagctttcaaagcaggaagccattcttcagctggtggtag

SEQ ID NO: 199174 - DNA, 1350 bp, synthetic construct
  misc_feature 1..1350: note = Description of Artificial Sequence: Synthetic coding sequence
  source 1..1350: mol_type = other DNA
atgctgggcccccaggtgtggagcagcgtgcggcagggcctgagccgttctctgagtcgcaacgtgggagtgtgggcctcaggagaaggcaaaaaggttgatatcgctggtatataccctcccgtaaccacccccttcaccgcaacggcggaggtcgactacggaaagttagaagagaacttacacaagcttggaacttttccctttcgtggggctgtcgggggcgtatgcgcgctcgcaaacgtgctgggcgcccaggtgtgtcagcttgagcggctttgctgcaccgggcagtgggaggacgcccagaaacttcaacatagattaattgagcctaacgctgccagaattattgctgtgtttaaacccaagaacgaggaaccctatggacatctgaatcctaagtggacgaagtggctgcaaaaattgtgttgtccttgttgctttggccgggactgcctcgtgctcaaccaggggtatctatccgaggccggcgcttccctggtggaccagaagctggagttgaatattgttccccgcacaaaggtggtgtacctagccagtgagacgttcaactacagcgccatcgacagagtaaagtcacgcggtaaacgtctcgctctcgagaaagtcccaaaggtcgggcaacgctttaatcgcatcggcttgcccccaaaggtcggaagttttcagctctttgttgagggatacaaggacgccgattactggctgagacggttcgaggcggagccactaccggaaaatacgaaccggcagttgttgctccagttcgagaggctggtggtgctcgactacatcattcggaacacagacagggggaacgataattggctcataaagtacgactgccctatggattctagtagctcgcgtgacaccgactgggtagttgtgaaggaacctgtgataaaggttgctgcaattgataacggacttgcctttcctctgaagcaccccgattcgtggagagcctaccctttctattgggcctggctgccgcaagccaaagtcccgttcagccaggaaatcaaagatctcatactgcctaagatctccgatcccaattttgtcaaggacctggaggaagatctctacgagttatttaagaaggatcccggctttgaccgcggacagttccacaagcagattgcagtgatgcggggccagattctcaacctcacacaggcccttaaggataacaaatcccctttacacttagtgcagatgcccccagtgattgtggagacagcgagaagccaccagcgaagcagctctgaatcatatactcagagtttccagtccaggaagccctttttctcgtggtggtag

SEQ ID NO: 199175 - DNA, 1446 bp, synthetic construct
  misc_feature 1..1446: note = Description of Artificial Sequence: Synthetic coding sequence
  source 1..1446: mol_type = other DNA
atggaggaccccagcgagcccgaccggctggccagcgccgacggcggaagccctgaagaggaggaagacggtgagcgagagccattgctgccccggatcgcttgggcacacccccgacggggcgctcccggaagcgcagtcaggctacttgatgccgcgggtgaggagggagaagctggggatgaggaattgcccctaccccccggggacgtaggggtgtctagaagcagctctgccgaactggacagatctcggcctgcggtgtcggtgacaattggtacctctgaaatgaatgcatttctggatgaccctgagtttgctgatattatgctcagagcggaacaggccatagaagttggaattttccctgaaagaatctctcaggggtcgagcggctcctactttgtcaaggaccctaaacggaagattatcggcgtcttcaagccaaagtctgaggaaccttatggtcagttgaatcccaaatggacaaaatatgtgcataaggtgtgctgtccatgttgctttgggcgaggatgtttgatccctaaccagggatatctgtccgaggccggggcctacctcgtggacaataagttacacttgagcatcgtacccaagacgaaagtggtgtggctggtgtcagagactttcaattataatgcaattgatagggccaagtcccgcggcaaaaaatacgctctagaaaaggttccaaaggtcggccgcaaatttcaccgtatcggactaccacccaagattggctctttccagctgttcgtagaagggtacaaagaagccgagtattggctccgtaagttcgaggcggaccctcttccagaaaatatccgtaagcagttccagtcacagtttgaaagattggtgattctcgactacataattagaaacaccgaccgaggaaatgacaactggctcgtacgttacgagaagcagaagtgtgagaaggaaatcgatcataaagagtccaagtggatcgatgatgaggaatttctgataaagatcgctgctatagataatggtctggcgttccctttcaaacatcctgatgaatggagagcctatcccttccattgggcttggctgccacaggcaaaggtccctttctcagaggaaattcgtaacctgattcttccatatatatcagacatgaattttgtgcaagatctgtgtgaagacctatacgagcttttcaaaacagacaaggggtttgacaaggcgacctttgaaagccagatgtccgtgatgaggggccagattcttaacttgacacaggccttgcgagatggtaagagcccatttcagctcgtccaaattccctgtgttattgtcgagaggtcgcagggagggtcccagggtcgtatcgtccatctcagtaatagtttcacccagacagttaactgtaggaaaccttttttctcctcatggtag

SEQ ID NO: 199176 - DNA, 1353 bp, synthetic construct
  misc_feature 1..1353: note = Description of Artificial Sequence: Synthetic coding sequence
  source 1..1353: mol_type = other DNA
atggaggaccccagcgagcccgaccggctggccagcgccgacggcggctccccagaggaggaagaagacggggagcgcgaaccactgttgccaagaatagcatgggcgcatccccggcggggggcccccgggtccgccgttaggctgctggatagatcccggccagccgtctctgttaccattggaaccagcgagatgaacgcctttctggatgacccggagtttgcagatatcatgctccgtgcagagcaggccattgaggtgggcatattccctgagcgtatctcacagggctcttccggaagctattttgtcaaggaccccaagagaaaaattatcggcgtgtttaaacccaagtcagaagaaccctacgggcagctgaacccaaaatggacaaaatacgttcacaaagtttgctgtccatgctgcttcggaagaggatgcttaattccaaatcaaggatatctgtctgaggctggtgcatatctggtagacaataagcttcacttatctatcgtgccgaagactaaggttgtttggctggtaagcgagacatttaactataatgccatcgatcgcgccaaaagccgcggaaagaaatacgctctcgaaaaggtgcccaaggtggggcgaaaattccaccggatcggtctcccaccaaagatcgggagcttccagctctttgtggaagggtacaaagaagctgaatattggcttcgcaaattcgaggctgaccctctcccagagaacattcggaagcagttccagtcccagttcgagagactcgttattctggattatataattagaaatactgatagaggaaacgacaattggctggtgaggtatgaaaagcagaagtgtgagaaggaaatcgatcataaagaaagtaaatggattgatgatgaagagttcctgattaagattgcagccattgataacggcctcgcctttcctttcaaacatccagatgaatggagagcgtatccattccactgggcctggctgcctcaggctaaggtacccttcagcgaggagattagaaacctcatccttccttacatttccgacatgaacttcgtgcaggacctttgcgaggatctttacgaactgttcaagacagataaaggcttcgacaaggccacattcgagtctcagatgagcgtgatgcgcgggcaaatactgaatctaacacaggcattaagagacggaaagtctcctttccagttggtgcagataccatgcgttatcgtggagaggagtcaggggggcagtcagggccgaattgtccatctgtccaattccttcactcaaaccgtgaactgcagaaagcccttcttctcaagctggtag

SEQ ID NO: 199177 - DNA, 6135 bp, synthetic construct
  misc_feature 1..6135: note = Description of Artificial Sequence: Synthetic coding sequence
  source 1..6135: mol_type = other DNA
atgtgccccgtggacttccacggcatcttccagctggacgagcggagaagagatgctgttatagctctgggaatattcttaattgaatccgacctgcagcacaaggattgcgtggttccctatctgttgaggctgcttaaaggcttgcctaaagtctactgggtcgaagaatccactgcccgtaaggggcggggtgccttgcctgtggcagagtcgttcagcttctgtctggtaaccctgctcagtgacgtggcttaccgggatccttcactccgcgatgaaatcctggaagtactgctgcaggtgctccatgtgcttcttggcatgtgccaggcactagagattcaggataaagaatacctctgtaaatatgccatcccatgtttgattgggatcagtagggcatttggtcgatacagtaatatggaggagagcctgctctctaaactgttcccgaaaataccaccccactccctccgcgtcctggaagaattggaaggtgtgcgcagacggtcctttaatgactttagatccatcctgcccagcaacctccttacggtctgccaggagggaacgcttaagaggaagacctctagcgtttccagtatttcccaggtgtctcccgaacgcggcatgcccccaccatctagccctgggggcagcgcctttcactattttgaagcttcatgcttgcccgacggcaccgccctggagccagaatattacttctctaccatcagcagctctttctctgtgagccccctcttcaatggtgtgacatataaggaattcaacatacccctcgaaatgctaagagagcttctgaacctggtgaagaaaattgttgaagaagctgtgctgaagagcctggatgcgattgtcgctagcgttatggaagccaatcctagcgccgacctttattatacaagcttctcagacccgctgtatctcacaatgtttaagatgctgagggacactttatattacatgaaggatttacctacatcattcgtcaaagagatacacgacttcgttttggaacagttcaacaccagtcagggagaactccaaaaaattttacacgatgctgatcgtattcataacgagctgtccccactgaaactcagatgccaagctaacgcagcctgcgtcgacctgatggtgtgggccgtcaaggatgaacagggggctgaaaatctatgcattaagctgtcagaaaaattgcagagcaaaaccagcagcaaggtaattattgcgcatctacccctgctgatctgctgcctgcaggggttaggccgcctttgcgaacgattccccgtggtcgtgcatagcgtgaccccaagcctgagggatttcttggtgatcccttcccctgtgttagtcaagttatacaaataccacagccagtatcacactgttgccgggaacgatataaaaatctccgtcacaaacgaacactccgaatcaacactcaatgtcatgtcaggtaagaaatcccagccttcgatgtacgagcagctgcgagacatagccatcgataatatttgccggtgcctcaaggccggacttaccgttgatccagttattgtggaggccttcctggcctccctgagcaacaggctgtacatatctcaggagtccgataaagatgcgcacttgattcctgaccataccatccgtgccttaggtcatatagctgtggccctcagagatacaccgaaagtgatggaacctattctccagatactgcagcagaagttttgccaaccaccttctccacttgacgtccttatcattgatcaattagggtgcctcgtgatcaccggtaaccaatacatctaccaagaagtctggaatctatttcagcagatttctgtgaaagcttcctccgttgtgtatagcgctaccaaggactacaaggaccacgggtatcgccattgcagtctagccgtgattaatgctctggccaatatagccgctaatattcaggatgagcacctagtggatgaacttttaatgaaccttctggagcttttcgttcaactcggcctggaaggaaaacgcgcctcagagcgcgcatcggaaaaaggccctgccctcaaggcaagcagctctgccgggaatctgggagtgctgatcccagtgatcgccgttctgacgcgtcgcctgccccccatcaaggaagcgaagccacgccttcaaaagctcttccgtgatttttggctgtatagcgtgttaatgggcttcgcagtggaaggctccgggctatggccagaagagtggtacgagggcgtctgcgaaatcgcaactaagtcacctttactgactttccccagcaaagaacccttgaggagtgtcctgcagtacaactctgctatgaaaaatgacacggtgacaccggcagaactgagcgaactaaggagtactatcattaatctgctggaccccccgcccgaggttagtgcgttgataaacaagttagattttgcaatgagcacttacttgctcagtgtttatcgtctggagtatatgcgagttctaaggtcaacagatcctgacaggttccaagtgatgttttgttatttcgaagataaggcaatccagaaggacaaatccggcatgatgcagtgtgtaatcgcagtcgccgacaaagtgttcgatgcgttcctcaacatgatggcagataaggccaaaaccaaggagaatgaggaagaattagagcgtcacgcccagttcctgctcgtcaactttaatcacatccacaaacggatcaggagggtggcggacaaatacttgagcggcctggtggataaatttccacacctcctctggtctggtacagtgctgaaaaccatgctggatatcctgcaaaccctgtcactttctttatccgccgacatacataaagatcagccgtactatgacatccccgacgctccctataggatcacggtccctgatacatatgaggctagagaaagcattgtcaaggatttcgcggctcggtgtgggatgattttgcaggaagccatgaaatgggcaccaaccgttacaaagtcacacctgcaagagtaccttaataagcatcagaattgggttagcggtctctcccaacacactgggcttgctatggctactgagtctattcttcattttgccggttataacaaacagaacactacactgggtgctacacagctgtcagagcgtcccgcctgtgtgaagaaggattattctaacttcatggcctcgctcaacctgcgcaatcgctatgccggagaggtgtatggtatgatccgtttttcaggtaccaccggccagatgtctgacctcaataaaatgatggtccaggacctgcacagcgcgctggatcgcagccacccgcagcactacacccaggccatgtttaagttgaccgcaatgctaataagttcaaaagattgcgacccacagttgttacatcacctttgttggggtcctctgaggatgttcaatgagcacggcatggagaccgctctcgcctgctgggagtggctgctggctgggaaggacggggtcgaagttcccttcatgcgggagatggcgggagcttggcacatgacagtggagcaaaaattcggtctattctcagccgagattaaggaggcagacccattggcagcgagtgaagcctcccaacctaagccttgcccacccgaagtgacaccccactacatctggatagatttcctggtccagcggtttgagattgctaagtactgctccagtgatcaagtcgagattttcagcagccttctgcagcgctcaatgtccctcaatatcggcggagctaaggggagtatgaatagacatgttgccgccattggtcctcggtttaaattattgaccctgggtcttagcctgctgcacgctgatgtcgtgcccaacgctaccatccgaaacgttctgagagaaaaaatttactcaaccgcgttcgattacttctcttgccctccaaagtttccaactcagggtgaaaagcgtctccgcgaagacatctccataatgatcaaattttggaccgctatgttttccgacaaaaagtacctgaccgcctcacagctggtcccgcctgataaccaagatacacggtccaaccttgacatcaccgtcggctcgaggcagcaggcaacccagggttggattaacacctacccattgagcagcgggatgagcacaataagcaagaaatctggcatgtcaaagaaaactaatcggggttcccagctgcataagtattacatgaagcgacgcactctgctgctgagtctcctggccaccgaaatcgagcggttaattacgtggtacaatccgctgtcagctcccgaattagagctggaccaggcaggcgagaactcggtagccaattggcgcagtaaatacatcagcctctccgaaaaacagtggaaagataacgtcaacttggcatggtccatttccccatatcttgcagtgcagctgcccgcgagatttaaaaataccgaagcaatcggcaacgaagtgaccaggctggttcgactcgatcccggtgctgttagtgacgtgcctgaagccatcaagtttctagtgacgtggcacactattgatgctgatgctcctgaacttagccacgtcctgtgctgggcacccacggatccacctacagggctgtcgtatttcagctccatgtatcctcctcacccacttacagctcagtatggggtaaaggtgctgcggtctttccctcctgatgctatcctgttttatattccacagattgttcaggcactgagatacgacaaaatgggatacgtccgagagtacatcctgtgggccgcttctaaatcgcagctgctggcccaccagtttatctggaacatgaagacaaatatatatctagacgaggaaggacaccaaaaggatccagatatcggggacctgctggatcagctggtagaagagattactggcagcctttccgggccagctaaggacttttaccagagagagtttgattttttcaataagattacaaatgtctctgcaatcattaagccatacccaaaaggggacgagagaaagaaagcatgcctctcagcactgtccgaggtcaaggttcagcctggctgctatctaccatccaatcccgaggcaatcgtcctggatattgactataagtctgggacgcccatgcagagtgcggctaaggccccatacctggcgaagttcaaagtcaagcgttgcggtgtgtcggagctggagaaggaaggactcagatgccgctctgacagcgaggatgagtgctccactcaggaggccgacggtcagaagattagctggcaggccgctattttcaaagtgggagatgattgccggcaggacatgctcgctctccagatcattgacctgttcaaaaatatattccagctcgttggcctggatctcttcgtctttccttacagggtagtcgcgacagctcctggttgtggtgtgatagaatgcattcccgattgcacgagtcgcgatcagcttgggcgacagacggactttggaatgtacgactattttactcgccaatacggtgacgagtcaacgctggcatttcagcaggcaagatataactttatccggagtatggccgcctatagtcttttactcttcttactccagattaaggatcgccataatgggaatatcatgcttgataagaaaggacacataatccacatcgacttcggctttatgtttgagagttccccgggcggcaatctcgggtgggagccggatataaagcttacagacgagatggtcatgatcatggggggaaagatggaggctactcctttcaagtggtttatggagatgtgcgtcaggggttatctcgcagtacgaccatatatggatgccgtcgtgtctttggtgaccctgatgttggatacgggactcccatgctttcgcggacagacaatcaagctgctgaagcatcgatttagcccaaacatgactgagcgggaagccgctaatttcatcatgaaagtgatacaaagctgcttcctttccaatcgctctcggacatatgatatgatacagtattatcaaaatgatatcccctattag

SEQ ID NO: 199178 - DNA, 2565 bp, synthetic construct
  misc_feature 1..2565: note = Description of Artificial Sequence: Synthetic coding sequence
  source 1..2565: mol_type = other DNA
atgcgggagatggccggcgcctggcacatgaccgtggagcagaagttcgggctctttagcgccgaaataaaagaggcagaccctcttgccgcatcagaggcttcccagcctaagccctgccctccagaagtgaccccccattacatctggatcgactttttggttcaaagattcgagattgcaaagtactgttcctcagatcaagttgagatcttcagcagtctcttgcagcgttctatgagtctaaatataggtggtgctaagggatcaatgaacaggcacgtggccgcaatcggcccacgctttaagttactgacgctggggctgtccctgctgcacgccgatgtggtgcccaatgccacgatacgcaacgtgctgcgagagaagatctatagcaccgcttttgactacttttcctgccctcctaagtttccaacacaaggcgagaaaagactgagagaggatatcagcatcatgataaagttttggaccgccatgttctcagacaaaaaatatctgactgcctcacagctggtgccacctgacaaccaggatactcggtcaaatctggacataaccgtgggatccaggcagcaggctactcaggggtggattaatacatatcctcttagtagcggtatgagcaccatctctaagaagagcggaatgtccaaaaagacaaaccgcggatcccaactgcacaagtattacatgaagcgacgcacactgctcttgagcctgttagccacggagatcgagcgtctcattacatggtacaacccactgtccgcccctgaactggaactggatcaagccggcgaaaatagcgttgcaaactggcggagtaagtacatttcactgtccgagaagcagtggaaagacaatgtcaatctggcttggagtatttcaccgtatctagccgtgcaactccccgcccgcttcaagaacactgaggccattggcaacgaagtcacgagattggttagactggatcccggggcagtatcagacgttcctgaagccattaaatttctggtgacatggcatactatcgatgccgatgctcctgaattgtcacacgtgctctgttgggcacccaccgatccgcctacaggcctatcctatttctcgtccatgtacccccctcacccactcacggcacagtatggggtgaaggttctgagatcctttcccccggacgccatcctgttttatatcccgcaaatcgtgcaggcattacgatatgacaagatgggatatgtaagggaatatatcctttgggctgcgtctaaatctcagttgctggctcaccagtttatttggaacatgaaaaccaatatctatctagatgaggaaggtcatcagaaggaccctgacatcggggacctgctcgatcaattggtcgaagagataacgggcagtctgagcggtcccgcgaaagacttttatcagagggagttcgacttttttaacaaaatcacaaacgtgtccgcaatcattaagccttaccctaagggcgacgaaaggaaaaaggcttgcctttcggccctatctgaagtgaaggtgcagccaggctgctacttaccaagcaaccccgaggccattgtcctcgatattgattacaagtctggtacgccaatgcagagcgctgccaaagccccctacctggccaagttcaaggtgaaacggtgtggagtatcagaattggagaaagaggggctgagatgtagatccgatagtgaggacgagtgctccacccaggaggctgacggtcagaagatttcgtggcaggccgcaatattcaaggtgggcgatgactgtcgccaagatatgctggctctgcagataattgacttgtttaagaacatctttcagctggtgggattggacctgttcgtgtttccgtacagagtggtggccaccgcgcccggttgtggggtgattgaatgcattcctgattgtacttctcgcgaccagctggggcgacaaaccgactttggaatgtatgactatttcaccaggcaatatggggacgagtccacacttgcattccaacaagctaggtacaattttattcggtcaatggctgcctatagcttgcttctgtttcttctgcagatcaaagacagacacaacggaaacataatgctggataagaagggtcatattatccacattgacttcgggtttatgttcgaaagctcccccgggggcaacctcgggtgggagcccgacattaagctgacagatgagatggtgatgataatgggaggaaaaatggaagccactccctttaaatggttcatggaaatgtgtgtgaggggctacctggcggtccgcccatatatggacgctgtggtgtccctcgtcactctcatgctggataccggcctgccttgctttcgcggccagaccattaagctcctgaagcatcgcttcagtcctaatatgactgaaagggaagcagccaatttcattatgaaggtgatccagtcttgcttcttgagcaataggagccgaacctatgacatgatacagtactatcagaatgatatcccatattag

SEQ ID NO: 199179 - DNA, 264 bp, synthetic construct
  misc_feature 1..264: note = Description of Artificial Sequence: Synthetic coding sequence
  source 1..264: mol_type = other DNA
atgtgccccgtggacttccacggcatcttccagctggacgagcggcgacgcgacgcggtgatcgcgctcgggatcttccttattgagagtgacctgcagcacaaggactgtgtggtgccatatctgctccgactgcttaagggtctgcctaaggtatactgggtcgaggagtcgactgccagaaaaggtcgcggcgcccttccagtagctgagtcattcagtttctgcctggttactttactgtccgatgtggcctaccgctag

SEQ ID NO: 199180 - DNA, 1959 bp, synthetic construct
  misc_feature 1..1959: note = Description of Artificial Sequence: Synthetic coding sequence
  source 1..1959: mol_type = other DNA
atgagcggccagagcctgaccgaccggatcaccgccgcccagcactccgtgaccggatcagcggtcagtaagaccgtgtgtaaagctaccacacatgagattatgggacccaaaaagaagcatctggattacctcattcagtgtaccaatgagatgaatgtgaacattccacagttggcagactccctgttcgaacggacaacaaattccagttgggtggtagttttcaaaagtctcattacaactcaccacttaatggtttacggaaacgaaagatttatacagtatctggcttcaagaaatactctgtttaacctgagcaactttctggacaaatccggcctccagggctacgacatgtctacgtttatccgcagatactccaggtatttaaacgagaaggccgtgagttatcggcaggtcgcttttgacttcactaaggttaaaaggggcgccgatggcgtgatgaggaccatgaatacggagaaactgctgaagaccgtgcctatcatccagaaccaaatggacgccctcctggactttaacgtgaacagtaacgagttaactaatggggtgataaatgccgccttcatgctacttttcaaagatgcaattcggctatttgctgcctataacgaggggatcattaaccttctggagaagtattttgatatgaaaaaaaatcagtgtaaagaaggcctggacatctacaagaagttcctgacccggatgactcgaatatcagaatttctcaaagtagccgagcaagtgggcatcgaccggggagatatcccagaccttagccaggctcctagcagtctgttagatgcgctggagcagcacctcgccagccttgagggaaagaagatcaaagactctactgccgctagcagagccacaaccctgagtaatgcggtgtcgtccctggcaagcacagggctttcgttgactaaggttgatgagcgtgaaaagcaagcagccctcgaggaagagcaggctcgtctcaaggccctaaaagagcagagattgaaggaactagcaaagaagcctcacacatcgctgacaaccgctgcttcaccagtctcgacttccgccggcggcattatgaccgcacccgcaatcgacatcttttctacaccatcatcttccaattccacgtctaagttacccaatgacctcctggaccttcagcagccgaccttccaccccagtgtacaccctatgagtacggccagccaggtcgctagtacatggggggatcccttttcagcgacagttgatgccgtcgatgatgctataccctccctaaaccccttccttacgaaaagctccggggacgtgcacttatctatttcgtccgacgtgtctacattcacaactcgcactccaacacacgaaatgttcgtgggatttactccttcccctgtggcacagccgcacccctccgccggactcaacgttgacttcgaaagcgtgtttggaaacaaatcaaccaacgtgatagtcgatagcggcgggttcgacgaacttggcgggctgctaaaacccaccgtcgcttctcagaatcagaacctcccagtggccaagctgccccccagtaaattggtgtccgacgaccttgactcctccctcgccaacctggtggggaacttgggaatcggtaatggcacaactaaaaacgatgtgaactggtctcaacctggagagaaaaagctgacagggggcagcaactggcagccaaaggtcgcccccactactgcctggaatgctgctacaatggctcctcccgtcatggcatatcctgctaccacccctacaggaatgataggctatggaattcctccacagatgggcagcgtccccgtaatgacccaacctacattaatctattctcagccggtcatgcgccctcccaatccatttggtccagtatccggggcccagatccagtttatgtag

SEQ ID NO: 199181 - DNA, 1959 bp, synthetic construct
  misc_feature 1..1959: note = Description of Artificial Sequence: Synthetic coding sequence
  source 1..1959: mol_type = other DNA
atgagcggccagagcctgaccgaccggatcaccgccgcccagcactccgtgacaggcagtgccgtctcaaagacagtgtgtaaagccacaactcacgaaatcatgggacccaagaaaaaacacttggattacctaatccagtgcactaacgaaatgaatgtgaatattcctcagttggcagattcactcttcgagcgaacgaccaactccagctgggttgtggtctttaaatctctaatcactacgcatcacctgatggtgtacggcaacgagcgattcatccaatacctggcatcccggaacactctgttcaatctgtcaaattttctcgataagagtggactgcagggctatgatatgtcaacatttattagacggtattcccgctacctgaacgagaaggccgtgtcctaccgccaggttgcatttgactttaccaaggtcaaaaggggggcagacggtgtcatgcgcactatgaatacagaaaaacttctgaagactgtgccaatcattcagaaccagatggatgctctgcttgacttcaacgtgaattctaacgaactcactaacggagtgattaatgctgcttttatgctcctgtttaaggacgcaatacgcctgttcgctgcgtataacgaaggaatcattaacctacttgagaagtacttcgacatgaagaaaaatcagtgcaaagaagggttggacatctataaaaaattcctgacgagaatgacaaggatctcagaattcttgaaagtcgcagaacaggtagggattgacagaggcgatattcccgacctcagccaggccccgtcctctttgctggacgctcttgagcagcacctagcctcattagagggtaagaaaattaaggattctactgccgcgtcacgagcgacaacactcagcaacgccgtgagctccctggcaagtacaggcttgtctctgactaaggtggatgagagagaaaagcaggccgctctcgaggaagagcaagctaggcttaaagctttgaaagagcagagactgaaggagttggctaaaaagccgcacacctcgttgaccactgctgccagtcctgtgagcacctctgccggcgggattatgaccgcaccggccattgacatattttccacaccatcttcctcaaacagcacaagcaagctgcctaacgatctgctggaccttcagcaaccaacatttcatccatctgtccatccaatgtccacagcatcacaggtggccagtacatggggagatcccttttcagctactgtggacgccgtcgacgatgccatccccagcttgaacccattcctgactaaatcttctggcgatgtacacctatcgatttcgagcgatgtgagcaccttcactactcgcaccccaactcatgaaatgttcgttgggttcacgcctagcccagtcgcccagccccatccatccgctgggctgaatgtggatttcgagagcgtatttggcaacaagtccaccaatgtgatcgtggattcaggggggtttgatgaactaggcggtctcttgaagcctacagtggctagtcagaaccaaaacctgccagtagctaagctccccccctcgaaactggttagcgatgacttggacagcagtttagccaatctcgtgggcaacctagggatcggaaacgggaccacgaagaatgatgtgaattggagtcagcccggggaaaagaagctgaccggcggctctaactggcagccaaaggtggcccccaccacggcgtggaatgccgccactatggctcctcccgtcatggcatatccagccaccacacccactggaatgatcggctacgggataccaccacagatggggagtgtgcctgtgatgacccaaccaacgctgatctattcgcaacccgtcatgagaccccctaatccctttggccccgtctccggagcgcagatccagtttatgtag

SEQ ID NO: 199182 - DNA, 1938 bp, synthetic construct
  misc_feature 1..1938: note = Description of Artificial Sequence: Synthetic coding sequence
  source 1..1938: mol_type = other DNA
atgagcggccagagcctgaccgaccggatcaccgccgcccagcacagcgtgaccgggtctgcagttagtaagactgtgtgtaaggccacgacccatgagatcatgggacccaaaaagaaacacctcgactatctgattcagtgcacaaatgagatgaacgtgaatattcctcagctcgccgatagtctctttgagcggactactaacagttcttgggttgtcgtattcaaaagtctcattacaacccatcacctgatggtgtatggcaacgaaaggtttattcagtacctcgcgtcaagaaacacacttttcaatctctctaattttctggataagtctggtttacagggttatgatatgagtacgtttatccgacggtactctcggtacctgaatgaaaaggctgttagttataggcaggtggcttttgatttcaccaaagtcaagcgcggggccgacggggttatgaggaccatgaataccgagaaactcctcaaaacagtgcctattattcagaatcagatggacgccctgctggatttcaatgttaattccaacgaactcaccaacggagtaattaatgccgctttcatgttattattcaaggacgcaatcagattatttgccgcctacaacgagggcataatcaatttactggagaagtattttgatatgaagaaaaatcaatgcaaagagggcctggatatttataagaagtttctcacaaggatgacacgaatttcagagtttctcaaggtcgccgagcaggttgggatagataggggagacattccagacctcagtcaggcacctagctccctgttggacgcgttggaacagcaccttgctagcctggaaggcaagaagatcaaagattcaaccgcagcttccagggctacgacactcagcaacgccgtttcatcactggcgtcaactgggctgtctctcactaaagtggacgagcgagagaagcaggccgcactcgaagaagaacaagctagactgaaggcccttaaggagcagcggttgaaagagctggccaagaaaccccatacatccctgacgaccgctgccagcccagtcagcacctctgctggcggcatcatgaccgccccagcaatcgatattttcagcaccccatcctcgtccaacagtactagcaagctgccaaacgatttgttggacttacagcagcccacgtttcacccttccgtgcaccctatgagcactgcatctcaggtggccagtacatggggcgatgcggtggacgacgccatcccgagccttaatcctttccttaccaagtcctctggagatgtgcatctgtctatttccagcgatgtaagtaccttcactacaaggacgcctacgcacgaaatgttcgtcggcttcaccccgagccctgtggcacagccccacccttccgccggcctcaacgtcgactttgaatccgtcttcggcaataagagcaccaatgtcatagtggatagtggcggatttgacgagctcggcgggctgttaaagccaactgtggcctcccagaaccaaaacctgcccgtggccaagctccctccctcaaaactggtgtccgatgatttagattcatccctggctaatctggtaggtaacctgggtattgggaatggcaccacaaaaaacgacgtgaactggagtcagccaggtgaaaaaaaactcactggaggtagtaattggcaaccaaaggtggcaccaactacagcctggaatgccgctaccatggccccccccgtcatggcatatcccgccacaactcctactggaatgatcggatacgggattccgccccagatggggtctgttccggttatgacacagcctacactgatctattcgcagcccgtgatgcgaccaccaaatccattcggtccggtttccggagctcagatccaattcatgtag

SEQ ID NO: 199183 - DNA, 1833 bp, synthetic construct
  misc_feature 1..1833: note = Description of Artificial Sequence: Synthetic coding sequence
  source 1..1833: mol_type = other DNA
atgagcggccagagcctgaccgaccggatcaccgccgcccagcacagtgtgacaggctcagcggtctcgaaaacggtctgcaaggccacaacccacgagatcatgggccctaagaaaaagcatcttgactacttgattcagtgtaccaatgaaatgaatgttaatataccacagctcgcagattcactgttcgagcgaactacgaatagctcatgggtagtggtcttcaaatcgcttatcaccactcaccaccttatggtctacggcaacgaaaggttcattcagtacctcgccagcaggaatacgcttttcaacctaagcaactttttggataagagcggactgcagggctatgatatgtctacctttatacgtcggtactctaggtacctgaacgagaaggcggtgagttacaggcaggtggcctttgatttcacaaaagtaaaacggggagcagacggcgtgatgcgaacgatgaatacagagaaattgctcaaaaccgtgcccatcatccagaaccagatggacgcattactcgacttcaacgtaaattcaaatgaattgacaaatggggtaatcaatgctgcctttatgctgttattcaaggatgcaatccgtttatttgccgcctacaacgagggcattattaacctcctggaaaaatatttcgatatgaagaagaatcaatgtaaagaaggtttagatatctacaagaagttcttgactcggatgacaaggatctctgaattcttgaaggtagcagaacaagtaggtatcgaccgaggcgacataccagatctgtcacaggctccctctagcttacttgacgcactagagcagcacctcgcctctctagaaggaaagaaaatcaaggattccacggccgcatctagagccaccacgttgtctaatgccgtgtcaagcctcgcatccactgggctgtccctgaccaaagtagacgaaagggaaaaacaggcagcacttgaagaggagcaggcacggcttaaagctctgaaggaacagcgcctgaaagagctcgcaaagaaacctcacacttctctgaccacagctgccagtcctgtttctacgagtgccgggggcataatgaccgcccctgcgatcgacatcttctctacaccttcctcttctaatagcacctccaagctgcctaacgatttgcttgatctccagcagcccacatttcacccgtcagtccaccccatgtcaacagcaagccaggtggcctctacttgggggggttttaccccctctcccgtagcgcagcctcatccatcagctggcttgaatgtcgactttgagagcgtattcggtaacaaaagtacgaatgtgatagttgattctggcggattcgacgaactgggtggcttactgaaaccaacggtggccagtcagaaccagaatctccctgtcgctaaactccccccttccaaactagtgagcgatgacctcgacagcagtctggccaacctggtagggaacctggggatagggaacggaaccactaaaaatgacgtgaactggtctcaacccggcgaaaaaaagcttaccggtggaagcaactggcagccaaaagtcgcccccaccactgcctggaacgccgcgaccatgaatggcatgcactttcctcagtacgccccccccgtcatggcatacccagccacaacacccaccggcatgatcggttacggaatccctccccagatggggtcagtgccagtcatgacacagccaacactcatctatagccagcccgtgatgcgacctcctaacccattcggtccagtcagcggagcacagatccagttcatgtag

SEQ ID NO: 199184 - DNA, 1656 bp, synthetic construct
  misc_feature 1..1656: note = Description of Artificial Sequence: Synthetic coding sequence
  source 1..1656: mol_type = other DNA
atgaacgtgaacatcccccagctggccgacagcctgttcgagcggactactaacagcagctgggtcgtggtgtttaaatccctaatcacaacccaccaccttatggtatacggcaatgaaagatttatccagtatctggcatcacgaaatactctgtttaatcttagcaacttcctggataagtcaggcctacaaggctacgacatgtccacattcatcagacggtactctcgctacttgaacgaaaaagccgttagctacaggcaggtggccttcgactttacgaaggttaaacggggcgcagatggcgtaatgagaacaatgaataccgagaaactcctaaaaactgtcccaataatacagaatcagatggacgccttgctagacttcaatgtaaacagtaacgagctgactaatggggttattaatgctgcctttatgctgctgtttaaggacgctatccgcctatttgcagcgtataacgagggcatcattaacctgctggagaaatactttgacatgaaaaagaatcagtgcaaagagggtttggatatctataaaaagtttctgactcgcatgaccagaatatccgagttcctcaaggtggccgagcaggttggtattgacagaggtgacattccagatctgtctcaggcaccatccagtctgctggacgctcttgaacagcacctcgcgtcactagagggcaagaagatcaaggacagcacagccgcttcgagagctactactctttcaaatgctgtgtcgtccctcgcttccacagggctgagcttgacaaaggtggatgagcgggagaagcaagccgccttggaggaggagcaggcccgcctgaaagccttaaaggaacaaaggctcaaggagctggccaaaaagcctcacacgtctctgaccactgctgcatccccagtgtctacttcggcaggcgggatcatgactgcaccagctatcgatatcttttccacgcctagctctagcaacagtacctccaagctgcccaacgacctgttagacctgcagcagcctacgtttcaccctagcgttcatcctatgtctaccgcatcccaggttgcttctacttgggggggattcactcctagtccagtggcccagccccaccctagtgccggcctgaacgtggatttcgagagcgttttcggaaataagtctacaaacgtgatcgttgattcaggtgggttcgatgagttaggcggcctgctgaaaccaactgtggcgtcccagaatcagaatctcccggtcgccaagctacctccttccaagctggtgagtgatgacttggactctagtctcgccaatctggtcggcaatttagggatcggcaatggcactacgaaaaatgatgttaactggtcacaacctggcgaaaagaaactgacaggcggttccaactggcagccaaaagtggccccgaccacagcctggaatgcagccacaatggctccccctgtgatggcttacccagccacaacccccacggggatgatcgggtatggcattccccctcagatgggttccgtccctgtgatgactcagccaactctaatttactcccagcctgttatgagaccgccaaacccgttcgggcctgtgagcggtgcacagatacaatttatgtag

SEQ ID NO: 199185 - DNA, 1455 bp, synthetic construct
  misc_feature 1..1455: note = Description of Artificial Sequence: Synthetic coding sequence
  source 1..1455: mol_type = other DNA
atggcctgccggggcggcgccggcaacggccaccgggccagcgccaccctgtcacgtgtgtcccctggttctctgtacacctgccgaacccgaacacataacatttgcatggtgtctgatttcttctatcccaacatgggcggagtcgagtctcacatttaccagctgagtcaatgcctgatagagcgtgggcacaaggtgataattgtgacccatgcatacggcaaccgtaagggcatacggtatctgactagcggtctcaaagtctattacctgccactaaaggtgatgtataatcagtctacagctaccacactcttccatagcctgcccctgctccggtacatatttgtgcgggaacgcgtgacaataatccattcccatagctcgtttagcgcaatggcccatgatgcattattccatgcaaagaccatggggctccaaaccgtatttacagatcactccttgtttggtttcgccgatgttagttctgtcctcactaacaagttgctaactgtctcactttgcgatacgaaccatattatatgcgtgtcatatacctccaaggagaacactgttctcagggccgcccttaacccagagatcgtgtccgtgattcctaacgcagtagatcccactgattttacccctgacccatttagacgccatgactccataacaatcgtggtggtttctcgcctggtgtacaggaaaggaatcgatttactctccggcattataccagaactctgccagaagtatcccgacctaaattttatcatcggtggtgagggcccaaagcgaatcattctggaggaggtgagggagcgttaccagctgcatgatagagttaggctcctgggcgccctcgagcacaaagatgttagaaatgtgctggttcagggccacatcttccttaacacaagcctcaccgaggccttttgtatggcaattgtggaggcagcctcatgcggtctgcaggttgtgagtacaagggtgggagggattccagaggtgctccctgaaaatctaatcatcctgtgtgaaccttccgtcaaaagtctctgcgagggtctggagaaggcaatctttcagctcaaatctggcaccctgccggcgcctgaaaatatacacaatatcgttaaaactttctatacttggcgtaatgtagcggagaggacggaaaaagtatacgaccgagtgagtgtcgaagcagtattgccaatggacaagcggttggaccggctaatatcgcattgcggtcctgtgacgggatatatctttgcgctgttagccgtgtttaattttctgtttctgatttttctccgctggatgacacctgatagcatcatcgatgtcgccattgacgctaccggtcctagaggtgcctggaccaataactattctcacagtaaaagaggaggggaaaacaacgaaatctctgaaaccagatag

SEQ ID NO: 199186 - DNA, 510 bp, synthetic construct
  misc_feature 1..510: note = Description of Artificial Sequence: Synthetic coding sequence
  source 1..510: mol_type = other DNA
atggccatcgtggaggccgccagctgcggcctgcaggtggtgagcactcgcgtcggcgggataccagaggtcctccctgaaaatctcatcattctgtgcgaacccagtgtgaagtcactgtgtgagggattggagaaggcaattttccagttgaaaagtggcaccctccctgctccggagaacatccacaacatcgtcaagacattttacacctggagaaatgtggcggaacgtacagaaaaagtatacgatcgggtcagcgtggaagccgttctcccgatggacaagaggctggacagactgatctcacattgcgggccagttaccggctacatttttgccctgctagccgtgtttaacttcctgttcctcatctttttgcggtggatgacgccggattcgatcattgatgtggctatcgacgccaccgggcccaggggggcctggaccaataactactcccatagtaagagaggaggcgaaaataacgaaattagcgaaacccgttag

SEQ ID NO: 199187 - DNA, 753 bp, synthetic construct
  misc_feature 1..753: note = Description of Artificial Sequence: Synthetic coding sequence
  source 1..753: mol_type = other DNA
atggagctgaccggcatcgacctgctgagcggcatcatccccgagctgtgccagaaatatccagatcttaactttattattggcggtgagggacctaagaggatcattctcgaagaggtgagggagagataccaactgcatgacagagtgcgcctgctgggcgccctggagcataaggatgtgaggaacgtgctggtgcaagggcacatcttcctgaacaccagtttaaccgaggccttttgcatggccattgtcgaggccgcgagttgtggtctgcaggttgtatcaactagagtgggtgggatccccgaggtgctacctgagaacctgattatcctttgtgagccaagtgtcaaaagtctctgcgagggtctggaaaaggccatttttcagttaaaaagcggcacccttcccgcacccgagaacatccacaacatcgtgaagacattttacacctggcgcaacgtggccgaacgcactgagaaagtctatgaccgggtgtccgtcgaggcagtgctcccaatggacaaaagactcgatagattgatttcacactgcggcccagttacgggatatatctttgcactcttagccgtgtttaattttctgttcctgattttcctgcgttggatgactcccgattcaatcattgatgtggccattgacgccactggacccagaggcgcttggactaacaattacagccacagcaagaggggaggcgaaaacaatgaaattagcgaaacaagatag

SEQ ID NO: 199188 - DNA, 1665 bp, synthetic construct
  misc_feature 1..1665: note = Description of Artificial Sequence: Synthetic coding sequence
  source 1..1665: mol_type = other DNA
atgcggcggcccctgagcaagtgcggcatggagcccggcggcggcgacgcatccctcacgttacacggactccagaacaggtcacacggaaagattaagctgagaaaacgtaagtcgaccctgtactttaatacgcaggaaaaatccgccagaaggaggggagacctcttaggggagaatatctatctgttgctatttaccatagctctacgcattctcaactgtttcctggttcagacctcctttgtgcccgacgagtactggcagtcgcttgaagtatcccatcacatggtcttcaattacggctatctcacgtgggaatggacggaaaggctcagatcctatacgtacccactgatctttgctagcatttataaaattctgcacctcctgggaaaagacagcgtgcagctcctcatatggatcccacggttagcgcaggcactgctgagtgcagtggccgacgtgagactgtacagcctgatgaagcaattggaaaaccaagaggtggcccggtgggtgttcttttgtcaactctgttcatggttcacttggtactgttgtactaggactctcactaatacaatggaaacggtcctaacgataattgccttgttctactaccctttggagggcagcaagagcatgaatagtgtgaagtattcctccctggtggcgctcgctttcattataaggccaacagctgtaattctctggacacccctcctgttcaggcacttctgccaggaacctagaaagctggatctgatcttgcaccactttctacctgtgggatttgtgaccttgtcactatccctgatgatcgacaggattttcttcggacagtggaccttggtacagtttaacttccttaagtttaatgtccttcagaactgggggaccttctatgggagccacccatggcactggtatttctcgcagggattcccagtcattttggggacccacctgccgttttttatccatggctgttacctcgcacctaaaagataccggattctgttggtgacagtgttgtggacactcttggtgtactctatgctcagccacaaggaattccgatttatctacccggtgttgccattctgtatggtgttctgcggctactccctgacccatctgaagacctggaaaaaaccagcactgtcttttttgttcctgtctaatttgttccttgcactctacacaggacttgtgcaccagagaggaactctggacgttatgtctcatatccagaaggtgtgctataacaatcctaacaagagtagtgcatccatcttcatcatgatgccctgccactccacaccctactactcccacgtccactgtcctctgccaatgagattcctccagtgtccaccggatttaaccgggaaatctcattatctggatgaggccgacgttttttatttaaatcccttgaattggttacatcgggagttccacgacgatgcatctctgccaacacacctgattacattttcaatcctggaggaggaaatctctgcttttttgattagctctaactataagcggactgctgttttcttccacacccatctgccagaggggcgcatagggtcacatatctatgtatacgagagaaaattgaagggcaagttcaacatgaaaatgaagttttag

SEQ ID NO: 199189 - DNA, 1080 bp, synthetic construct
  misc_feature 1..1080: note = Description of Artificial Sequence: Synthetic coding sequence
  source 1..1080: mol_type = other DNA
atggagaccgtgctgaccatcatcgccctgttctactaccccctggaggggagcaaatctatgaatagtgtaaagtattcttccttagtcgctctggcatttattatccgacccacagccgtgattctgtggacacccctcttgttcagacacttctgccaggagcctagaaaactcgacctgattctacaccatttcctccctgtgggttttgttaccctaagcctctctttgatgatcgacagaatcttctttggccagtggacacttgtgcagtttaatttccttaagtttaacgttctgcagaactggggaaccttctacgggagtcacccttggcactggtacttttctcagggcttcccggttattctggggacccacctgcccttcttcatccacggatgctatctcgcacccaagaggtataggatcttgctggtcaccgtgctctggaccctgcttgtgtacagcatgcttagccacaaggagtttcgctttatatatcccgtactgccgttttgcatggttttctgcggatacagcttgacccatctaaagacctggaagaagcctgctctcagcttcttgtttctgtcaaatctgttccttgccctgtacactggcttagtgcaccagcgcggcaccttagacgtgatgtctcatattcaaaaggtctgttataataaccctaataagtcttcagcgtccattttcatcatgatgccatgccactccaccccctattactcacacgtgcactgcccgctcccgatgagattcttacagtgtcctccggatctgactggtaagtctcactacctggatgaagccgacgttttttatctcaatcctcttaattggctccacagagaattccacgatgatgccagtctgccgacccatctgataaccttctccatactcgaagaggaaattagcgctttccttatcagctctaactataagcgaaccgccgttttcttccatactcaccttccggagggacggattgggagccacatttacgtgtacgaaaggaaactgaaagggaagttcaatatgaaaatgaagttctag

SEQ ID NO: 199190 - DNA, 894 bp, synthetic construct
  misc_feature 1..894: note = Description of Artificial Sequence: Synthetic coding sequence
  source 1..894: mol_type = other DNA
atgtacgcccagcccgtgaccaacaccaaggaggtgaagtggcagaaggtgttgtacgaaagacagccttttccagacaactacgttgatagacgctttctcgaggagctgcgcaagaatatccatgcgagaaagtaccagtattgggcagtggtgttcgaaagttccgttgtaattcaacagttatgctcagtctgtgttttcgtcgtgatttggtggtatatggatgagggcctgcttgcgccccactggctactgggcacaggtcttgcgtcatcgctgatcggttacgttctatttgacctaatagatggaggggaagggaggaagaaatctggccaaacaagatgggcggacctgaaaagcgctctggtgttcattacattcacctacggatttagtccggtgcttaagactctgactgaatccgtttcaacagacactatatacgcgatgtccgtgttcatgctgctcggccatctgatctttttcgactatggagctaatgcagctatcgtctcatcgactctctctttgaatatggccatcttcgcttccgtttgcctggcaagcaggctgcctaggtccctccacgcattcataatggtaaccttcgccattcaaatttttgctttatggccaatgttacagaagaagctgaaagcatgtacaccgcggtcttatgtgggagtcactctgcttttcgctttcagtgctgtaggggggctactctccatcagcgccgtgggtgctgtgttatttgccctcctcttgatgagtatctcctgcttgtgtcctttctatttaatccggctgcagctcttcaaggagaatatccatggtccgtgggacgaagccgaaatcaaggaggacctgtcgcgatttctctcgtag

SEQ ID NO: 199191 - DNA, 894 bp, synthetic construct
  misc_feature 1..894: note = Description of Artificial Sequence: Synthetic coding sequence
  source 1..894: mol_type = other DNA
atgtacgcccagcccgtgaccaacaccaaggaggtgaagtggcagaaggttttgtatgaaaggcagcctttcccggacaactatgtagatcgaagatttctcgaggaactacgcaagaatattcatgcccggaaataccagtactgggcagtggtgtttgagtccagcgtcgttattcagcagctttgctctgtttgcgtatttgtcgtgatctggtggtacatggacgaggggcttttggctcctcattggctgttggggacgggcctcgcaagcagcttgatcggttatgtattatttgacttaattgatggtggggagggccgaaaaaagtcaggccagacacgatgggcagatctcaagtccgccctcgtattcattacattcacgtatggcttcagccctgtgctgaaaactctgacggagagtgttagtactgatactatctacgctatgtcagtttttatgctcctaggacacctcatcttctttgactacggagccaacgccgccatcgtgagcagtaccttatccctgaatatggctatcttcgcctcagtgtgcctagccagtcgactccctaggagtctccatgcttttattatggtgactttcgccatccagatttttgccctgtggcccatgttgcaaaaaaaactgaaggcctgcaccccacgaagctatgtcggtgtgactttattgtttgcattctctgccgtgggcggactgctgagcatatccgcagtgggggcagtgctgtttgctttgctgctgatgagcataagctgcttgtgtcctttttacctcatccggctccagctgttcaaggaaaacattcatggcccatgggatgaggccgagataaaggaagatctttcacggttcctgtcctag

SEQ ID NO: 199192 - DNA, 894 bp, synthetic construct
  misc_feature 1..894: note = Description of Artificial Sequence: Synthetic coding sequence
  source 1..894: mol_type = other DNA
atgtacgcccagcccgtgaccaacaccaaggaggtgaagtggcagaaagtcctttacgagaggcagcctttccctgacaattacgtggatagaagatttttggaggagctgcgtaagaacattcacgctcgcaagtatcagtactgggccgtcgtttttgaatcatcggtggtgatacagcagttgtgctcagtgtgcgtctttgtggttatctggtggtatatggacgagggcctgctcgccccacattggctgctgggtactgggttagcgtcttcgctcatcggctacgtgctgttcgatctgatagatggcggagagggccgcaaaaagagcggccagacaaggtgggccgacctgaaatctgccctagtgttcattacatttacctacggcttcagtcctgtcctcaagactctcaccgaaagtgtctcgacggacaccatttacgcaatgagcgtttttatgttgcttggccatctgatctttttcgattatggggcaaacgcggcgatcgtatcatctactctttcattaaatatggcgattttcgcttctgtgtgtttagcatcacggctacctcgctccctgcacgcattcatcatggtgacctttgcgatacagatctttgcgctctggcccatgttgcagaaaaaattgaaggcttgcacgccccggtcttatgtgggggtcacactcctcttcgccttctctgcagtgggaggactcctttctattagtgccgtgggagcagtcctctttgcccttctccttatgtcaatctcttgtctgtgtccattttacctaattagacttcagctattcaaagagaatattcatggcccgtgggacgaggcagagataaaagaagatctaagccggttcctgtcctag

SEQ ID NO: 199193 - DNA, 660 bp, synthetic construct
  misc_feature 1..660: note = Description of Artificial Sequence: Synthetic coding sequence
  source 1..660: mol_type = other DNA
atgaaggacaacgacatcaagcggctgctgtacacccacctgctgtgtatattcagtataattttgtcagtgtttataccatcactgtttctagaaaactttagcattctcgagacgcacttaacctggctctgtatatgtagcgggttcgtgacagctgttaacctggtcctttacctcgtcgtcaagccaaataccagttctaaaagatctagcctctctcataaggttacagggttcttgaaatgctgtatatatttcctgatgtcgtgtttttccttccacgttatcttcgtcctgtatggagctcctctgatcgagctggcacttgaaacattcttatttgccgtaattttatccacgttcacaacagtcccttgcctgtgtctgctgggtccaaacctcaaggcttggctccgagtcttctcccggaatggggtgacctctatttgggagaattctctgcagattacaacaataagcagctttgttggcgcatggttaggcgccttacccatcccgcttgactgggagcgtccatggcaagtatggcccatcagctgtaccctgggggctacgtttggatacgtcgcaggactcgtaatcagccctctgtggatctactggaaccggaaacagctaacctacaagaacaactag

SEQ ID NO: 199194 - DNA, 621 bp, synthetic construct
  misc_feature 1..621: note = Description of Artificial Sequence: Synthetic coding sequence
  source 1..621: mol_type = other DNA
atgaaggacaacgacatcaagcggctgctgtacacccacctgctgtgcatcttttctataatcttgtcagtgtttatcccatcactctttttggaaaacttctctatactggagacccacttgacgtggctctgcatatgttcaggtttcgtcaccgctgtgaatttggttctctacttggtggtgaagcccaatacatccagcaaaaggagctccctctcgcacaaagtaacgggttttttgaaatgttgtatctattttctcatgagttgcttttcatttcacgtgatcttcgtgctatacggtgcccccttgattgaactggccctcgagacctttctgttcgcggttatattatccacctttactacagtgccttgcctttgcctactcggacccaatttgaaggcttggctcagagttttctctcgcaacggcgtaaccagtatttgggagaacagcttgcagataaccacaatcagctccttcgtcggcgcctggctgggcgcactccctatccctctcgactgggaaaggccttggcaaatgacagtggagcgaaaacgttccacataccgcagtctccacgtcccttgtagaggcctgggaactgtgaagtag

SEQ ID NO: 199195 - DNA, 150 bp, synthetic construct
  misc_feature 1..150: note = Description of Artificial Sequence: Synthetic coding sequence
  source 1..150: mol_type = other DNA
atgaaggacaacgacatcaagcggctgctgtacacccacctgctgtgtatatttagcatcattctgagcgtgttcatcccttcgctgtttctggaaaacttttccattctagaaacccacttaacttggttgtgtatttgctccggttag

SEQ ID NO: 199196 - DNA, 999 bp, synthetic construct
  misc_feature 1..999: note = Description of Artificial Sequence: Synthetic coding sequence
  source 1..999: mol_type = other DNA
atggccgtgaccgacagcctgagccgggccgccaccgtgctggccaccgtgctcctgctgagtttcggcagcgtggcagccagccatatcgaggatcaagccgagcaattctttaggagcggtcacaccaataattgggcagtgttagtatgcactagccgtttctggttcaattatagacacgtcgccaataccctgagcgtttaccgcagtgtcaagcgtctcggaattcccgacagtcacatcgtgctgatgttggcagacgatatggcctgtaacccacggaaccccaagcccgccaccgtgttctcccacaagaacatggaactaaacgtgtacggcgatgatgtggaagtggactatagaagctatgaagtcacagtggagaactttttgcgtgtgcttactggtaggattcccccgagcacgccccgcagcaaacggctcctgagcgacgatcgaagtaatatactgatctacatgactgggcacggaggcaacggattccttaagttccaagattcggaagagattaccaatattgagctggctgatgctttcgagcagatgtggcagaaacgaagatataatgaactgttgtttataattgatacgtgccaaggggccagcatgtacgagcgcttttatagtccgaatatcatggcattggcaagctcccaggtcggagaggattctctgtcccatcaaccagacccagccataggcgtgcatctgatggatcggtacaccttttatgtgctggagtttttagaagagattaatcccgccagccaaaccaacatgaacgacctgttccaagtgtgcccgaagagcctctgcgtatcgacccccgggcaccgtacggacctctttcaacgggaccctaagaacgttctgattacggacttcttcggatctgtgagaaaggtggaaataactacagagactataaagctgcagcaagacagcgagattatggaatccaggtattcctcatag

SEQ ID NO: 199197 - DNA, 1188 bp, synthetic construct
  misc_feature 1..1188: note = Description of Artificial Sequence: Synthetic coding sequence
  source 1..1188: mol_type = other DNA
atggccgtgaccgacagcctgagccgggccgccaccgtgctggccactgttctgctgctgagctttggctctgtggcagcctctcatatcgaagaccaggccgagcagttcttcaggagtggccacacaaacaactgggctgtgcttgtttgcacttcacgattctggttcaattatcggcacgtcgcgaacacgctgagtgtgtaccggtcagtaaagagacttggaatacctgatagccacattgtcctgatgttggcagacgacatggcatgcaatccaagaaacccgaagcctgccacagtattttcgcacaaaaacatggagctgaatgtctacggggacgatgtggaggttgattaccgtagttatgaggtaactgttgagaattttctgagagttctgaccggtagaatccccccgagcacaccccggtctaaacgactgctgtctgacgacagatccaacatcctgatttatatgacagggcacggtggcaacgggtttctgaagttccaggactctgaagaaattaccaatattgaattggccgatgcgttcgagcagatgtggcagaaaaggcgctataacgaactacttttcattattgatacctgccagggcgcgtccatgtacgaacggttctacagcccgaatatcatggccttagcatcttcccaggttggggaagactccttgtcccaccaacccgatccagcaattggtgtccacctgatggaccgatataccttctatgtgctggaattcctcgaggaaattaatcccgcatctcagaccaacatgaacgacctgttccaggtttgtccgaaatctctgtgcgtttctactcccggacacaggactgacctatttcagagagaccctaaaaacgtcctcatcacagatttctttggtagcgttcgtaaagtggagatcacgacagaaactatcaagctacagcaggactctgaaatcatggagtcgtcatacaaggaggaccagatggatgaaaagcttatggagcccctaaagtacgccgaacagctgccagtggcccagataattcaccagaagcctaagttgaaagattggcatccgccaggcggattcatcttaggcttgtgggcactgatcataatggtcttcttcaaaacctacggaatcaaacacatgaagttcattttttag

SEQ ID NO: 199198 - DNA, 960 bp, synthetic construct
  misc_feature 1..960: note = Description of Artificial Sequence: Synthetic coding sequence
  source 1..960: mol_type = other DNA
atggccgtgaccgacagcctgagccgggccgccaccgtgctggccaccgttctgttgctgtcttttggctccgttgctgcaagccacattgaggaccaagccgagcagttctttcgctccggccacacaaataactgggccgtgctggtgacagtggagaacttcctgagagtgttaaccggccgaattccacctagtactcccaggtctaagcgcctgttgtccgatgaccgttctaatattctaatttatatgaccggccacggggggaacggctttctgaagttccaagatagcgaggaaataaccaacattgaacttgccgatgcatttgagcagatgtggcagaagcgacggtataatgaactgttgtttattatcgatacatgtcagggcgcgtctatgtatgagcggttttactctcctaatatcatggctctcgctagtagccaggtaggcgaggacagcttgtcccatcaaccggatcccgcaataggagtgcatcttatggacaggtacactttttatgttctggaattcttggaagagattaaccctgcctcccagaccaacatgaatgacctattccaggtgtgtcccaaatcactctgcgtaagtacccctggccaccgcacagacctgttccagagagacccaaaaaacgtcctgattaccgacttcttcggcagtgtgcgcaaggtcgaaattaccaccgaaacaattaaactccagcaggacagcgagatcatggaaagctcctacaaagaagatcaaatggatgaaaaacttatggagccacttaaatatgccgagcagctcccagtcgcgcagatcattcatcagaaacctaaactgaaagactggcatcctccaggtggatttattctaggcctatgggcgctcatcataatggtgttcttcaagacttatggcatcaaacacatgaagtttattttctag

SEQ ID NO: 199199 - DNA, 906 bp, synthetic construct
  misc_feature 1..906: note = Description of Artificial Sequence: Synthetic coding sequence
  source 1..906: mol_type = other DNA
atggccgtgaccgacagcctgagccgggccgccaccgtgctggccaccgtgttgctgctgagcttcggttccgtggccgctagccacatcgaggtcactgtcgagaactttctgcgcgtgctgacggggaggataccaccaagtaccccccgctcaaagcgtctgttgtccgacgaccgatctaatatactgatttatatgacgggtcacggcggcaatgggttccttaagtttcaggacagcgaggaaattacaaacatcgagctcgctgatgcatttgagcagatgtggcagaaacgtcgctataacgaattactatttataatcgatacctgccaaggcgccagcatgtacgagcgcttttatagccctaacatcatggcccttgcttcatcccaggtgggcgaggactctctcagtcaccagccggaccctgccatcggtgtgcacctgatggataggtacactttctacgttctggagttccttgaagaaatcaaccccgcgagccagacaaatatgaacgacctgtttcaagtgtgtcctaagagtctatgtgtaagtacacctggacaccggacagatttgttccagcgggatcccaaaaatgtgctgatcaccgattttttcggttcagttcgcaaggtggaaattaccacagagactatcaagctgcagcaggatagtgagattatggagtcctcctacaaggaggatcagatggatgaaaagctgatggaacccctcaagtacgctgagcagttgcctgttgcccagattattcatcagaaacctaaacttaaggactggcatcctccgggagggtttattcttgggctgtgggcacttattatcatggtattttttaagacctacggaatcaaacatatgaagttcatcttttag

SEQ ID NO: 199200 - DNA, 558 bp, synthetic construct
  misc_feature 1..558: note = Description of Artificial Sequence: Synthetic coding sequence
  source 1..558: mol_type = other DNA
atgggcaagaagcagaacaagaagaaggtggaggaggtgctggaggaagaagaggaagaatacgttgtggaaaaggtgctcgaccgcagggtcgtcaagggcaaagtggagtacctcttgaaatggaaaggtttctccgatgaagacaacacatgggaacccgaagaaaatctggactgtccagacctgatcgccgagttccttcagtcccagaaaaccgcccatgaaacagacaaatccgaaggtgggaaacggaaggccgacagtgattcggaagataagggggaagaaagcaagccaaaaaaaaagaaagaggaaagtgagaagcccagagggttcgcccggggcctggagcctgagcgcattatcggtgcaaccgattcctccggggaactcatgtttttaatgaagtggaagaatagcgacgaggccgatctggtgccagccaaggaagccaacgtcaagtgtcctcaggtagtcatatctttctacgaggagaggctcacatggcattcctatcctagcgaagatgacgacaaaaaggatgataagaattag

SEQ ID NO: 199201 - DNA, 735 bp, synthetic construct
  misc_feature 1..735: note = Description of Artificial Sequence: Synthetic coding sequence
  source 1..735: mol_type = other DNA
atggaggccatgtggctgctgtgcgtggccctggccgtgctggcctggggattcctgtgggtctgggacagctctgagagaatgaagtctagggagcaggggggacgtcttggcgcagaatctcgcactctgctggttatcgcccatcctgatgacgaggcgatgttcttcgcacccactgtgctaggactggcgcgcctccggcattgggtctatctactctgcttttctgccggtaactattacaaccaaggagagacgaggaagaaggaactgcttcagtcttgtgacgtactaggtattcctctgtcaagcgtgatgattatagacaatagggactttccagacgatcccggaatgcagtgggacaccgaacatgtggccagagtgctgctgcagcatatcgaggtgaacgggattaatctcgttgtgaccttcgacgccgggggcgtttccggccactccaatcacatcgctctttacgcagccgtacgtgttctgtgcgcccatgcatcagtgtgtgagtgtgctgcacaagtacacctgccctctggcagtgcacttgtctctgcctcatacgcaggttgcccgctgcgtgctcagcagcaacggagcgggactggccaggagtcacatgtccttccgccccaacctgctcccctggtgcccccaccgctgcattatttgctaccagtacacgaaaaccagcttacagagctgcccctcaagccctag

SEQ ID NO: 199202 - DNA, 1272 bp, synthetic construct
  misc_feature 1..1272: note = Description of Artificial Sequence: Synthetic coding sequence
  source 1..1272: mol_type = other DNA
atgggcagcaccaagcactggggcgagtggctgctgaacctgaaggttgcccctgccggagtcttcggggttgcctttctggcgcgagtggccttggtattttacggggtgtttcaagatcgaacccttcacgtgcggtacacagacatcgactatcaggtcttcacagatgccgcacgatttgtgaccgagggtagaagtccttatctccgcgcgacttacagatatactcctttgcttgggtggttactgacaccgaatatttacctgagtgaacttttcgggaaattcctgttcattagctgtgacttattaacagccttcctattgtaccgtctgctcctcctgaaaggactgggccgaaggcaggcatgcggctattgtgtgttctggctcctcaaccccctccccatggctgtgtcaagcaggggcaatgccgactctatagtggcgtcattggtgctgatggtgctgtacctgattaaaaaacgattggttgcctgcgcagccgtattctatggtttcgccgtgcacatgaagatatacccagtgacatacatattgcccatcaccctgcacctgctgccagacagggataatgataaatctctcaggcaatttaggtacacttttcaggcctgcctttatgagctcctcaagagactctgcaatcgagcggtattactgtttgtggccgttgcggggctcactttcttcgccctgagcttcgggttttactacgaatacggctgggaatttttagaacacacctatttttaccatctgacgcgcagggatataaggcataatttctctccttacttttatatgttgtacctcacggccgagagcaagtggagttttagcctcggcatcgccgcattcctaccgcaactgatcctgctgagcgccgtctcattcgcgtattaccgggatctcgtgttctgctgtttcctgcacacttcgatcttcgtaacatttaacaaagtgtgtacctcccaatattttctgtggtacttgtgtctactgccactcgtgatgcccttagtgaggatgccttggaagagggctgtcgtcctgctgatgctgtggtttatcggacaagcgatgtggctggctcccgcgtacgtcctggagttccaggggaagaatacattcctgttcatctggctcgcaggcctattcttcctgcttattaattgtagcattcttatccaaattatctctcattataaggaagagcccttgactgagagaatcaagtacgactag

SEQ ID NO: 199203 - DNA, 2796 bp, synthetic construct
  misc_feature 1..2796: note = Description of Artificial Sequence: Synthetic coding sequence
  source 1..2796: mol_type = other DNA
atgctgctgttcttcaccctgggcctgctgatccacttcgtgttcttcgcaagtattttcgacatttattttacttctccgctagtccacggcatgacccctcagttcacacctctgcccccccccgcacgccggcttgttctcttcgttgcagatggtctgcgcgcagacgcactttacgagctggatgagaatggcaactcgcgcgctcctttcatacgcaatatcatcatgcatgagggttcttggggaatctcgcatactagagtgccaactgaaagcagacctgggcacgtcgcactcatagcaggcttctatgaagacgtttccgccgtggccaaaggctggaaagagaatccagtggaattcgacagtctctttaacgagagtaaatacacctggagctgggggagcccagacattctgcccatgttcgcgaaaggcgctagcggtgatcacgtctacacttacagttacgacgctaaaagagaggattttggtgcacaggacgccactaaattggatacctgggtcttcgacaatgtgaaagatttctttcatcacgctcgcaataaccaatccctgttcagtaagatcaacgaagagaagatagtatttttcctgcacctcctcggtattgacacgaatggccatgcccatcggccttctagtcgcgattacaaacataatatcaagaaagttgacgatggggtgaaggagatagtgagcatgttcaatcacttttacggcaacgacggtaaaacaacatttatatttactagcgatcacggtatgacagactggggctcccacggcgctggacacccaagcgagaccttaaccccactggttacttggggggccgggattaagtaccctcagagggtttctgctcagcagtttgacgatgccttcctaaaagagtggaggttggagaactggaagcgcctcgatgtaaatcaggctgatatcgccccgttaatgaccagtttgattggggtcccttttcctctaaattcagtgggaatcctgcccgtcgattacctaaacaacacggatctttttaaagcagaatcgatgttcactaacgctgttcaaatcttggaacagtttaaggtgaagatgactcagaaaaaagaggtcacactcccgtttctgttcactccttttaaactcctatctgacagcaagcagttcaatattctgcgcaaagcacgatcctacatcaagcatagaaagttcgacgaagttgtgtctctgtgtaaggagctaattcacctggcactgaaaggactgtcttactaccatacctacgataggttctttctgggcgtgaatgtggtgatcgggttcgtgggctggatcagttatgcatctctactcataatcaaatctcattccaatcttataaaaggcgtgtccaaggaagttaagaagccgagccacctgctgccatgctcattcgttgctatcggcattctagtcgctttcttcctgctgatccaggcatgtccgtggacttactatgtgtacgggttgcttccactgcccatttggtacgcagttctgcgggaattccaggtgattcaggatctggtcgtgtctgtgttgacatatcctctctcccactttgtcggctacctgcttgcctttactcttggaatcgaagtcttagtgttatcctttttttacaggtacatgctcacagcagggttaacagcatttgccgcctggccattcttgacacgattgtggactcgggctaaaatgacctctttgagctggaccttctttagtctgctcttggccgtctttccacttatgccggtagtgggccggaaaccagatattagcctcgtcatgggcgcaggcttactcgtgttacttctgtctctctgtgtcgtcacctccctcatgaagcggaaggattcttttattaaagaggagctactggtccatctcctccaggttctgagcacagtcctctccatgtacgtcgtgtacagcacccaatcatctctgttaagaaagcagggactgccattaatgaaccaaattatctcctgggctactctcgcttccagcttagtggttccactactgtcgtcacccgtactgttccagcgactgttctccattttgctttctctgatgtcaacttatctgctccttagcaccggttacgaagccctctttccattggttttaagttgcctgatgtttgtgtggataaacatcgagcaggagactcttcaacagtccggagtgtgctgcaagcagaagctgaccagtattcagttctcctacaatacggatatcacacaatttaggcaattgtacttggatgatataaggagagccttcttcctggtattctttctggtcactgcgttctttggtacaggtaacatcgcttctatcaactcattcgacttggcctccgtgtactgttttttaactgtcttttccccatttatgatgggagcactaatgatgtggaagattttaatccccttcgtgctagtgatgtgtgctttcgaagctgtgcagcttaccacccaattgtccagtaagtctcttttcctgattgtgctggttatatccgacattatggctctccattttttttttttggtcaaggactatggctcatggttggatatcggcacatccatcagccattacgttattgtcatgtccatgactattttcttagtgtttcttaatgggctcgcacagctgctaaccaccaagaagttgcggctgtgcgggaaacctaagagccactttatgtag

SEQ ID NO: 199204 - DNA, 2796 bp, synthetic construct
  misc_feature 1..2796: note = Description of Artificial Sequence: Synthetic coding sequence
  source 1..2796: mol_type = other DNA
atgctgctgttcttcaccctgggcctgctgatccacttcgtgttctttgctagtatatttgatatatatttcacaagccctctcgtgcacgggatgacccctcagttcacccctttgcctccaccagcgcgccggctggtgctgtttgtcgctgacggactccgtgccgacgctctatatgagttggatgaaaacggaaactcaagggcgccttttattagaaatatcattatgcatgaggggagctgggggataagccataccagggttccgacagagtcgcgtcccgggcacgtggcgctgatcgctgggttttatgaggatgtcagcgccgtcgccaaaggatggaaggagaatccggtggagttcgatagcctgtttaacgagtccaagtacacatggagctggggcagccccgatatcctcccaatgtttgctaaaggtgccagcggtgaccatgtgtatacctactcttacgatgctaagcgcgaagactttggcgcacaagacgccaccaaattggacacatgggtatttgataacgtcaaagacttttttcaccacgcacgaaataatcagtcactgttctccaaaatcaacgaagagaaaattgtctttttcctgcatcttctgggaatcgataccaacggacacgcacaccggcctagctcaagggattataagcataatattaagaaagtagacgacggtgtgaaggagattgtctccatgtttaaccacttttatgggaacgacggtaagaccacctttatttttacctccgaccacggcatgactgactggggttcccatggagcgggacacccaagtgaaacgctcacgccattagtgacttggggtgcaggaatcaagtacccacagcgcgtctccgcccagcagtttgacgatgcttttcttaaagagtggcgactggagaattggaagcggttggacgtaaatcaggccgacatagcaccactaatgactagcctgattggggtgccgtttcccctcaatagcgttggaatcctaccagtggactaccttaataacaccgatctgtttaaagctgagtcaatgttcacgaatgctgtccagatcttagagcaatttaaggtgaagatgacgcagaagaaggaggtgacacttccattcctcttcacgcccttcaaactattgtccgactctaaacagttcaacatcctccgaaaagctagatcgtatattaaacaccggaaatttgacgaggtggtgagcctgtgtaaggagctaattcacctggcccttaaggggcttagctactaccacacttatgatcgatttttcctgggcgtgaacgtggttataggattcgtgggatggataagttatgcatccttactcatcataaagtcacatagtaacttgataaagggcgtctccaaggaggtgaagaagccgtcccatctgttgccctgtagtttcgttgcaattggaatactcgttgctttcttcctcctgatccaggcgtgtccctggacctactacgtatacgggctgctccctctgccaatctggtatgccgtattgagggagttccaggtgatccaggacctcgtcgtgagcgtcctgacttacccattgtcccactttgtcggctaccttctggcttttacactcggcatcgaagtgctagtgctgtccttcttctatagatatatgttgaccgccggcctgacagcgttcgccgcctggccatttctcacccggctgtggacacgggctaaaatgacatccctgtcttggacttttttttccttgctgctggccgtgtttcctctgatgccagtggtgggtcgcaagcctgatatctccctggtgatgggagctggcctactggtactgttgctctcgttgtgtgtagtgacttctctcatgaaaagaaaagatagctttatcaaggaggagttactcgtgcatctgctccaggtgctgtcaaccgttttgtccatgtacgtggtgtattccacacagtcttcactcctgcggaagcaaggcttacccctgatgaatcaaataatatcttgggccaccctggctagctcactggtggtaccgctgctatcctctcctgtcctgttccagaggctattttccattctgctgtccctgatgtcaacctacctgctcctcagtacggggtacgaggccctgttcccattagtgctgtcctgtctgatgtttgtctggataaacatcgaacaagaaaccctgcagcagtcaggagtatgctgtaagcagaaactgactagcattcaattctcatacaatacagatattacacagttcaggcagctctacctggatgacatacgcagggccttttttcttgtgttcttcctggtgaccgcgttttttggcaccggaaatatagcctctatcaatagtttcgatctggccagcgtgtattgctttctgacggtgttcagcccatttatgatgggcgccctgatgatgtggaaaattttgatccctttcgtcctggtaatgtgcgcttttgaagcagtgcagctcaccactcagttgagctcaaaatctctgtttttgattgttctcgtgatatccgacatcatggccctgcatttttttttcttagttaaggactacggctcctggctggacatcggaacgagcattagtcactacgttattgtcatgtcaatgactatctttctggtttttctgaacggcctcgcacaactactaacaacaaagaaactccggctctgcggtaagccaaagagtcattttatgtag

SEQ ID NO: 199205 - DNA, 405 bp, synthetic construct
  misc_feature 1..405: note = Description of Artificial Sequence: Synthetic coding sequence
  source 1..405: mol_type = other DNA
atggtggagaacagccccagccccctgcccgagcgggccatctacggctttgtgctttttttaagttctcagtttgggtttattctttacctggtatgggccttcattccagaaagctggctcaacagtctgggcttaacttactggccgcagaaatactgggccgtggctctgcctgtgtatctactcattgccattgtgataggttacgtgctgttgtttggtattaatatgatgagcacgagtccattagactcgatccatacgatcacagacaattatgccaagaaccagcagcaaaagaagtatcaggaggaagctattccagctctacgcgatatctccattagcgaggtgaatcaaatgttcttcttagccgcgaaggagctttataccaagaactag

SEQ ID NO: 199206 - DNA, 327 bp, synthetic construct
  misc_feature 1..327: note = Description of Artificial Sequence: Synthetic coding sequence
  source 1..327: mol_type = other DNA
atggtgctgtacctggtgtgggccttcatccccgagagctggctgaacagtctgggtctgacctactggccccagaagtattgggccgtcgctctgccggtttacttgctgatcgcgatcgtgatcggctacgttctcctttttggcattaatatgatgtcaaccagtcctctggatagcatccatactataacagataactacgctaagaaccagcagcaaaaaaagtaccaggaggaagctattccagcattgagggatatctccattagcgaagtaaatcagatgttcttccttgctgccaaggaactctacactaagaactag

SEQ ID NO: 199207 - DNA, 405 bp, synthetic construct
  misc_feature 1..405: note = Description of Artificial Sequence: Synthetic coding sequence
  source 1..405: mol_type = other DNA
atggtggagaacagccccagccccctgcccgagcgggccatctacgggttcgtgctgttcctgtctagtcagttcggtttcattctgtaccttgtgtgggcattcatacccgaatcgtggctcaattctctgggtttaacatattggccgcaaaagtattgggccgtggccctgcccgtgtatcttttgatagcaatcgttatcggctatgtgctgttgttcggaattaacatgatgtctacaagtccattggacagtattcacaccatcaccgacaattatgccaagaatcagcagcaaaagaagtatcaagaagaagcaataccagccctacgcgatattagcatatccgaagttaaccagatgttcttcctagctgcaaaggagctatacactaagaattag

SEQ ID NO: 199208 - DNA, 405 bp, synthetic construct
  misc_feature 1..405: note = Description of Artificial Sequence: Synthetic coding sequence
  source 1..405: mol_type = other DNA
atggtggagaacagccccagccccctgcccgagcgggccatctacggcttcgtgctttttcttagcagccagttcgggtttattctttatctcgtgtgggcctttatcccagaaagctggctcaatagtcttggcctcacatactggcctcagaaatactgggctgtggcactccctgtgtacctgctgatcgccatcgtgattgggtacgtcctgctgtttggtattaacatgatgtccacctcaccacttgactctatccacaccattacagataattatgccaagaaccaacagcagaaaaaataccaagaggaggccatccctgctctgcgcgacatttcaatcagcgaagtgaatcagatgttcttcttagccgccaaagagctgtataccaagaattag

SEQ ID NO: 199209 - DNA, 78 bp, synthetic construct
  misc_feature 1..78: note = Description of Artificial Sequence: Synthetic coding sequence
  source 1..78: mol_type = other DNA
atggtgctgtacctggtgtgggccttcatccccgagagctggctgaatagcttgggtctgacctattggccccagtag

SEQ ID NO: 199210 - DNA, 477 bp, synthetic construct
  misc_feature 1..477: note = Description of Artificial Sequence: Synthetic coding sequence
  source 1..477: mol_type = other DNA
atggtgccccggagcaccagcctggccctgatcgtgttcctgttccaccgactcagcaaggcaccaggtaagatggtagagaattctccatcaccacttcccgaaagagcaatctacggtttcgttctgttcctgtccagccaatttggcttcattctgtatctggtctgggcattcattcccgagagctggttgaattccctcggtcttacctactggccgcagaagtattgggctgttgctctccccgtgtacctgcttatagctatcgtgatcggttatgttctattgtttgggatcaacatgatgagcacgagccccctagattcgattcacaccattacagacaactatgccaaaaaccagcagcaaaagaaataccaggaggaggccattcctgcgctgcgagacatttctatatccgaagtcaaccagatgttttttctggctgcgaaagagctgtataccaagaattag

SEQ ID NO: 199211 - DNA, 1848 bp, synthetic construct
  misc_feature 1..1848: note = Description of Artificial Sequence: Synthetic coding sequence
  source 1..1848: mol_type = other DNA
atggcccgggcctgcctgatccagcggctgcccatcaagcgggactgtactcccgtttttgtgcgcggcttatccagcccgagtgctgccatggcactgttgagcgaggggctcgatgaagtgcctgctgcctgtctctccccttgcggcccccctaatcccaccgagctcttcagtgaaagccgacggttggctttggaggagctggttgcaggaggccccgaggccttcgccgcctttttacgaagagagaggctggccaggtttctcaaccctgacgaggttcacgctatccttcgcgcagcggaaaggccaggagaggaaggcgccgccgctgccgccgcagccgaagacagtttcgggagctcacatgactgctcttcgggcacctacttcccagagcagagcgacttagagcccccactcctcgaactcgggtggcccgcgttctaccagggtgcttacagaggagccactagggtagagacacattttcagccgaggggcgctggtgagggcggcccctatggttgtaaggatgccctgcggcagcagctgcgcagcgctcgcgaggttattgcagtggtgatggatgtttttaccgatattgacatatttcgggatttgcaggagatctgccgaaagcagggcgtggccgtgtatatccttttagaccaggccttactgagccagttccttgacatgtgtatggacctgaaagtgcaccctgaacaagaaaaactcatgactgtgagaaccatcactggaaatatctactacgcaagaagtggtacgaagatcattggcaaggtacacgaaaagttcactctaatcgacgggatcagggtggccacagggtcctacagcttcacgtggacggacggtaaacttaattcctctaatcttgttatcttgagtggacaggtggtcgagcactttgacctcgagttcagaatcctgtacgcacagtccaaaccaattagtcctaagcttttgagccactttcagtccagcaataaattcgaccacctaactaatcgaaagccccaaagtaaagagcttacgttaggcaatctccttaggatgaggctggcacgactgtccagcactcccaggaaagcagatctcgatcccgagatgccagctgaggggaaggccgagcggaaaccccacgattgtgagagctccaccgtctccgaagaggattacttcagttctcatagggacgagctgcaatccagaaaggcaattgatgctgccacacagactgagcccggagaagagatgcctggcctttctgtatctgaagttggtacacaaacttctattacaacagcctgtgccggcacccaaacagccgttatcacccgtattgcctcaagccagaccaccatctggagcagatcaacaactacccagaccgacatggacgaaaatattcttttccctcggggaacgcaaagcacggaggggtctccagtgagtaaaatgagcgtgtcccgaagttctagtctgaagtccagctcttccgtgtccagtcagggctctgtggcctcttcaactggaagtccagcttccattaggaccacggatttccataaccccggatacccaaagtacttaggaacacctcacctcgagctgtacttatctgactcccttcggaatctcaacaaagaaagacaatttcactttgcaggcattaggtctagacttaatcatatgctcgccatgctctcgcggcgcacacttttcactgaaaatcacctgggcctgcactctggaaatttctctcgggtgaacttactagctgtgcgagacgtggctttatatccttcatatcaatag

SEQ ID NO: 199212 - DNA, 1248 bp, synthetic construct
  misc_feature 1..1248: note = Description of Artificial Sequence: Synthetic coding sequence
  source 1..1248: mol_type = other DNA
atggccgcccccctggtgctggtgctggtggtggccgtgaccgtgcgcgctgccctctttcgttcatcccttgccgagttcatctccgaaagggtagaagtggtttccccattgagttcttggaagagagtggtagagggtttgtccttactggatctcggagtctcgccctacagtggcgctgtgttccacgaaatcaccgacgcactaactgccatcgccttgtactttgccatccaggacttcaataaggtggtgttcaaaaaacagaagctcttgttagaactcgatcagtatgcacccgatgtggccgaactgatccggactcccatggaaatgaggtacataccactgaaggtggcattgttctatctactgaatccttacacgattctgtcctgcgtcgcaaagtcaacatgcgccatcaacaatacactcatcgcattctttattctcacgaccatcaagggttctgctttcctgtccgcaatttttcttgcgctggccacttaccagtcactgtaccccttaaccctgttcgtgcccggcctgctgtatctgctgcagcgccagtatatacccgtgaaaatgaagagcaaggccttctggatttttagctgggagtacgccatgatgtacgtcggcagcctggtcgtaattatctgtctgtccttcttcttgctgagctcttgggatttcatccccgccgtttatggttttattctgagtgttcccgatctgacaccgaacatcggactgttctggtactttttcgctgaaatgttcgagcacttcagtctcttcttcgtgtgcgtctttcaaattaacgtcttcttttatacgattcctctggccataaagctgaaagagcaccccattttcttcatgttcatccagatcgctgtcatcgctatctttaagtcctaccctacagtcggagatgtggcgctgtatatggccttctttcctgtgtggaaccacctgtacaggttcctccgtaacatctttgtgctgacgtgcattatcatcgtgtgtagcctgctgttccccgtgttgtggcatctgtggatttacgcaggaagcgccaacagtaatttcttctatgcgatcactctgacttttaacgtgggacagatcctgcttatttcagactatttttacgcttttctaaggagagagtactacctcacccacggtctatatctgactgccaaagacggcacagaggcaatgttggtgctcaagtag

SEQ ID NO: 199213 - DNA, 513 bp, synthetic construct
  misc_feature 1..513: note = Description of Artificial Sequence: Synthetic coding sequence
  source 1..513: mol_type = other DNA
gtgagcgtgcccacccacctggtgtgcccccggacccccctgagcccaccggccgccgtccacacctgcgaaaatgaagagcagagtttgctcgacctgttcctcggcgtgtgtcacgacatcaacgtgttcttttatacgatacctctcgccataaagctgaaggaacacccaatcttcttcatgttcatccagatcgctgttattgcaatctttaaatcctatcccaccgtgggcgatgtcgccttgtatatggcttttttcccagtctggaaccacctgtatcgcttcctacgtaacattttcgttctgacttgtattataattgtatgcagcttgctgtttcccgtgttatggcatttatggatctacgcagggtccgctaactccaacttcttttatgcgatcacccttacctttaacgtgggtcagattctgctcatctcagactacttctatgccttcctgcggcgagaatattatctcacgcatgggttgtatcttacagcctag

SEQ ID NO: 199214 - DNA, 1272 bp, synthetic construct
  misc_feature 1..1272: note = Description of Artificial Sequence: Synthetic coding sequence
  source 1..1272: mol_type = other DNA
atggccgcccccctggtgctggtgctggtggtggccgtgaccgtgcgcgccgctctgttcaggtcttcactggcagagtttattagcgagagagtggaagtcgttagtccactctcgagttggaaacgcgtcgtggaaggcctctcactgctggatctcggagtgtccccatacagcggtgcagtctttcatgagacgcccctgataatctatctgtttcactttctgatcgactacgcagagctcgtatttatgattactgatgcccttacggccattgcactgtattttgctatacaggattttaacaaagtggtctttaaaaagcagaagcttctccttgagcttgaccaatatgctcccgacgtggcggaactcatcagaacacccatggagatgaggtacatacccctgaaagttgcactgttttatttgctgaacccatacaccatactgtcttgtgttgccaagagcacgtgcgcaatcaataacactctgattgccttcttcatcttaaccacaattaagggcagtgccttcctctctgcgatatttctggctctcgctacataccagtctctgtaccctttgacattgtttgtgccgggactcttgtacctgctgcaaagacaatatatccccgtcaaaatgaaaagcaaagcgttctggattttctcctgggaatacgctatgatgtacgtgggtagtctcgtggtgattatctgcctatcgtttttcctcctgtcatcatgggattttatcccggcggtgtatggatttatacttagcgttcctgaccttaccccaaacattggccttttctggtacttctttgcagagatgttcgagcattttagtctttttttcgtgtgtgtatttcagatcaacgtgttcttctatactattccgctcgccatcaaacttaaagaacaccctatatttttcatgtttattcaaatagccgttatagctatcttcaagtcctaccctacagtgggagatgtcgcactgtatatggccttttttccagtctggaatcatctctatcgctttttacgtaatatcttcgtgctaacctgtataattattgtctgcagcctcctctttccggtcctttggcatctgtggatctatgctggcagcgctaatagcaacttcttctatgccatcacactgacgtttaacgtaggacaaatgggattttgcggcgataggatggctggcacctgccccgaggcgataagagcagccggcgacaggaccccctcctag

SEQ ID NO: 199215 - DNA, 1482 bp, synthetic construct
  misc_feature 1..1482: note = Description of Artificial Sequence: Synthetic coding sequence
  source 1..1482: mol_type = other DNA
atgtggccccaggaccccagccggaaggaggtgctgcggttcgccgtcagctgccgaattttgaccttgatgcttcaggccctgttcaacgcaatcattccagaccatcacgcagaggcttttagccctcctaggctagctcctagcggcttcgtcgaccagttagtcgagggcctactcggtggtctatcgcactgggatgcagagcattttctgtttatcgctgagcatggatatctatacgaacacaactttgctttcttcccagggttcccgcttgccttacttgtcggcacagaactgctgaggccattgagaggtctgttaagcctccgctcttgcctattaatcagcgttgcttcattaaattttctgttctttatgctagcggcagttgcactccacgacctgggctgcctcgtcctccattgcccccaccagagcttttatgcggccttacttttctgcctgtcacctgctaacgtttttcttgccgccggatattcagaggcactgtttgccctgttaaccttcagcgcaatgggccagctggaacggggacgggtctggacatccgtgttgctgtttgcgtttgctactggagtccgcagcaacggtcttgtttctgtcggtttcctaatgcattcccagtgtcaaggctttttctcttccttgacgatgcttaatccactgcggcaactttttaaactcatggcctctcttttcctctctgtttttacactggggcttccattcgccctattccagtactacgcctacacccaattctgcttgccgggctctgcacgtcctataccagaacctcttgtccagctggcggtggataagggatacaggatcgctgagggcaacgaaccgccgtggtgcttctgggatgtgccccttatatacagctacatccaggacgtgtattggaacgtcgggtttctgaaatattatgaactaaagcaggtccccaactttctgctggctgctcccgtggctatacttgtcgcatgggccacttggacctacgtgactacccatccttggctgtgtttgactttaggactgcagaggtcaaagaataacaaaactctcgagaaaccagatctgggtttcctaagccctcaggtgtttgtgtatgttgttcacgcggcagtgctgctgctcttcggcggactttgtatgcatgtccaggtcctcacaaggtttctgggctcctccacaccaatcatgtattggttcccagcccacctgctacaggaccaggagccactgctgagaagcctgaagacagttccctggaagcctctagccgaggattcgccgcctggtcaaaaggtaccccgaaatcctattatgggtctgctctaccactggaaaacctgcagcccagtgacaagatatatccttggatactttttgacctactggttgctcggactactgctgcattgtaacttccttccatggacctag

SEQ ID NO: 199216 - DNA, 1482 bp, synthetic construct
  misc_feature 1..1482: note = Description of Artificial Sequence: Synthetic coding sequence
  source 1..1482: mol_type = other DNA
atgtggccccaggaccccagccggaaggaggtgctgcggttcgccgtgagctgtaggattctgactcttatgctgcaggcattgtttaatgcaattatcccggaccaccacgccgaagcctttagcccacctagactcgcacctagcggatttgttgaccaattggtggaaggacttctcggaggacttagccattgggatgccgaacacttcctgtttatcgctgaacacggctacctatacgaacataacttcgcgtttttcccagggtttcctctggctctccttgttggtacagaactcctacgtcctctccgaggactgctctctctgaggtcttgtctgctgatcagcgtggcaagcctgaactttctcttcttcatgctggctgctgtcgctctccatgatctagggtgtctggtactacattgcccacatcagtcattttatgctgccctcctgttctgtctatcgccggccaatgtctttctggccgcaggatactccgaggcgctcttcgcactcctaaccttttccgctatgggtcagctggaaagagggcgggtgtggacgtcagtcttgctgttcgcattcgctacaggagtgaggagtaatggcttggtctccgtcgggtttctgatgcactcacagtgccaaggcttttttagttcactgacaatgctaaacccgctcaggcagctgttcaaattgatggcgtcactattcttaagcgttttcactctcggactgccatttgcactctttcagtattacgcctatactcagttttgtctccctgggagcgctcgacccattcccgagccattggttcagctggccgtcgataaaggctaccggatcgctgaaggaaatgaacccccttggtgtttctgggatgtgccgttgatttatagttacattcaggatgtgtattggaacgtcggcttcctcaaatactatgagctgaaacaagtgccaaattttcttctggccgccccggttgcaatcctggttgcctgggctacctggacttatgttacaacccacccttggctctgtctcaccctgggactgcagcggtcgaagaacaacaaaaccctggaaaagcccgacctggggtttctgagcccccaggtgttcgtctatgttgtgcacgcggctgtgctgctcctgttcggtgggctgtgcatgcacgtgcaagtgttgactagatttctcggaagttctacccctatcatgtactggttccctgcacaccttctccaagaccaggagcccttacttcgaagcttgaagactgttccctggaaaccgctggccgaggacagtccaccaggacaaaaggttccgaggaatcccatcatgggtttactatatcactggaagacttgcagtcctgttacccgatacattcttggctattttctgacttattggctactggggctgctccttcactgtaactttttaccctggacttag

SEQ ID NO: 199217 - DNA, 219 bp, synthetic construct
  misc_feature 1..219: note = Description of Artificial Sequence: Synthetic coding sequence
  source 1..219: mol_type = other DNA
atgtggccccaggaccccagccggaaggaggtgctgcggttcgccgtgtcttgtcgaatacttactcttatgcttcaagccttattcaatgcaatcattcctgaccaccatgccgaagccttctccccccctaggctggcccctagtggtttcgtggaccaactggttgaaggactgttaggaggcctgagccactgggacgctgagcacttcttatag

SEQ ID NO: 199218 - DNA, 366 bp, synthetic construct
  misc_feature 1..366: note = Description of Artificial Sequence: Synthetic coding sequence
  source 1..366: mol_type = other DNA
atgtggccccaggaccccagccggaaggaggtgctgcggttcgccgtatcctgccggatcttgaccttaatgctacaggctctgttcaacgccattatacctgaccatcacgcggaggctttttcccctccacgcttagcccccagtgggtttgtagaccaactggtcgagggtttgttgggcggcttgagccactgggacgctgagcattttctgttcatcgcagaacacgggtatctctatgaacataactttgctttttttcccggctttcccctcgcactgctggttggaacagagctcctgcggcccctccgaggactgctcagcctgagatcttgcctgctgatcagtgtggcctcctag

SEQ ID NO: 199219 - DNA, 798 bp, synthetic construct
  misc_feature 1..798: note = Description of Artificial Sequence: Synthetic coding sequence
  source 1..798: mol_type = other DNA
atgcccagcagccagatcaccatgcagaagcccagcctgctgctggcttggccgccccaggccctgtggacaaattcttggaagtattatgcttacacccagttctgtcttcctgggagcgcccgcccaatccccgaacctttggtccagcttgccgtggataagggctaccgcattgctgaaggtaatgagccaccctggtgtttttgggacgttcccctgatttattcctacatccaggatgtatactggaacgttgggtttctgaagtattacgagctgaagcaggtgccgaacttcttactggccgctcctgtggccattctggttgcgtgggccacctggacttatgtgacgacacatccatggctatgcctgactctgggcctccagcgctccaaaaacaacaagacactggaaaagccggacctcggattcctgagccctcaagtgtttgtgtacgtcgttcacgctgctgtccttcttctgttcggtggactgtgcatgcatgtgcaggtgctgactcgttttctcggaagcagcacccccatcatgtactggtttcctgctcacctgttgcaggaccaggaacccttgctgagatctttgaaaaccgtgccttggaaaccactggccgaagattcccctcccgggcagaaggtgcctcgaaaccctatcatggggctgctctatcattggaaaacctgcagtcccgtgacccggtacatccttgggtacttcttgacctactggttgcttggcttgctgctccactgcaatttcctgccatggacttag

SEQ ID NO: 199220 - DNA, 549 bp, synthetic construct
  misc_feature 1..549: note = Description of Artificial Sequence: Synthetic coding sequence
  source 1..549: mol_type = other DNA
atgtggccccaggaccccagccggaaggaggtgctgcggttcgccgtaagctgcagaatcctcaccctcatgctccaggccctcttcaacgcaatcatccccgatcaccacgcagaggctttttcccccccaaggctggcgccgagtggttttgtcgatcagctagtggaaggactgctgggaggactttcccactgggatgcagagcacttcctttttattgccgagcacggttacttatatgaacacaatttcgccttctttcctggctttccgctcgccttgctcgtaggtacagagcttcttaggcccctgcgtggactcctaagtttgaggtcctgtctgctcatttccgttgcatcgctaaacttcctgttttttatgctggccgctgtcgctttgcacgatctgggatgcctcgtgctgcactgtccccaccagtcattttatgccgccctgttgttctgcctgagtccggctaatgtcttcctggccgcaggttactctgaagcactatttgccctcctcactttcagcgccatgggctag

SEQ ID NO: 199221 - DNA, 1515 bp, synthetic construct
  misc_feature 1..1515: note = Description of Artificial Sequence: Synthetic coding sequence
  source 1..1515: mol_type = other DNA
atgagcgagaagcagatgaaggaggccttcgtgagcaacctgaacggcacgacagtgcttgagataactcagggactctgcttccctgcattctgcatactctgtcgtgggttcctcatcatattttcacagtatctttgctcctttagcccgacatggaaaactcgcttcctgaccgactttgtggtcctgatcgtgcccatggtagctacccttacgatatgggcttcgtttatcctgctcgaactgcttggtgttatcatatttggagcaggcctgctctatcagatctataggcgaaggacctgttatgcacgacttcctttcctcaagattctcgaaaaatttttgaacatatcattagagtcagaatataatcccgcaattagctgcttccgcgtaattacatcagctttcactgctatcgctattctggctgttgactttcccctgtttcctagacgatttgcaaaaacagagctctacggcaccggagccatggatttcggcgtcggcggtttcgtctttggttctgccatggtctgcctagaagttcgccgtagaaaatatatggaggggagtaagcttcactattttaccaatagcctgtacagcgtgtggccactcgtgtttctggggatcggccgcctggcgatcattaagtctattggttatcaagagcatttaacagagtatggtgtgcactggaatttctttttcacaataatcgtggttaaacttatcacccctctgctgctgatcatctttccactgaacaagtcctggatcatcgccttggggattacagtgctgtatcagctggccttggactttacaagcctgaaaaggctgatcctatacggtactgatggaagtggaacccgtgtgggcctgctaaatgctaatagagagggcattatcagtacccttggatacgtcgccatccacatggccggagtccagaccggactctacatgcacaagaaccgctcacacatcaaggatctcataaaggtcgcttgttttcttcttctcgccgccataagtctgtttatcagcttatacgtggtccaggttaatgtggaggccgtgtcccggcggatggccaacctggcgttttgcatctggattgtggcttccagcttgatcctgctttccagtctgctgcttggcgatattatattgtcttttgcaaagttcctaataaaaggggccctggtgccatgttcatggaagctgatacagagccccgttacgaacaaaaaacatagcgaaagcctcgttcctgaagctgaacggatggagccgagcctctgcttgataacggcattaaaccggaagcaactgatcttttttctgctcagcaacataaccaccgggcttatcaatcttatggtagatactctgcatagcagtactctttgggcactttttgtggttaatctttacatgttctcgaactgcttaatcgtatatgtgctttacctgcaggacaagaccgtacagttttggtag

SEQ ID NO: 199222 - DNA, 318 bp, synthetic construct
  misc_feature 1..318: note = Description of Artificial Sequence: Synthetic coding sequence
  source 1..318: mol_type = other DNA
atgagcgagaagcagatgaaggaggccttcgtgagcaacctgaacgggacaacagttctggagatcacccaggggctgtgcttccccgctttttgtattctgtgtcgcggctttctgattatttttagccagtacttatgttctttctcgcccacctggaagaccagatttttaacagatttcgtcgtgctgattgtacccatggttgctactctgactatttgggctagttttatcctcttggaactgttaggggtgataatcttcggcgccggccttttgtatcaaatttacagacggcggacctgctacgcgtag

SEQ ID NO: 199223 - DNA, 831 bp, synthetic construct
  misc_feature 1..831: note = Description of Artificial Sequence: Synthetic coding sequence
  source 1..831: mol_type = other DNA
ctggccgcccgggtggccgccgtgcgggccgccgcctggctgctgctgggtgccgccaccgggttgaccagagggcctgctgctgccttcacagcagcccgcagtgacgctggcataagggccatgtgctcagagattattctccgacaagaggttctaaaggacgggttccaccgggatcttctcataaaggtaaaatttggcgaaagcatcgaggacctgcatacctgcaggttacttattaagcaggatatacccgcgggtctctacgtcgacccctatgaattagcttcacttcgagagcggaatataaccgaggcggttatggtttcagagaattttgacatagaagccccaaactacctcagcaaagaaagcgaagtgcttatttatgcaagacgggattcccagtgcattgattgctttcaggctttccttccggtccactgtcgctatcatcggccccattccgaggatggtgaggcgagcatcgtcgttaataaccccgatctgctcatgttctgcgaccaggctggctccaggcgtatgatccgatttagatttgattcatttgataaaaccattgagttccctatactgaagtgctgggctcattcagaggtggccgctccatgtgccctggagaacgaagatatatgccagtggaataagatgaagtacaaatccgtgtacaaaaatgtaattctccaggtacctgtggggctgacagtgcacacaagtcttgtatgttctgtgaccctactcatcacaatcctgtgtagcaccctcattctggtggccgtgttcaagtacggccacttctcactttag

SEQ ID NO: 199224 - DNA, 654 bp, synthetic construct
  misc_feature 1..654: note = Description of Artificial Sequence: Synthetic coding sequence
  source 1..654: mol_type = other DNA
atgtgcagcgagatcatcctgcggcaggaggtgctgaaggacggcttccaccgggacttactgattaaggtgaagtttggcgaatccatcgaagacttacacacttgcagactactgataaaacaggatatacccgcagggctttacgtggatccttatgagctggcttccctcagggagcggaatatcactgaagccgttatggtctcagagaattttgatatagaagccccgaattatctgtctaaagaatcagaagtcctgatctacgctcgcagggacagccaatgcatcgactgtttccaggcattcctgccggtacattgcaggtatcaccgccctcactccgaggacggcgaggccagcattgtcgtgaacaacccggacctattaatgttctgcgatcaggaattcccgattcttaaatgctgggcccatagcgaggttgccgctccctgtgctttggagaatgaagatatttgccaatggaacaagatgaagtacaaaagtgtgtacaagaatgtcatccttcaagtgccagtgggtcttacagtccacaccagcctggtctgttccgttacacttttgatcacaatcctctgctcaacccttattctcgtagctgtgtttaagtacgggcacttttcgctctag

SEQ ID NO: 199225 - DNA, 777 bp, synthetic construct
  misc_feature 1..777: note = Description of Artificial Sequence: Synthetic coding sequence
  source 1..777: mol_type = other DNA
ctggccgcccgggtggccgccgtgcgggccgccgcctggctgctgctaggtgctgcaactggcctgacccgtggccccgcagccgccttcacagccgcacggtcagatgccggcatccgggcaatgtgtagcgagattatcctacggcaggaggtgttgaaagatggtttccatagagatttactcatcaaggtaaagttcggagagtccatcgaggatctgcacacttgtagacttttaattaagcaggacatccccgctggattgtatgtcgacccatacgaactggcgagtctgagagagcgcaatatcaccgaggccgtgatggtcagcgaaaattttgatattgaagccccaaactatctttcaaaggagtctgaagttctcatttatgcgaggagagatagccagtgcatcgactgttttcaggcgttcctgcctgtgcactgccggtatcacaggccccatagcgaggacggcgaagcctcaatcgtcgtgaacaaccccgatctcctgatgttctgcgaccaggagttccctatcttgaagtgttgggcccattctgaggtcgcggccccttgcgctctggagaatgaagacatttgccagtggaacaaaatgaaatataaatctgtgtataaaaatgtgatcctccaagttccagttggactgaccgtacacacctccctggtatgcagtgtaacacttctcatcacaatcctttgctcaactctaattctggtggcggttttcaaatatggccatttctccttgtag

SEQ ID NO: 199226 - DNA, 507 bp, synthetic construct
  misc_feature 1..507: note = Description of Artificial Sequence: Synthetic coding sequence
  source 1..507: mol_type = other DNA
atggtgagcgagaacttcgacatcgaggcccccaactacctgagcaaggagtccgaggtactgatttacgccaggagggactcccagtgcattgactgctttcaggcattcctgcccgtgcattgccgctaccaccggccacatagtgaggatggcgaggcatccatagtggtgaacaacccagacctgctgatgttctgtgatcaggcaggatctaggcgcatgatcagatttcgattcgattcctttgataagacgatcgagtttcccattctcaagtgctgggcccattccgaagttgccgctccttgcgctctggagaatgaggacatttgccaatggaacaagatgaaatataaaagcgtgtacaagaatgttatcctgcaggtgcctgtcggattgaccgtccacacctccctggtatgttccgtcaccctgcttataaccatcctttgctctaccctaatcctggtggccgtgttcaagtatggccatttcagcctctag

SEQ ID NO: 199227 - DNA, 1740 bp, synthetic construct
  misc_feature 1..1740: note = Description of Artificial Sequence: Synthetic coding sequence
  source 1..1740: mol_type = other DNA
atgcagatctgcggcagcagcgtggccagcgtggccgccggcaccagcttccaggtcttggggcccgtctgttggcaacagcttgatctgaagatggcggtgcgggtgttatggggtggactgtcactcctccgagtgctctggtgccttctcccccaaacgggctacgtgcacccagacgaatttttccaaagtcccgaggtgatggccgaggacatcttaggggtgcaagctgcaaggccttgggagttctacccttcatccagttgcagatccgttctgttcccgctgctgatctctggtagtacattttggctgctgcgcctctgggaggaattgggcccctggccggggctggtctcaggatacgccctgctcgtgggaccaagacttttgcttacagcactaagctttgccttggatggcgcggtttatcatcttgctccccctatgggtgctgatcggtggaatgctctagctctgctttcggggagctacgttacgctcgtgttttatacacgcaccttctcaaacactatagaggggttgttgtttacctggcttcttgtcctcgtctcaagtcacgtaacatggggacccactcgcaaagagcctgccccgggcccccgctggaggtcttggctcctgggagggatcgtggccgcaggctttttcaatcgccccacttttctcgcatttgccgtagtgccactgtatctatggggtaccaggggagccaccaatcccgggctgaagagtcttacccgggaagcactggtccttctgccaggggccgctctgaccgctgccgtctttgtcgcgactgattcatggtacttctctagccccgctacatcacgaaatctggtactaacacccgtcaacttcctgcattacaacctgaatccacaaaatctcgcacgacacggtacacatgcacgcttgacccatttagccgtgaacggcttcctgttgtttggcgtgctgcatgctcaggcactgcaggccgcatggcaaagactccaggttgggctgcaggccagcgctcaaatgggattgttgcgcgccctaggagcacgaagccttctttcatcccccagaagctatttgttgctcttgtattttatgccactggctttgctatctgccttcagccaccaggaagcgcgctttctgattccattgctggtgccactggtgctcctgtgctctccccagacacaaccagttccatggaaaggcaccgtagtcctgtttaacgcactgggggctcttttgtttgggtgcctgcatcagggtggcctggtccccggtctagaatatctcgagcaagttgtgcacgcccccgtgttgccaagcacccctacgcactataccctgctgtttactcacacgtatatgccccctcgccatctcctgcacctgcctggcttgggcgcaccagtggaagtagtagatatgggcgggacagaggactgggcgctgtgccagaccctgaaaagctttacccgccagcccgcatgccaggtggctggtggaccgtggctgtgccgtctgttcgtggtcactcccgggactaccaggagagccgtagaaaagtgctcgttccccttcaaaaacgagacacttctgtttccacaccttacgcttgaagatcctccggccctgagttccctgctcagcggtgcttggcgggatcacttatcccttcacatagtggagttaggagaggagacttag

SEQ ID NO: 199228 - DNA, 813 bp, synthetic construct
  misc_feature 1..813: note = Description of Artificial Sequence: Synthetic coding sequence
  source 1..813: mol_type = other DNA
atggtgctgctgaaggagtaccgggtgatcctgcccgtgagcgtggacgaataccaggttggccaactctacagcgtggccgaggcttctaaaaatgagacaggggggggagagggagtggaggtgctggtgaacgaaccatatgaaaaagatggcgaaaaaggccagtatactcacaagatctaccatctgcagtccaaggttccaacatttgttagaatgctggcgccggagggagcgctgaacatccatgaaaaggcgtggaatgcgtacccgtactgtcggactgtcatcacaaacgagtacatgaaagaggacttcctgattaagattgagacgtggcacaaaccggacctcggcacacaggagaatgtacacaagttggagccagaggcctggaaacacgttgaagccgtgtatatcgatatagctgacaggagtcaagttctgtctaaagattacaaagccgaggaagacccagcaaagttcaagtctattaagacaggccgtggcccccttgggccgaactggaagcaggagctcgtgaatcaaaaagattgcccatatatgtgcgcgtataaactggtcaccgtcaagtttaagtggtggggactacaaaataaagtggagaatttcatccacaagcaagaaagaagactcttcacaaattttcacagacagctgttttgttggctagataagtgggttgacctgacaatggacgacatccggcgaatggaagaggagacgaagcgacagcttgacgaaatgcggcagaaggaccctgtcaaaggcatgactgcagacgactag

SEQ ID NO: 199229 - DNA, 813 bp, synthetic construct
  misc_feature 1..813: note = Description of Artificial Sequence: Synthetic coding sequence
  source 1..813: mol_type = other DNA
atggtgctgctgaaggagtaccgggtgatcctgcccgtgagcgtggatgagtaccaagtgggccagctgtactctgtggctgaggcgtcaaagaacgaaaccggagggggcgagggcgtggaagtgctggtgaatgagccatacgaaaaggacggcgagaaagggcagtacactcacaaaatctaccacctccagagcaaagtccctacatttgttcgcatgctggctccagaaggagcccttaatatccatgagaaagcatggaatgcctatccgtattgccgcacagtcctgccaaacgagtacatgaaggaggattttctgattaaaatagaaacgtggcacaagccagacctgggcacccaagaaaatgtccataagctggagcccgaggcctggaaacacgtcgaggcggtgtatatcgacattgccgatcgctctcaagtgctcagtaaggactacaaagcggaagaggacccagctaaattcaagagtattaagacggggcgtggcccactggggccaaattggaagcaggagctcgtaaaccagaaggattgcccctacatgtgtgcatataagctggtaactgtgaaattcaagtggtggggcctccagaataaggtcgagaattttatccacaaacaagagcgaaggctcttcacaaatttccacagacagctcttctgctggctggataaatgggtcgatctcactatggacgacatcaggcgaatggaagaggaaactaaaaggcaacttgatgagatgcggcagaaagaccccgtcaagggcatgaccgcggatgactag

SEQ ID NO: 199230 - DNA, 594 bp, synthetic construct
  misc_feature 1..594: note = Description of Artificial Sequence: Synthetic coding sequence
  source 1..594: mol_type = other DNA
atgctggcccccgagggcgccctgaacatccacgagaaggcctggaatgcatatccctactgccgtactgtgttgcctaatgaatatatgaaagaggatttcctcatcaagattgagacctggcataagcctgatcttggcacacaggaaaatgtacacaaactggaaccggaagcctggaagcacgtggaagccgtatatatcgacatcgccgatcgatcccaggttctgtctaaggactataaggcagaagaggaccctgcaaaatttaaatcaataaagaccgggaggggtccgctgggccctaattggaaacaggaactggtgaaccagaaagactgtccctacatgtgcgcctacaaactcgtaaccgtaaagttcaaatggtgggggctgcagaataaggtcgagaactttatccacaaacaggagcgaaggttgtttactaattttcatcggcaactgttttgctggctcgacaagtgggtggacctgaccatggatgatattagacggatggaagaggagaccaagcgacagctggacgagatgaggcagaaagatcctgtcaaggggatgactgcagacgattag

SEQ ID NO: 199231 - DNA, 819 bp, synthetic construct
  misc_feature 1..819: note = Description of Artificial Sequence: Synthetic coding sequence
  source 1..819: mol_type = other DNA
atggtgctgatcaaggagttccgggtggtgctgccctgcagcgtgcaggaatatcaggtggggcaactttattccgtggcggaggccagcaaaaatgagaccggtggaggagagggcatcgaagtgctcaaaaacgagccctacgaaaaggatggggaaaagggtcagtatacgcacaagatctaccacctgaaaagtaaagtccccgcctttgttaggatgattgctccagagggctctctcgtgtttcatgagaaggcttggaatgcttacccctactgtaggactatcgtgacaaacgagtacatgaaggatgacttctttatcaagatagagacctggcacaagcccgacttgggcacgttggagaacgtgcatggactggatccgaatacctggaagaccgtggaaattgttcatatcgatatcgcagatcggagccaggtcgagccagccgattacaaagcagatgaggatcctgctctgtttcagtccgtcaagaccaaaagggggcccctgggtccaaattggaagaaggaacttgcaaattcacccgactgccctcagatgtgtgcttataagctggtgaccatcaaatttaaatggtggggcttgcagagcaaagtggaaaacttcatacagaagcaggagaagaggatcttcaccaactttcaccgacagctattctgttggattgacaagtggattgacctcactatggaggacatccgccgcatggaagatgagacacaaaaagagcttgagacactgcggaaccagggccaggtcagaggcacaagcgcggcctccgacgaatag

SEQ ID NO: 199232 - DNA, 816 bp, synthetic construct
  misc_feature 1..816: note = Description of Artificial Sequence: Synthetic coding sequence
  source 1..816: mol_type = other DNA
atggtgctgatcaaggagttccgggtggtgctgccctgcagcgtgcaggagtaccaagttggtcagctgtactccgttgcagaggcttctaagaacgaaacaggggggggggaaggcatagaggtgttaaaaaacgagccgtacgagaaggatggtgagaagggccagtacacccacaagatataccatctgaaatccaaggtcccagcttttgtccgcatgattgctccggaaggctccctggtgtttcacgagaaggcatggaacgcctatccatactgtcgtaccattgttacaaacgaatacatgaaagatgacttttttataaaaatcgaaacctggcataagcccgatttaggtaccttggagaacgttcatgggctagaccctaacacctggaaaactgtggaaattgttcacattgatatcgcagatcgtagtcaggtagaacctgctgattacaaagcagatgaagatccagcccttttccaaagcgtcaagaccaagaggggcccactcggtcccaattggaagaaagaactggccaatagtccggactgtccacagatgtgtgcctataaacttgttacaattaagtttaaatggtggggcctgcagtctaaagtggaaaactttatccaaaagcaggagaagcgaatattcactaactttcatagacagctcttctgttggatagacaaatggattgatctgactatggaagatatcagacggatggaggacgagacccagaaggaactggagacaatgagaaaaagaggctcggtgcgcggaaccagtgctgccgatgtatag

SEQ ID NO: 199233 - DNA, 363 bp, synthetic construct
  misc_feature 1..363: note = Description of Artificial Sequence: Synthetic coding sequence
  source 1..363: mol_type = other DNA
atgatcgcccccgagggcagcctggtgttccacgagaaggcctggaacgcctacccatactgccggacgattgtcacaaatgaatacatgaaagatgacttcttcattaaaatcgagacgtggcacaaacccgatcttggaacacttgaaaatgtgcacggactcgatcctaatacttggaaaaccgttgagatcgtgcatatcgacatcgcggacaggagccaggtggagcctgccgattacaaagcggatgaggaccctgcattgttccagagcgtgaagacaaaaagggggccccttggacccaactggaagaaggagcttgccaattcccccgattgcccccagatgtgtgcatactag

SEQ ID NO: 199234 - DNA, 507 bp, synthetic construct
  misc_feature 1..507: note = Description of Artificial Sequence: Synthetic coding sequence
  source 1..507: mol_type = other DNA
atgggcgacctgctgatggagaagtgccgggtggtgctgccctgctccgtccaggagtatcaggttggacaactctattccgtggccgaagcctctaagaacgagactggtgggggcgaaggcattgaagttctcaaaaatgaaccctacgaaaaggacggcgaaaaaggccagtacacccacaagatttaccacttgaaatctaaagtgcccgctttcgtgaggatgatcgcacccgagggcagtcttgtgtttcacgagaaagcttggaacgcctatccatactgtcggacaatcgtgaccaatgagtatatgaaggacgactttttcattaagattgagacttggcacaaacccgacttggggaccctggaaaatgtgcacggcctggaccccaatacctggaagacggtggaaatcgttcatatcgacatcgctgatcgcagccaggtcgaacctgcggattataaagccgacgaggatccggcgctcttccagtcagtgtag

SEQ ID NO: 199235 - DNA, 822 bp, synthetic construct
  misc_feature 1..822: note = Description of Artificial Sequence: Synthetic coding sequence
  source 1..822: mol_type = other DNA
atgggcgacctgctgatggagaagtgccgggtggtgctgccctgcagcgtacaagaataccaagtcggccaactctatagtgtcgcagaggcttctaaaaatgaaactggtggtggagaaggcattgaggttttgaaaaatgaaccttacgaaaaggacggcgaaaagggccagtacacccataagatctaccatctgaaaagcaaagtacccgcattcgtgaggatgatagccccggaaggctctctcgttttccatgagaaggcttggaacgcgtatccatactgtcgaaccatcgtgaccaacgaatatatgaaagatgatttctttattaaaatcgagacatggcataaaccggacctggggactttggaaaatgtacacgggctcgaccccaacacatggaagactgtagaaatagtgcacatcgatatcgcagaccgaagccaagtggaacctgctgattataaggctgacgaagaccccgcactgttccaatctgttaagacaaagagaggccctctgggcccaaattggaaaaaggagctcgcaaatagccctgactgcccgcagatgtgtgcctacaagctggttactattaagtttaagtggtggggtttacagagtaaggtggaaaatttcattcagaaacaggagaagaggatttttacaaacttccaccgccagttattctgctggattgataagtggatcgacctgacaatggaggatatacgtagaatggaggatgagactcaaaaagagctggagactatgagaaaaaggggctcagtgcgcggaaccagtgctgcagacgtatag

SEQ ID NO: 199236 - DNA, 4980 bp, synthetic construct
  misc_feature 1..4980: note = Description of Artificial Sequence: Synthetic coding sequence
  source 1..4980: mol_type = other DNA
atggaggcccccagcggcagcgagcccggcggcgacggcgccggcgattgtgcgcaccctgatccaagggccccaggtgccgccgccccatcctcaggccctggaccctgtgcagcagcacgggaatcagagagacagctcaggttgagattgtgcgtgctgaatgagattctgggaacagaacgcgactatgtgggaacacttcgtttcttacagagtgcttttctgcacagaatccgacagaatgttgcagattcagtagaaaagggtctcaccgaagaaaatgttaaggtgctcttctcgaatatcgaggatattctcgaagtgcacaaggacttcctggcggctttagaatactgcctccatccagagccccagtcccagcacgaactcgggaatgtgttcctcaagttcaaggataagttttgtgtctacgaggaatactgtagcaaccacgaaaaagctctcaggctgctggtggaactgaataaaattcccacagttcgcgcgttcctgcttagctgcatgctgttaggtggtcgcaaaactacggacattcctctggagggctatttattgagccctatccagcgaatctgtaaatatcccctgcttttgaaagagctggctaaaagaacccccggcaagcacccggaccaccccgccgtccagtctgcccttcaagcgatgaagacagtgtgttctaacattaacgaaactaaacgacaaatggagaaactcgaagcccttgagcagctgcagtcccatatcgagggctgggaaggaagtaaccttacagatatttgtacccagctcttgttgcagggtaccctactcaaaatcagcgccggaaacattcaggagcgggcgttttttctgtttgataatctcctcgtgtactgcaaaaggaagagtagggtgaccggctcaaagaagtctacaaaacgcactaagagcattaacggttcactgtacattttccgaggtcgaattaataccgaagtgatggaggtcgaaaatgtcgaggatggaaccgcagactaccacagcaatggctataccgtgacaaatggatggaagatacacaatacagctaaaaataagtggttcgtttgtatggccaaaaccgcggaggagaaacagaaatggctggatgccataattcgggaaagggagcaaagggaaagcctcaagctgggaatggaacgagatgcctacgtcatgattgctgaaaagggtgagaagctgtaccacatgatgatgaataaaaaggtcaaccttatcaaggatcgacgacgaaaactctctacggtgcctaaatgtttcttggggaacgagtttgttgcatggctgctggagattggggagatcagcaaaacggaggagggtgttaacctggggcaagccctattggagaatggcattattcaccatgttagcgacaagcatcagtttaaaaacgagcaagtgatgtatcgattccgctatgatgacggcacttataaagcccgcagcgaactagaagacataatgtctaagggcgttcggctctattgccgcctgcatagcctctacacgcccgtgataaaagatcgtgactaccacttaaagacctacaaaagtgtcctgccaggctcgaagttggtggactggcttctggcacaaggtgactgtcagacacgggaggaggctgtggctctcggcgtaggcctctgcaacaatggatttatgcaccatgttctggagaagtctgaattcagagacgagtcccagtatttccgcttccacgccgacgaggaaatggagggcacttctagtaagaacaaacaactgagaaacgactttaaacttgttgagaacatcctggccaaacgactgcttatactgccacaggaagaggattacggcttcgatatcgaggagaagaacaaggccgtggtggtcaagagtgtgcagcgcggcagtctggctgaagtggctggcttacaagtagggcggaaaatctactccatcaacgaagatctggtgtttctgagacccttctctgaagtggaatcaatacttaatcagagcttctgctctcgtcgacccctgaggctgttggttgctactaaagccaaagaaatcatcaagatccccgaccagccagatacactctgctttcaaattaggggcgccgcaccaccatatgtctacgcggttggcagaggatccgaagccatggcagccggcctgtgcgcaggacagtgcatcctgaaggtgaacggatctaatgtcatgaatgacggggcccccgaagtcttagaacattttcaggcattccggagtcgtagggaggaggccctcggcctgtatcagtggatctatcatacgcacgaagatgcccaggaggctagagcgagtcaggaggctagtacagaagacccaagtggagaacaggcccaagaagaggaccaggccgactcggcattccctctgttgtccctcggcccgaggctgtcgctgtgtgaggattccccaatggtgaccctgactgtggataacgtgcatctggagcacggcgtggtctatgaatacgtgtctaccgcgggggtaaggtgtcatgttttagaaaagatcgtggaaccccgtggatgcttcggactgactgccaaaatcctggaggccttcgccgccaatgactctgtcttcgtggaaaactgtagaaggcttatggccctgagttctgccatcgtaactatgccgcactttgagttcaggaacatctgtgacacaaagctcgagagcataggccaaagaatcgcttgctaccaagaatttgcagctcaactcaagagccgagtgtctccgccatttaagcaggcaccacttgagccacaccctctgtgcggcctagatttctgcccaacaaactgccacatcaacctgatggaagtgtcatatccaaagaccacacccagtgtcggccgctctttctcaatcaggtttgggcgcaaaccaagccttatcggcctggaccctgaacaaggccacctaaatcccatgtcctacacccagcactgcattacgaccatggccgcgccatcgtggaagtgcttaccagctgcagagggcgaccctcaaggccagggtctacatgatggcagctttgggccggccagcgggactttggggcaggaagatagaggccttagctttttgctgaagcaggaggatcgcgaaatccaggacgcctatctgcagctattcactaagcttgatgtggccctcaaggagatgaagcaatatgtcactcagattaatcgtctgctgagcacaatcacggagccaacttcgggcgggagctgcgatgcatcgctggctgaggaagcatcttccctgccactggtttcagaggagagcgagatggaccgtagcgaccatggaggcatcaagaaagtctgctttaaggtggcagaagaggatcaagaggactctggccacgatacaatgtcctaccgggactcatacagcgaatgcaatagcaaccgggattcggtccttagctacactagtgtgagatccaattcctcataccttgggtctgatgaaatgggaagtggagacgaactgccttgcgacatgcgcatccccagtgacaagcaggataagctgcacggctgtctagagcaccttttcaaccaagtggatagtatcaacgcccttttaaaagggcccgtgatgagccgcgccttcgaagagactaagcactttccaatgaatcacagtttacaggaatttaaacagaaggaggaatgtactattagaggccggtccctgatccagatttccattcaggaggacccatggaatttaccaaactctataaaaacactggtagacaacatacagcgatacgttgaagatgggaagaatcaactgcttctagcccttctcaaatgtactgataccgagctccagcttaggagggacgctatattttgtcaggcactggttgccgctgtgtgtacttttagtaagcaattactagcagcactcggttatcgctacaataataatggggagtacgaagagtcctcacgggacgcctcccgcaagtggttggaacaggtcgctgcgacgggcgtgttgctgcactgccagtcactgctgtcgcccgccaccgtgaaggaagagcgtaccatgttggaagacatttgggtgacactgagcgaattagataatgtgacattttccttcaaacagctggatgaaaattacgtcgcaaacaccaacgtgttctaccatattgaaggcagcaggcaggctttaaaggtgatcttctatctggactcataccacttcagcaagttaccaagcaggctggagggtggggcctctctgaggttgcatacagcactgtttacgaaggtactggaaaatgtcgaggggctcccaagtcctggcagtcaggccgccgaggacctccagcaggacatcaacgcacagagtctggaaaaagtccagcagtattatcgcaaactgcgggctttctatttggagaggtctaacctccccactgacgcctccaccactgctgtgaagatagatcagcttatccgccccatcaacgcacttgacgaactgtgtcgtctgatgaagtcatttgtgcaccctaaacctggagccgcgggaagtgtgggcgcaggcctcattccaataagttcagagttgtgctatcgactgggagcctgccagatggtcatgtgtggtactggaatgcagcgtagtacactctctgtgagcttggagcaggcagctatcttggccaggtctcacggattgctacccaagtgtatcatgcaagcaacagatatcatgcgaaagcagggcccccgcgtggagattttggccaaaaatctcagggtgaaagatcaaatgccccagggagcaccgcgtctctacagattgtgccagccaccagtggacggcgatctctag

SEQ ID NO: 199237 - DNA, 4686 bp, synthetic construct
  misc_feature 1..4686: note = Description of Artificial Sequence: Synthetic coding sequence
  source 1..4686: mol_type = other DNA
atggaggcccccagcggcagcgagcccggcggcgacggcgccggcgattgcgcccaccctgatcccagggcacccggcgccgctgctccgagcagtggaccaggaccctgtgcggctgcaagagagtccgagcggcaactgagactcagactgtgtgttctgaatgagattctgggcactgagagagattatgtgggcaccctccggttcctgcagagtgcctttctgcaccgaatcagacagaacgtcgcagactccgtggagaaaggcctcacggaggagaatgtcaaagtgctcttctctaacatcgaggacatcctcgaagttcacaaggatttcctggccgccctagagtattgcctgcatccagagccccagtctcaacatgagttgggaaatgttttccttaaatttaaagataagttttgcgtctatgaggagtattgtagcaatcacgagaaggcgctgcggctactggtggaactgaacaaaatacccactgtccgggccttcttattgtcttgtatgcttctcggggggcgaaagacaaccgatatccccctggaagggtacctcttgtctcccatccaaagaatttgtaagtaccctctgctcctgaaagagctggccaagagaactccgggaaagcatccggaccaccctgcagtccagagtgctctgcaggctatgaagaccgtgtgctccaatataaacgagacaaaacggcagatggaaaagctcgaagcactcgagcagttgcagtcccacattgaaggatgggagggtagtaatttgaccgacatctgcactcaactcttgctccaaggcacccttctgaaaatatctgccgggaatattcaggagcgtgcctttttcctgtttgacaacttactggtgtattgcaagcggaaatcaagggtgaccggtagtaagaagtcaactaaaagaacaaaatcgattaatgggtctctgtacattttccgcggccggataaacacggaagtgatggaggtcgaaaatgttgaggatggcactgcagattatcactctaacgggtatacagtcacaaacggttggaagattcacaacacggccaagaacaagtggttcgtatgcatggcaaaaacagctgaggaaaaacagaaatggctggacgcaatcatccgcgagcgtgagcagcgtgaaagcctaaaacttggaatggaacgggacgcatacgtgatgatcgccgagaagggtgaaaagctgtaccacatgatgatgaataagaaggtgaacctcatcaaagaccgacggaggaagctttccaccgtccctaagtgctttctgggaaatgagtttgttgcttggctattagaaataggtgaaatttccaaaaccgaagaaggcgtcaatctcggccaggctctgttggagaatggaataatccatcatgtgagtgataaacaccagttcaagaatgagcaggtaatgtacaggttcagatatgacgatggtacatacaaagccagatccgagctggaggacataatgtcaaaaggcgtcaggctttactgtcgtcttcatagcctgtacaccccagtgatcaaggatagagattaccacttgaagacgtataagtcggtgctcccaggctcaaaattggttgactggctgctggcccagggtgactgtcagaccagggaagaggcggtggcactgggcgtgggactgtgcaataacggctttatgcaccacgtccttgaaaagtctgagtttcgagatgagtcccagtatttccgctttcacgccgacgaggagatggaagggacatcaagtaagaacaaacaactgagaaatgacttcaaactcgtggaaaacattctggctaagcggctgctgatcctgccccaggaggaggactacggatttgacattgaagagaaaaataaggccgtggtggttaagtccgtccaaagaggctccttggctgaagtggcaggcctgcaggtcggtcggaaaatttacagtatcaacgaggacctggtttttctgaggccgttcagcgaagtagaatctattttaaatcagtcattttgctctcggagacctctcaggttactcgtagccactaaagctaaggaaattattaaaatacccgatcaaccagacactctttgcttccagattaggggggcagcccccccttacgtctacgccgtaggacggggatccgaagctatggcagcagggttgtgcgctggacagtgtatcctgaaggttaatgggagtaatgtgatgaatgatggagctcccgaggtgctggaacacttccaggccttccgcagcagacgcgaggaggctctcgggctgtaccagtggatttaccacacccatgaggacgcacaagaagcacgcgccagtcaggaagctagcactgaggaccccagcggagagcaggctcaggaagaggatcaagcagatagcgcattcccactccttagtctcggccctcgactcagtttgtgcgaggattcgcctatggtgaccctcactgtggacaacgtgcacttggagcacggagtggtatacgaatacgtaagcactgctggcgtcagatgccatgtgcttgagaagatcgtggaacccagggggtgttttggcttaaccgccaagatactggaggccttcgccgctaacgactctgttttcgtagagaactgtcgacgcttgatggccctctcttcggctatcgtgaccatgcctcacttcgaattccgcaacatctgcgacactaagctggaaagcatcgggcagcgcatcgcatgctaccaggaatttgctgctcagcttaagagccgggtttcacccccttttaaacaggctccactagaacctcatcccctgtgcggtctcgacttttgcccaaccaactgccacatcaacctgatggaagtctcttatcccaagacgactccgtcggtgggacggtccttttctattaggtttgggagaaaaccttccttgatcggcctcgatccagaacagggacacctaaacccaatgagctacacccagcattgtattacgactatggccgctccatcatggaagtgtctgccggcggccgagggcgatcctcaggggcaggggctccacgacggcagttttggcccagctagtggaactctggggcaggaggaccgcggcctgtcttttctgctcaagcaagaggatagagagattcaggacgcctacctacagcttttcaccaaacttgacgtggcccttaaagagatgaaacagtacgtgacacaaattaaccgccttctctcaacaatcacagaacccacttcgggaggatcttgcgatgctagtttagccgaggaagcttcctccctcccattagtcagtgaggagagcgaaatggaccgatcagatcacggcggaatcaaaaaggtttgctttaaggtcgctgaagaggatcaagaggattcgggtcacgataccatgtcttatagggactcttattccgaatgtaactccaaccgcgattcagtcttgagctacacaagcgttcggtcaaactctagttacctgggatctgatgagatgggcagtggggatgagctgccttgtgacatgagaatcccgtctgataagcaggataaactacacggatgcttagaacatttgtttaatcaggtggattcgatcaacgccctgctgaagggccccgtcatgagccgcgcattcgaagaaacaaagcattttccaatgaatcacagtctgcaggaatttaagcagaaagaggaatgcactatccggggacggtctctgattcaaatctcaattcaggaagacccctggaatctaccaaattcaataaagacactcgtggacaacattcagcgctacgtcgaggatgggaagaatcaattgttgctggcgctactgaagtgtaccgacaccgaactccaactaagaagggatgctatcttctgccaagccttagtagccgctgtgtgcactttttctaagcagctgctcgccgccctcgggtatagatataacaacaatggagaatacgaggagtcgagtcgcgatgcatctaggaagtggctggagcaggtagcagcgacaggggtcctgctacactgccagtcattactgtcccctgccactgtgaaggaagagaggaccatgcttgaggatatttgggtgaccttatctgaactggataatgtaacgttctcttttaaacagctggacgaaaattacgttgcaaacacaaacgtgttttaccacatcgaaggctctcgccaagcattgaaagttatattctacctggactcataccacttttccaaattgcctagcaggctggagggaggtgcgtccctccggcttcacacagctctgtttactaagggggaactacaggcctggggaagagaagaccatgggggaagggccaaggctactaagcataccggaagtcagcctccagctagaccgaggcacctgcctagccagtgctggagaacgtggcgagggtgtctgttgcaggctgcacgcccgaggcgcatttgttcccgcacaagcacaaggtctccatggcgaaagttcagttcaataaccgccaattctggacacttcacctggtctggattgacatgcccacgcatgccagctcctaggcgttag

SEQ ID NO: 199238 - DNA, 4821 bp, synthetic construct
  misc_feature 1..4821: note = Description of Artificial Sequence: Synthetic coding sequence
  source 1..4821: mol_type = other DNA
atgagcgaggacagccggggcgacagccgggccgagagcgccaaggacctcgaaaagcagctccgcctcagagtgtgtgtactgtcagagcttcagaaaacggagcgagactacgtgggcacattggagttccttgtgtccgcgttcctgcatagaatgaatcagtgtgctgctagcaaggtagataagaacgtgacggaggaaacagtaaaaatgctcttctccaatatcgaagatatcctggcagtgcacaaggaatttttgaaggtggtcgaggaatgcttgcacccggaaccaaacgctcagcaagaggttggcacctgcttcctccacttcaaggataagtttcgcatctacgatgaatattgtagcaatcacgaaaaggcacagaagctgctgctggaacttaataaaatcaggactatccgcaccttcctattaaattgcatgctactcggtggacggaagaataccgacgtccccctggaagggtacctggtaacacccattcagcggatctgcaaatatcccctgattctgaaggagctcttgaaacggaccccacgcaaacattcggattacgccgcagtgatggaagcactgcaggctatgaaggccgtgtgcagcaatataaatgaagcaaagaggcagatggagaaacttgaagttctggaagagtggcaatctcatatcgagggttgggagggaagtaacattaccgatacttgtacagaaatgctaatgtgtggggtgttgctgaagatttcgtccggcaatatccaagagcgtgtcttcttcttgtttgataacctgttagtctactgtaagcggaagcatcggcgcctgaaaaattccaaggccagtactgacggacaccgttatctctttagaggtaggattaacaccgaagtgatggaagtggaaaacgtggatgacggaaccgctgacttccattcctccggtcacatcgtggttaacgggtggaaaattcataacactgctaagaacaaatggttcgtctgtatggcaaagaccccggaagagaaacacgagtggttcgaagctatcctaaaggaacgggagcgtaggaaagggctcaaactaggaatggaacaggacacctgggtcatgatcagcgaacagggcgagaagctgtacaagatgatgtgccgtcaaggaaacctcattaaagataggaaaagaaagttgaccacctttcccaagtgtttcctgggctcggagtttgttagttggttgctggagatcggggagatccatagaccagaagagggggttcatctgggccaggctctgcttgagaatggaattatccaccacgtaacagataaacaccagtttaaaccagagcagatgttatatcgattcaggtacgatgacggaacattctaccctcgcaacgaaatgcaggatgttatctctaaaggggtgagactgtactgccgacttcacagcctgtttactccagtgatcagagataaagactaccacctgaggacctataagagcgtggttatggccaacaagctcatcgactggctaatcgcccagggggactgccgcaccagagaagaagctatgatctttggagtagggctttgcgataacggcttcatgcaccacgtcctcgaaaagtctgaattcaaggacgaacccctcctgttcagattcttcagtgatgaggagatggaggggtcaaatatgaaacacagactgatgaaacacgacctgaaggtggtggaaaatgtaatcgcgaaatccctgttgattaaatcaaatgaaggtagctatggctttggtttggaagacaagaataaagtccccataattaaactggtggagaaaggttcaaatgcggaaatggcaggtatggaggtcggaaaaaagatattcgcgatcaatggagatttggtcttcatgcgacctttcaacgaggtcgactgttttttgaaatcatgtctgaactccagaaagccacttcgcgtcctcgtgtcaactaaaccccgcgagacagtgaaaatccctgactctgctgatgggcttggattccagatccgaggatttggcccctccgtcgtgcatgcagtgggcaggggaacagtagccgccgctgccggacttcatcccggccagtgcatcattaaggtgaacggcattaacgtgtctaaggagacccacgccagtgtgatcgcccacgttacagcctgtcgcaaatatcgccggcctacaaaacaagactccattcagtgggtctacaactctatcgagagtgcccaggaagacctgcagaagagtcattccaagccaccaggagacgaggctggcgacgcttttgattgcaaggtagaggaagtaatagacaaattcaacaccatggctatcatcgacggcaagaaagagcacgtgtctctaacagttgacaatgttcatttggaatatggggtggtgtatgagtatgacagcacggctggcattaaatgcaacgtggtggagaaaatgatagaacctaaaggtttctttagcttgaccgccaagatcctggaggcgctggctaagagcgacgaacactttgtgcagaattgtactagtttgaactccctgaacgaggtcatcccaacggaccttcaatccaaattttctgccttatgtagtgaaagaattgagcacctctgtcagcgcatatctagctataagaaattttctcgtgtcctcaagaatagagcatggcctacgtttaagcaagccaaatctaaaatctctccactacacagttccgatttttgccctaccaattgtcatgtgaacgtgatggaggtaagctacccaaagacatcaacctcactaggctctgcattcggagttcagctggattcgcggaagcacaactcacatgacaaagaaaataagtccagcgaacagggtaagctgtctcccatggtttatatccagcatactatcaccacgatggctgctccctccgggctgtccctcgggcaacaggacggacacggcctccggtatctgcttaaagaagaggaccttgagacgcaggacatttaccagaaacttctcggcaagctgcagaccgcgcttaaggaggtggagatgtgcgtatgccagatcgacgacctactttcaagcattacgtacagcccgaagctcgaaagaaaaacatcagagggaatcatcccgaccgacagtgataacgagaagggggagaggaattctaaacgcgtttgcttcaatgtggctggggatgaacaggaggactccggccacgataccatctctaatagggacagctacagtgactgtaactccaaccggaattctattgcctccttcacctcaatctgttcttctcagtgctccagctactttcactccgatgagatggactctggcgacgaactgcccctatctgtacgcatatcgcacgacaagcaagacaagattcatagctgcctggagcacctgtttagccaggtggacagcatcaccaatttacttaagggccaggcggtagtaagggccttcgaccaaacaaaatacctgacccccggaaggggtctgcaggaattccaacaagaaatggaaccaaagctctcgtgtcctaagagactccgtctgcatatcaaacaggatccttggaatttgcccagcagtgtacggaccctcgctcagaatattaggaaattcgtggaagaagtgaagtgtcgactgctgctggccttattggaatatagcgattctgagacccagctacggcgcgacatggtattttgtcaaacactagttgcgactgtgtgtgcgttttccgagcagcttatggctgctctcaatcagatgttcgacaatagcaaagagaacgaaatggagacctgggaagcaagtaggcgctggcttgaccagatcgccaatgcaggtgttttgtttcacttccaaagtctgctcagtccgaatcttactgacgaacaggcaatgctcgaggataccctggtcgcactcttcgacctggagaaggtctctttttactttaaaccttccgaagaggagcccttggtggctaacgttcccctgacataccaggccgagggatcaagacaagcactgaaggtgtacttttatatagactcgtaccatttcgagcagttaccacaacgtctcaagaacgggggcgggttcaagatacatcccgttcttttcgcacaggcactggagagtatggaggggtattactacagagataacgtttctgtcgaagagttccaggctcagatcaacgccgcttcgctggagaaggtaaaacagtacaatcaaaagctcagagctttctatctcgataagtcaaactcaccccctaatagtactagtaaggccgcttatgtggataagttgatgagacctttgaatgcactggacgagctgtataggctggtcgctagcttcatcaggagcaaacgcaccgctgcctgtgccaatactgcctgttcagccagcggggttggccttctgagtgtgagttctgagctatgcaatcgccttggggcttgtcacatcattatgtgcagcagtggagtgcatcggtgcacactctccgtgactcttgagcaggccattatccttgcaagaagccacggcttaccacctaggtacattatgcaggcaactgacgtaatgaggaaacagggagctcgcgtgcaaaacactgccaagaacttgggggtgcgggaccgtacacctcagtcagcgcctcgactttacaagctgtgcgaaccgcccccccccgcaggtgaggagtag

SEQ ID NO: 199239 - DNA, 3525 bp, synthetic construct
  misc_feature 1..3525: note = Description of Artificial Sequence: Synthetic coding sequence
  source 1..3525: mol_type = other DNA
atgagcgaggacagccggggcgacagccgggccgagagcgccaaggacctggaaaaacagcttaggcttcgggtctgtgtgcttagtgaactacagaagacagaacgcgactatgtgggtactctggagtttttggtgtcagcgttcctgcaccggatgaaccaatgcgcggcaagcaaggtcgacaagaacgtcaccgaggaaacggtcaaaatgttattcagcaacatcgaagacatactagctgtgcataaagaattcttgaaagtcgtagaggaatgcctgcacccagaacccaacgcccagcaagaggttggaacatgcttccttcacttcaaagacaaattccgaatatatgatgaatactgctccaatcatgagaaggctcagaagctgctgctggaactgaacaagattcgcacaatacgaacctttctgttaaattgtatgttgctgggtgggaggaagaacacagacgttccactagaggggtatctggtcactccaatccaacggatctgtaaatatccactcatcctcaaggagctgctgaaacgaacccctaggaaacatagcgattacgccgctgtcatggaagcccttcaagccatgaaagctgtatgttccaacatcaacgaggctaaacggcagatggaaaaattggaagtattagaagagtggcaatcacatatcgaggggtgggagggcagcaatatcaccgatacttgcactgagatgcttatgtgcggtgtgctgctcaaaatatcatcaggtaacattcaggagcgcgtctttttcttgtttgataacctgctggtgtattgtaaacgcaagcaccggagacttaagaatagtaaagcttcaactgacggccatcggtatttatttcgcggccgaattaacaccgaggtaatggaggtggaaaatgtcgatgacggcactgcggacttccattcctccggccatatcgtagtgaatggttggaagattcacaataccgccaagaacaagtggtttgtctgcatggctaagacaccagaagaaaagcatgagtggtttgaggcaatccttaaggagcgggagcggaggaaaggacttaaactcgggatggagcaggacacttgggtgatgataagcgaacagggagaaaagctgtacaagatgatgtgccggcaggggaacctcatcaaggacaggaaacgaaagctgactacgttcccaaagtgctttttgggcagtgagtttgtttcctggctcctggagattggagagatccatcgcccagaggagggcgtgcacctggggcaggctcttttggagaacggcatcatacaccacgttactgataaacaccagttcaagccggagcaaatgctgtaccgctttcggtatgacgacggaaccttttatccccggaatgagatgcaggacgtcataagcaaaggcgtgaggttatactgccgccttcattcccttttcactcctgttatcagagacaaggactaccaccttcgcacctacaagtcagtcgtaatggcaaataaactgattgattggctgattgctcaaggcgattgcaggacaagagaggaggctatgatattcggtgttggactgtgtgacaacggcttcatgcatcacgtgttggaaaagtctgaatttaaagatgaacccctgttgtttaggttttttagcgatgaagagatggaaggcagtaatatgaaacatcggctgatgaaacacgatttaaaggttgttgaaaatgtcattgccaaatcccttctgatcaagtcaaacgagggctcatacgggtttggtcttgaagataaaaacaaagtgccaataatcaagctggtcgagaagggatccaacgccgagatggcgggcatggaggtgggtaagaaaatcttcgccattaacggcgatcttgtattcatgaggccttttaatgaagtggattgcttcctgaagagttgcctgaattcgaggaaacccttgagagttcttgtatctactaagccaagggagaccgtgaaaatccccgatagtgccgacggacttggcttccagattcgtgggttcggtcccagcgtcgtacatgctgtgggccgaggtactgtcgctgcggcagctggactccacccaggccaatgtataatcaaagtgaacggcattaatgtgtccaaggaaacgcacgcctctgtcattgcacacgtgaccgcatgtaggaagtacagacgaccaactaagcaggactcaatccagtgggtgtataactccatcgaatctgctcaggaggacctccagaagtcccatagcaagccccctggagatgaggctggggatgctttcgactgtaaggtggaggaagtcatagacaagttcaacaccatggccataattgatggaaagaaagagcacgtgagcctgacagttgataatgttcaccttgaatatggggtggtgtatgagtacgactccactgcaggcatcaagtgcaacgttgtcgagaagatgatcgaacctaaggggtttttctctctcactgctaaaatcctggaggccctcgcaaagtccgatgagcacttcgttcagaattgcacctctctcaattcactcaatgaggtgatcccaacagatctgcaatccaaattttcagcactgtgtagcgagcggatcgagcacctttgtcagcgcatcagctcatacaagaaggtgtctgtgttgctgattttgtacactatcatcgtggagatgtatcactttaccgagatgatcaccctgtacaatatcttagaactcgtcaggcctcccaacagcgagtttttttttagtttcctgcctactaaacgaatgaagaccctgaaccagaaaaaggtgacccacatgaaaaaaaccaacatccagctgcagttctccagggtgctcaaaaatcgagcctggccaacctttaaacaggctaaaagcaaaatatccccactccacagcagcgatttttgccctaccaattgccatgtcaacgtcatggaagtgagctatcccaagacctctacatctctgggttctgcctttggtgtccaatggaagctatctcctatggtgtacatccagcacactatcaccactatggccgcacctagtgggctatctctgggtcagcaggatggccacggtcttcgttacctgcttgagagaaagacgagcgagggaataattccgacggattccgacaatgaaaagggggaaaggaacagcaagcgggtctgcttcaacgtggctggcgatgagcaagaagacagtggtcacgacactatcagtaatagggactcctactcatttagtgactgtaacagcaaccgcaattctatcgcatctttcacctcaatatgcagtagccagtgcagctcttatttccactcagatgagatggattctggctcagacgagctaccgctgtccgttagaatttctcacgacaagcaggacaaaatccattcctgtctggagcatctcttttcccaatag

SEQ ID NO: 199240 - DNA, 1650 bp, synthetic construct
  misc_feature 1..1650: note = Description of Artificial Sequence: Synthetic coding sequence
  source 1..1650: mol_type = other DNA
atggccagcgccagcagcggccccagcagcagcgtgggcttcagcagctttgatcctgctgtacctagctgtaccctatccagcgcctccggcatcaaacggcccatggcctccgaggtgccctatgcttctgggatgccaatcaagaagatcggacacaggtccgtggactcctctggcgaaactacatacaagaagactacaagctctgcccttaagggagccatccagctgggcattactcacactgtgggcagcctcagcacaaagcccgagcgggacgtcctgatgcaggatttctacgtggtcgaaagtatcttctttcctagcgagggtagcaatttgactccggcacaccattacaacgattttagattcaagacttatgcccctgtcgcttttcggtattttcgagagctgtttggaattcgcccagatgattatctgtactcgctttgtagcgagcccctcatagagttatgcagttccggagccagcggatccctattttatgtctcttctgatgatgagttcattatcaaaaccgtacagcacaaggaggccgagtttctccagaaactcctccccggctactatatgaatctaaatcagaatccacggactctgcttccgaagttctatggattgtattgcgtgcaggcaggaggtaagaatatacgcatcgtggtgatgaacaacttattgccccggtcagttaaaatgcacatcaagtacgacttaaagggcagcacatataagagacgggccagtcagaaagaaagagaaaagccactccctacatttaaggatcttgacttcctgcaggacatccctgacggactgttcttggacgccgacatgtacaatgcactgtgcaagactctacaacgggactgcctggtccttcaatctttcaaaataatggactacagcttgttaatgagtatacacaacatcgaccacgcacagcgggaaccactctcaagtgaaacccagtatagcgttgataccagaagacctgctccccaaaaagctctctactcaacagcaatggagtccattcagggggaggccagacggggaggtaccatggagaccgatgatcacatgggtggaataccggcccgaaatagcaagggagaacggctgctcctgtacataggcatcatcgacattcttcaatcttatcgattcgttaagaagctggaacactcttggaaggcactggtccacgatggcgacaccgttagtgtacaccgacctggattctacgccgagagattccagaggttcatgtgtaacaccgtatttaaaaagatcccactgaaaccctccccaagcaagaaattcaggtccgggagctcattcagccgccgcgcaggctcttccggaaattcatgcattacctatcagccctcagtaagtggggagcataaggcccaggtaacaacaaaagcagaggtcgagccaggtgtccatctgggccgtcctgatgtgttgccgcagactccacccttggaggagatttctgaaggctcccccatccctgacccatccttctctccactggtgggggagaccctgcaaatgcttaccacatctactactttggagaaactagaagtagcggaatccgagttcactcactag

SEQ ID NO: 199241 - DNA, 1689 bp, synthetic construct
  misc_feature 1..1689: note = Description of Artificial Sequence: Synthetic coding sequence
  source 1..1689: mol_type = other DNA
atggccagcgccagcagcggccccagcagcagcgtgggcttcagctccttcgacccagctgtcccgagctgtacactctcttctgctgcttcagggatcaaacggccgatggcctctgaagtgctggaagctcgtcaagactcgtacatctctttggtcccttacgcaagcgggatgccaatcaaaaagattggccataggtcggtcgactcttctggtgagacaacgtacaaaaagactacttcatctgccttgaagggagctatccagttaggaatcactcacacggtgggaagtctttccactaaacccgagcgagatgtcctcatgcaggacttttatgtggttgaaagtatttttttcccatctgagggatcgaacctgactccagctcatcattataatgattttagatttaagacttacgcgccagtagcctttaggtacttcagagaattatttgggatccgaccggatgactatctgtactcgctgtgtagcgaacccctgatcgaactgtgcagttctggagctagcggttccctcttctacgtttcctccgacgatgagtttatcataaagacagtccagcataaggaagccgagttcctgcagaaactcctacctgggtattacatgaacctgaaccaaaacccgagaacactgcttcctaagttctacggtttatactgcgtccaggcgggtggaaagaacataaggatcgtagtgatgaataacctgcttccacgaagcgtaaagatgcacatcaaatacgacctaaagggttcaacctataagagaagggcttcccagaaagaaagggaaaagcccctgcctaccttcaaggatcttgatttcctgcaggacatacccgacggcttgttcctggatgctgacatgtataacgcattatgcaagacactccaaagagactgccttgtgcttcagagcttcaagataatggattatagcttgctgatgtccatccacaatatagatcacgcgcaaagggaacctctgagtagtgagacacagtattctgttgacacaaggagacctgctccgcagaaagccctgtatagtacagccatggagtccattcaaggcgaagcaaggcggggaggcacaatggagacagacgatcacatgggcggcatacctgccagaaattcaaagggggagagattgctactgtacatagggattatagacattctgcagagctaccgtttcgttaagaagttggagcactcctggaaagccctggtgcacgatggcgacaccgtctcagtccaccgtcccggattctatgccgagaggttccagcgattcatgtgtaacaccgttttcaaaaaaattcccctgaaaccttccccctctaaaaaattccggtccggtagtagtttcagtagaagagcagggtccagcggaaactcctgtatcacttaccagccttccgtgtcaggcgaacataaggctcaagtgacaacaaaagcagaggttgaacctggcgtgcatcttggccgcccggacgttctgccccagacaccaccccttgaagagatatctgagggctcaccaatccctgacccctctttttccccactcgtcggagaaaccctgcagatgctaaccacaagcacaactctggagaagctggaagtggcagagtcagaattcacacactag

SEQ ID NO: 199242 - DNA, 1503 bp, synthetic construct
  misc_feature 1..1503: note = Description of Artificial Sequence: Synthetic coding sequence
  source 1..1503: mol_type = other DNA
atggccagcgccagcagcggccccagcagcagcgtgggcttcagcagcttcgaccccgccgtcccttcctgcacactttcgtctgccagcggcataaaacggccgatggccagcgaagttccttatgcatccggcatgccaattaagaaaatcggacaccggagtgtggacagctctggggaaacaacctacaagaaaacaacttcatccgcactgaagggggctattcagctcggcatcacgcacaccgtggggagcctctccaccaaacccgagcgggatgtgctcatgcaagacttctacgtcgtcgagtcaatcttctttccttctgaaggctcgaatttaactccagcgcaccactacaatgacttccgctttaagacatatgcaccggtggctttccgttacttcagagaactgtttggcataagaccagacgattacttgtactcactgtgttcagagcctctcatcgagttatgtagctcaggagcatccggctcgctgttctacgtgagctccgacgatgagttcattattaaaaccgtgcagcacaaggaagctgagttcttgcagaaactacttccaggctactatatgaatttaaatcaaaatccccgtactctcctacccaagttctacggactctattgcgtccaggcagggggaaaaaatatccggattgtggtgatgaacaacctcctgcctagatcagtgaagatgcacatcaagtacgacctgaaaggcagtacatacaaaagacgcgcatctcagaaagagagagagaagcccctccccacctttaaagatttagacttcctgcaggatatccccgacggtctgttcttggatgcggatatgtataatgcactctgcaagacccttcagagagactgcctggtcctccaatcgttcaaaattatggactactcgcttcttatgtctatccataacatcgaccacgctcagcgcgagccactcagttctgagacacaatattctgtggacactcggagacccgccccgcagaaagcactgtacagtactgctatggaatccatccaaggcgaagccagacgtggcggcactatggaaacggatgaccacatgggggggatccccgctagaaactctaaaggcgagcgcttattactctatattgggatcattgatattctccaatcgtaccggttcgtaaaaaaacttgagcattcctggaaggccctggtacatgatggggacaccgtcagtgtacacaggcctgggttctatgcggagagattccagcgctttatgtgtaatacagtatttaaaaaaataccatgtgttcacctgggacggcctgatgtcctcccacagactccacccttagaggagatcagcgaagggtctccaatcccagatccttcattttctcctctggtgggagagaccctccagatgctaacgacctcaacgacactagagaaactcgaagtggcggaaagcgagttcacccattag

SEQ ID NO: 199243 - DNA, 1653 bp, synthetic construct
  misc_feature 1..1653: note = Description of Artificial Sequence: Synthetic coding sequence
  source 1..1653: mol_type = other DNA
atggccagcgccagcagcggccccagcagcagcgtgggcttcagcagcttcgatccagcggtgcctagctgcacactcagtagcgccgcctccgggattaagaggccaatggccagcgaggtcccctacgcatcaggcatgccaatcaagaagatcgggcaccgaagcgtagactcctccggggagaccacatacaagaagaccacaagttctgccttaaagggtgccattcagctaggtattacacatactgtcggctcactgtccacgaagcccgagagggacgtgctcatgcaggatttctatgttgtcgagtccatattctttccaagcgaaggaagcaacctaactcccgcccatcactacaacgattttcgatttaagacctacgcacctgtggccttccggtattttcgggagctcttcggaattcgtcccgatgactatttgtattctctttgcagcgaacccctaattgaactgtgttcaagtggcgccagtggcagcctgttttacgtgagcagtgacgatgaatttatcatcaaaacagtgcagcataaagaagccgagtttctgcaaaagctcctcccaggctactatatgaacctcaaccaaaaccctcggaccctgctgcccaagttctatggcctctactgtgtccaggccggcgggaagaacattaggatcgtcgtcatgaataatctcttaccaagaagcgtaaagatgcatattaaatatgatctgaagggcagtacctacaaacggcgggcatcacaaaaagagcgggagaaacctctgcctacgtttaaggacctggacttcctgcaagatatccccgacgggctctttctggacgccgacatgtataacgctctgtgcaagactttgcagagagactgccttgtcctacagagtttcaaaattatggattacagcctcctgatgtcaatacataacattgatcatgcacaaagagaaccactgtcctctgaaactcagtattccgttgatacacgccggcccgcgcctcagaaggcactgtattccaccgccatggaatccatccagggagaggctcgacgaggaggcacaatggaaactgacgaccatatgggtgggataccagctagaaattccaagggcgagaggctgcttttgtacattggaatcattgacattctccagtcctatagatttgtgaagaagctggagcattcgtggaaggccctggtgcacgacggggacactgtgtcagtgcatagacctggcttctatgctgaaaggttccaacgatttatgtgtaataccgtcttcaagaagattccgctgaagccaagtccctccaagaaatttagatctggctcatccttctctaggcgtgcaggctcttcaggcaatagctgcatcacatatcagcccagtgtcagtggcgaacataaggcccaggtgacaaccaaggcagaggtagaacccggggtgcatctgggacgccccgacgtgctgccccagaccccccccctggaagaaatctcagagggctcgccaattccagatccatcattcagtcccctggtgggagagaccctgcagatgctgactacttcaacaacattggagaagctcgaggtcgctgaaagtgaattcacacactag

SEQ ID NO: 199244 - DNA, 597 bp, synthetic construct
  misc_feature 1..597: note = Description of Artificial Sequence: Synthetic coding sequence
  source 1..597: mol_type = other DNA
atgtacaacgccctgtgcaagaccctgcagcgggactgcctggtgctacagtccttcaagattatggactacagcctgctaatgagtatccacaatattgatcacgcccaacgtgagccgctgagctctgagacgcagtacagtgtggacacccgtaggcccgcccctcagaaggctctctacagcacggcaatggagagtatccagggtgaggctcggagaggtggaaccatggaaactgatgaccacatgggcggaatcccggccagaaattctaaaggagaacggctgttgctatacattggaatcatcgacatcctccaatcttatcgcttcgttaagaaactggaacattcttggaaggcccttgtgcatgacggagacaccgtctctgttcacagacccggattttacgccgagcgtttccagagattcatgtgcaacacagtctttaagaagatccctcttcagccttggaaaagtctgaagctccagagccagtcctcacctataaagcgcaaagcaagtgaggacttggagcaagacagtgctatctccgtgatcccccggtgccaacctctcccccaacagtgctag

SEQ ID NO: 199245 - DNA, 261 bp, synthetic construct
  misc_feature 1..261: note = Description of Artificial Sequence: Synthetic coding sequence
  source 1..261: mol_type = other DNA
atggccagcgaggtgctggaggcccggcaggacagctacatcagcctggtaccttacgcctccggaatgccaatcaaaaaaatcggacaccgatccgttgactctagtggagagacgacttataagaagaccaccagtagcgcactgaagggtgctattcagctcgggattacccatactgtcgggtctcttagtacaaagccagaaagggacgtacttatgcaggatttctatgttgttgaatcgatatttttcccctag

SEQ ID NO: 199246 - DNA, 1569 bp, synthetic construct
  misc_feature 1..1569: note = Description of Artificial Sequence: Synthetic coding sequence
  source 1..1569: mol_type = other DNA
atggccagcgccagcagcggccccagcagcagcgtgggcttcagctcattcgatccagcagttccttcctgtaccctaagctccgcagcctctgggataaagaggcctatggcctctgaggtcccctatgccagcggcatgccaattaaaaagatcggccaccggtccgttgattctagcggagagaccacatacaagaagaccactagtagcgcgttgaaaggcgctattcagcttggtatcacccatactgtcggatctctttctacaaaacccgagcgggatgtgctgatgcaggatttttacgtcgtcgagtctattttctttccttccgaaggatctaacctgaccccagcacaccactacaacgattttaggttcaagacttatgctcctgtcgctttccgctattttagagaactgttcgggatccggccagatgactacctgtatagtctttgtagcgaacctctgattgaactatgttccagcggcgccagtgggtctctgttttacgtgtcctccgacgacgaatttatcatcaagacggttcaacacaaggaagccgagtttctgcagaagttgctgcctgggtattacatgaatctgaaccagaatcccagaacactgctaccaaaattttacgggctgtactgtgtgcaggccggcggtaaaaatattcggattgtcgtcatgaacaacctgctgcctcgctcagtgaagatgcatattaagtacgacctgaaaggctccacctataagagacgggctagccagaaagagcgagagaaaccattgcctactttcaaagatctagatttcttacaggacatcccggatggactgttcctggacgcagatatgtataatgccctttgtaaaacacttcaacgggattgtctggtgctccagagttttaaaattatggactactccctcttgatgagtattcataacattgatcacgcccagcgtgagccattgtcatccgaaacccagtattccgttgatactcgaaggccagcgccacagaaggccctttactccacagccatggagagtattcagggagaagccagacgaggaggcacaatggagacagatgaccagttcgttaaaaagctcgagcattcgtggaaagccctggttcatgatggtgacacggtctcagtccaccggcccggcttttacgccgagcgcttccagcgattcatgtgtaataccgtatttaagaagatacctctgaaacccagtccatccaaaaagttccggtcgggttcgtcattctccagaagggccggcagcagcggaaacagctgcattacgtatcagccatccgtaagcggtgagcacaaggcccaggtgaccacaaaagccgaagtagagcccggagtgcacctggggcggcccgatgttctgccacagaccccccccttggaggaaattagtgaaggcagcccaatccccgacccatcttttagcccactagtgggcgagactctgcaaatgttaacaacgtcaactacactcgaaaaactcgaagtagccgagtcggagttcacacactag

SEQ ID NO: 199247 - DNA, 1623 bp, synthetic construct
  misc_feature 1..1623: note = Description of Artificial Sequence: Synthetic coding sequence
  source 1..1623: mol_type = other DNA
atgagcagcgccgccgagaacggcgaggccgcccccggcaagcagaacgaagagaagacctacaagaaaaccgccagcagcgcgattaaaggagcaatccagcttgggatcgggtataccgtgggaaatttgaccagtaaacctgagcgggatgtgcttatgcaggatttttacgtggtggaatcagtcttcctgccaagtgagggctccaatctaaccccagcgcaccattaccccgactttagattcaagacttatgctcccctagcctttaggtattttcgcgaactcttcggtatcaagccagacgactatctgtattccatctgtagcgaacccttgatcgagctgtccaaccccggggcaagcgggtccctcttctttgttacttccgacgatgaattcatcattaaaaccgttcagcacaaggaagccgagttccttcagaagctactgcccggatactatatgaacttgaatcagaatccaagaaccctgctgccaaaattttacggcctctactgtatgcagtctggcgggattaatatcagaatcgtagtcatgaacaacgtgctccccagaagcatgcgaatgcattttacttacgacttaaaaggatcaacttacaagcggcgcgccagccgaaaggagagagagaaatctaaccccaccttcaaggaccttgactttctgcaggacatgcatgaggggctgtattttgatactgagacttataatgccctcatgaagaccctccagagagattgcagagtgttagaatcattcaaaatcatggattattcacttctgctcggtatccacttcctcgaccattctctaaaagagaaggaggaagaaaccccacaaaacgttcccgatgccaaacgcacagggatgcagaaggttctgtacagcacggcaatggaaagcatccaggggccaggtaaatctggggacggaattatcacagaaaaccccgataccatgggtgggatccctgctaagagtcaccgcggcgagaaactcctgttgttcatgggtattattgacatcctccagagttataggttaatgaagaaactagaacattcttggaaggccctcgtttatgacggtgacaccgtgtctgtccacagaccaagtttttatgccgaccggttcctcaagttcatgaattcacgggtgttcaaaaagatacaggctctgaaggcaagccctagtaaaaaaaggtgtaatagcatcgccgccctgaaggccacgtctcaggaaatcgtgtcctccataagccaagaatggaaggatgagaaacgtgacctcctcaccgagggacagagttttagctccctcgacgaagaagctcttggatcccgccaccggcctgatctggtccctagcacaccttcactcttcgaggcagcttcactcgctacaaccattagctcatcctcgctgtacgtgaatgagcattatccacatgaccgccctacattgtatagtaactcaaaaggccttccatcttcatctactttcaccctggaggagggaaccatctatcttactgcagaaccaaataccttggaggtgcaggacgataacgcaagcgtgctcgatgtgtatctgtag

SEQ ID NO: 199248 - DNA, 312 bp, synthetic construct
  misc_feature 1..312: note = Description of Artificial Sequence: Synthetic coding sequence
  source 1..312: mol_type = other DNA
atgagcagcgccgccgagaacggcgaggccgcccccggcaagcagaacgaggaaaaaacatataaaaagacagcatctagtgcaatcaagggcgcaatccagctggggatagggtatacggtggggaatctcacaagcaaacccgaacgggatgtactaatgcaggatttttatgtggtagagtccgtgttcctgccctctgaggggagcaatctcactcctgctcaccactatcctgactttcgattcaaaacttacgcccccctcgcattcagatatttccgagagctcttcggaattaagcccgactag

SEQ ID NO: 199249 - DNA, 1623 bp, synthetic construct
  misc_feature 1..1623: note = Description of Artificial Sequence: Synthetic coding sequence
  source 1..1623: mol_type = other DNA
atgagcagcgccgccgagaacggcgaggccgcccccggcaagcagaacgaggagaaaacatataagaagacggctagcagtgccattaaaggagcgattcagctgggcatcggttatacagttggcaatctgacttccaaacccgaaagagatgtgctgatgcaggacttctatgtggtagagtccgtgttcctgccttcagagggtagtaacctcaccccagcccatcattaccccgattttagattcaaaacatacgcacctttagcctttaggtattttcgggaattattcggaatcaaacctgacgattacctctacagcatttgttctgaacctcttatcgagttaagcaacccgggggcctcaggtagtcttttcttcgtaacatcagatgacgaattcattattaagacagttcagcataaggaggccgaatttctgcaaaaattgctgcctggatactacatgaatctcaaccagaatcccagaacattgctgcctaagttctacggattatactgcatgcagtccggggggatcaacattaggattgtggtcatgaacaacgtcctacctcggtcaatgagaatgcattttacctacgacttgaaaggctccacatataagcgaagggccagcagaaaagagcgtgaaaaaagcaacccgaccttcaaagacttggacttcctccaggacatgcacgagggactctacttcgacacggaaacatataatgcactgatgaaaactttacagcgggactgcagagtcctcgaatctttcaaaattatggactatagtttactgctgggcattcactttctcgatcattctttgaaggagaaagaggaggagactcctcagaacgtccccgacgcaaaaagaacaggcatgcagaaagtcctctattctacagctatggaaagtatccagggtccgggaaagtcaggagacggcattatcacagaaaatcccgataccatgggaggaatccctgctaagtcgcaccgcggggagaagttgctcctatttatgggcattatcgacatactccagtcctaccgcctaatgaagaaactggagcatagttggaaggccttagtgtatgatggagacaccgtctctgtccaccgcccgtccttctacgccgatcgcttcctgaaatttatgaatagcagggtgttcaagaagatacaggcgctgaaagcgagcccgagcaagaaaagatgcaactcaatcgctgcgctgaaagccacgagccaggaaattgtatccagcatcagccaggaatggaaagacgaaaaaagggatctgctcacagaaggacagtcctttagcagcctggatgaagaagccctgggctcaaggcatcggcctgacctggtgccctccaccccaagcctcttcgaagccgcctcccttgccaccacaatctccagctcttctctctacgttaatgagcattacccacacgacaggcccacactatattcaaactccaaagggcttccttcttcatcgacatttaccctggaggagggtaccatctacctgacagctgaacccaataccttggaagttcaggatgacaacgcgagtgtgttggatgtatacctatag

SEQ ID NO: 199250 - DNA, 1350 bp, synthetic construct
  misc_feature 1..1350: note = Description of Artificial Sequence: Synthetic coding sequence
  source 1..1350: mol_type = other DNA
atgcaggacttctacgtggtggagagcgtgttcctgcccagcgaggggtcaaatctcacccctgcccaccactacccagatttcaggtttaaaacctatgctccgctggcatttagatactttagggaactgtttggtatcaaacccgacgactatctgtactccatctgctcagagcccttaatcgagctttcgaacccaggagctagcggttccctctttttcgtgacaagcgacgatgagttcatcattaaaaccgttcagcacaaggaggctgagtttctgcagaagttgttgccaggttactatatgaacctgaaccagaatccacgcacactgctgccaaagttctatgggctgtactgcatgcagtccggaggtatcaacattagaatcgtggtgatgaataacgttctgccacgtagcatgcggatgcacttcacttacgatcttaaagggtcaacttacaagaggagagcctctcggaaagagagggagaagtccaaccctacctttaaagacctcgacttcttgcaggacatgcatgaaggcctctatttcgacacagagacatacaatgccttaatgaagacactccagagggactgtcgggtcctggaatcatttaaaattatggattactctctattgctcggtatccactttctcgaccactcactcaaggagaaagaggaagaaacaccacagaatgtacccgacgccaagcgaacaggaatgcagaaagtgctctattcaacagccatggagagcattcagggaccgggtaaatccggcgacggcattatcacggagaacccggatacaatgggcggtatccccgcaaaatcccaccggggggagaagctgctgctgttcatgggtattatcgacattctgcaatcgtaccggctaatgaagaagctcgaacacagctggaaggccctggtctacgatggggacacggttagtgtccacagaccaagcttctacgctgaccgctttttgaagttcatgaatagtagagtcttcaaaaaaattcaggcactgaaggccagtccttctaagaaacggtgcaacagtatcgctgccctcaaggctacctcgcaagaaattgtgtcctcaatcagtcaagaatggaaagatgagaagagagatctgctcacagaaggacagagcttttctagcctagatgaggaggccctcggatcccgccacagacctgacctggtgccttccacaccaagcctctttgaggctgcttctttagccacaactatctcatcgtcaagcctttatgtgaacgagcattacccacacgacaggcctactctctactcgaatagcaagtag

SEQ ID NO: 199251 - DNA, 489 bp, synthetic construct
  misc_feature 1..489: note = Description of Artificial Sequence: Synthetic coding sequence
  source 1..489: mol_type = other DNA
atgagcagcgccgccgagaacggcgaggccgcccccggcaagcagaacgaagaaaagacttacaaaaagactgcttctagcgccattaaaggagcgattcaattgggcatcggatacactgtcgggaatctcacaagcaagcctgaacgggacgtgctgatgcaggatttttatgtggtggaatcggtgttcctgccttcagagggcagcaacttgacccccgcacatcactacccagactttcgctttaagacttatgcccctcttgctttcaggtacttccgtgaactgttcggcattaaacctgacgattacctgtactccatctgcagcgagcctcttatcgagctctccaatcctggcgcctccggctccctcttctttgtgactagtgacgacgagtttataatcaagacggtccagcacaaggaagccgagttccttcagaaactcctgccagggtattacatgaatcttaatcagaactag

SEQ ID NO: 199252 - DNA, 474 bp, synthetic construct
  misc_feature 1..474: note = Description of Artificial Sequence: Synthetic coding sequence
  source 1..474: mol_type = other DNA
atgagcagcgccgccgagaacggcgaggccgcccccggcaagcagaatgaagagaaaacttataaaaaaactgcgtcctccgccatcaaaggtgctatccagctcggtatcggctataccgtcggaaatttgacaagcaaacccgaacgtgacgtgctcatgcaggatttctatgtagtggaaagtgtgttcctacctagcgagggcagtaacctcactcctgctcatcactacccggactttaggtttaagacatacgcgccactcgccttccgctattttcgagagctctttggcatcaaacccgacgactacctgtactctatttgttcagagccacttatcgaactgtccaaccccggcgctagtggctccctgtttttcgtgacaagcgacgatgagttcatcatcaagacagttcaacacaaggaagccgaattcttgcagaagctcctgccagggtattatatgtag

SEQ ID NO: 199253 - DNA, 1509 bp, synthetic construct
  misc_feature 1..1509: note = Description of Artificial Sequence: Synthetic coding sequence
  source 1..1509: mol_type = other DNA
atgagcagcgccgccgagaacggcgaggccgcccccggcaagcagaatgaagagaagacttacaagaaaaccgcaagcagcgcaattaagggggctatccagctgggcatcggctataccgtggggaacttaacctctaaacctgaacgggacgtgctaatgcaggacttttacgtcgttgagagtgttttcctgccatccgagggctccaacttgacaccagcgcatcattaccccgattttagatttaaaacctacgcacctctggctttcagatattttagagaactgttcggcatcaaaccggacgactacctctactctatatgctcggagccccttatcgaactctccaatccaggcgcctcaggatctctgttcttcgtgacatctgatgacgaattcattattaaaacagttcagcataaggaggctgaatttcttcagaaactcttacccgggtattacatgaaccttaaccagaatccaaggactcttttacctaagttctatggattgtattgtatgcagtccggagggattaatatccgaatagtggtcatgaataacgtgcttccaagatccatgcgtatgcactttacctacgatctgaagggctctacctacaagcgcagagcgtcacgaaaggaacgggagaagtcaaacccaacgttcaaggatttggatttcctacaggatatgcacgaggggctttactttgacacagagacatataacgcgctgatgaaaacactgcagcgcgattgcagggtgctcgaatctttcaagataatggactatagcctcctgctcggaatccattttctggaccacagtctcaaggaaaaggaagaggaaactccgcagaacgttccggacgccaaacgaaccggcatgcagaaggttttgtatagcactgcaatggaatctatccaaggtcccggcaaatcaggtgacggcattatcaccgaaaatcctgacacgatgggaggcattcctgccaagtcccacaggggggagaaactgctgctgttcatgggcattattgatattttacagtcatatcggctcatgaagaagttggagcatagctggaaggccctcgtatatgatggagacacagtgagcgtccatcgcccctctttctacgcggatcgtttcctcaagtttatgaactctcgggtgttcaagaagatccaggccttgaaggccagccctagcaagaaacggtgtaactctatcgctgctctgaaggcaaccagccaggagatcgtgtcctctatctcacaagaatggaaagacgaaaagagggatctccttactgaagggcagagtttcagcagcctggacgaagaggctctgggctccaggcaccgacccgacctagtcccaagtacccccagtctctttgaggctgcaagtttagctacaaccatcagcagttcttccctatacgtgaatgagcattatccgcacgatcggccaaccctctattccaactccaagtag

SEQ ID NO: 199254 - DNA, 2007 bp, synthetic construct
  misc_feature 1..2007: note = Description of Artificial Sequence: Synthetic coding sequence
  source 1..2007: mol_type = other DNA
atggagctggaggtgcccgacgaggccgagagcgccgaggccggcgccgtcccctcagaggccgcctgggctgcagagtccggagcagctgcagggttagcccagaagaaggccgccccaaccgaggtgctgagtatgaccgcacaaccaggccccgggcatggcaagaaactggggcatcgcggcgtggacgcctccggagaaactacatataagaaaaccacgagtagcaccttgaagggcgccatccagctgggcataggatacacggttggacacctgagctctaagcccgaacgagatgtgctaatgcaggatttttacgtagtcgagtccatcttcttccccagcgaaggctccaatctcacacctgctcaccactttcaggacttccgcttcaagacttacgcaccagtggcctttcgctatttccgcgaactcttcggcatcagaccggatgactacttatattccctgtgtaatgagcccctgatcgagctctcaaatcccggtgcaagcggctcattgttctacgtgacctcagacgacgaatttatcatcaaaactgttatgcataaggaggctgaattcttgcagaagcttctgcccgggtattatatgaacctgaaccagaacccacgcaccttattgccaaagttttatggactgtactgtgtccagagcggggggaaaaacatcagggttgtggtgatgaataacatcctacctcgagtagtgaagatgcatttgaagtttgatctcaagggctcaacatataaacgcagggcatctaagaaggaaaaagaaaaatcctttcctacttacaaggacctggactttatgcaggatatgccagagggcctcttgctggatgcggacaccttctccgctctcgtgaaaaccctgcagagagactgtctggtgctggagagttttaagatcatggattactctctcctcctaggcgtgcacaatattgaccagcacgagcgcgagaggcaggcgcagggagctcagtccacatcggatgagaagcggcccgtgggccaaaaggcactttactcaactgcaatggagagtatccaaggcggtgccgcgcgcggggaggcaatcgagagcgacgacacaatgggaggtatcccagctgttaatggacgtggggaacggctccttttacacatcgggataatcgacatcctgcagtcctaccgtttcatcaagaaattggaacacacatggaaggccttggttcatgacggggacacagtgtctgttcatagaccttcgttttacgccgagagattttttaaattcatgtcgaacaccgtattcaggaaaaattcctcattgaagagctctccttccaagaaaggcagaggcggtgcccttctggccgtgaagcccctggggccaacagcagcgttctccgcttctcaaattccctcagagcgggaagaagctcaatacgatctaaggggagctaggtcatatcccacactggaagacgagggccgacctgatttgttgccttgcactccacccagcttcgaggaggccacaacggcctcaatcgctacaacgctcagtagcacgtctctgagtatcccggaacgctcaccctccgaaaccagcgaacagcccaggtatcgcaggcgaactcaatcgtccggacaggacggacgcccccaggaagaaccgcctgcagaggaagatttgcagcagatcacggttcaggtcgagccagcttgtagtgtcgagatcgtcgtacctaaggaagaagacgcaggggttgaggcctcccccgccggcgcctccgctgcggtcgaagtcgaaaccgcatcccaggcgagcgatgaggaaggagctccagctagtcaagcttcagatgaggaagatgccccggcgaccgacatctacttcccaacagacgagcgtagctgggtttactcaccactccactactccgcccaagctcctcccgccagcgatggcgagagcgacacctag

SEQ ID NO: 199255 - DNA, 2103 bp, synthetic construct
  misc_feature 1..2103: note = Description of Artificial Sequence: Synthetic coding sequence
  source 1..2103: mol_type = other DNA
atggagctggaggtgcccgacgaggccgagagcgccgaggccggcgccgtgccttccgaggccgcttgggcagcggagagtggcgccgcggctgggttggcacagaaaaaagctgctccaacagaggtgttgagcatgacagcgcagcctggccctggccatggtaagaagctgggccaccgaggagttgacgcatccggcgagacaacctacaagaagacaacctcatcaaccttgaaaggtgcaatccagctgggtatcggctacactgtgggacatctctcgtccaagcctgagagggatgtcttgatgcaggacttctacgtggtggagtcaatcttcttccccagcgaagggagcaatttaacccctgcccaccacttccaggatttcaggtttaaaacctacgcacctgtggcatttcggtacttcagagagctgttcggaattcggccagatgattacctgtacagcctgtgcaatgaaccgcttatagagctgtcaaaccctggcgctagcgggagcttgttttatgtgacctctgatgacgaattcatcatcaagacagtgatgcacaaggaagccgagttccttcagaaactgttaccaggctattacatgaacttgaatcaaaatccacgcacccttttgcccaaattctatggactttactgtgtacaatctggggggaagaatataagggtggtggtaatgaataatatactgcctcgggtcgtgaagatgcatctaaagttcgatcttaagggcagcacatataagcgccgggccagcaagaaagagaaagagaagtctttccctacttacaaagatcttgactttatgcaggatatgcccgaagggctcctgcttgatgctgatacgttctctgcgctagtgaaaacccttcagagagattgtcttgtactggagtctttcaaaattatggactacagcttattgctgggcgtacataatatagatcagcacgagagggagaggcaggcacagggcgcacaatccactagcgatgagaagcggcctgtgggtcaaaaggccctatactctacagcgatggagtctatacaggggggcgcggccagaggcgaagcaatcgaaagcgacgatactatggggggaatccccgccgttaatggcagaggcgaacgccttcttttgcacattggcataatcgatatcttgcaaagctaccggttcatcaaaaagctggagcacacctggaaggccctggtgcacgatggggacacagtgtctgtacaccgtccgagcttttatgccgaacgcttcttcaaattcatgtctaataccgtgttccgcaaaaacagttcccttaagtcatctcccagtaagaaaggtcggggcggggcactcctggctgttaagcccttaggtcccactgccgccttttccgcctcccaaatcccgtccgaaagagaggaggcccagtatgacttaaggggggctagatcctatcctacattggaggacgaaggccgacctgaccttctgccctgcacgcctccgtctttcgaagaagctactacggctagtatcgcgacaacccttagttccacaagcctctccataccggagcgctctccttctgaaacgtctgaacagcctagatacaggcgacggacccaatcttccgggcaggacggcagacctcaggaggaacccccggccgaggaagacctgcagcagattacggtacaggtcgaaccagcttgctctgtcgaaattgtcgtccccaaggaggaagacgcaggcgtggaagcctctcctgccggggcctcagcggccgtcgaagttgaaacagcttctcaagcctcagatgaggaaggagccccggcaagccaagctagtgatgaagaggacgcccctgctacagacatttacttttggcggctgtggggaccacacgctcccacgtggccctggcgccgggagggccgtgccgcctgtctgtgtccttatccacctcacgtcgtcacaccgttcccgggaacaggactgtgtgcctcatggagcccagacggtaccggcggcctcggagcaatgtcgtgctgcgtcagtgtaagctag

SEQ ID NO: 199256 - DNA, 1923 bp, synthetic construct
  misc_feature 1..1923: note = Description of Artificial Sequence: Synthetic coding sequence
  source 1..1923: mol_type = other DNA
atggagctggaggtgcccgacgaggccgagagcgccgaggccggcgccgtcccctccgaggcagcttgggcagccgagtcaggcgccgcagctggccttgcccagaaaaaggccgctccaactgaggttttgtcgatgacggcccagcccgggccaggacacggcaagaagttggggcacagaggcgtggacgcttcaggagagacgacctacaaaaaaactaccagttcaacgctcaaaggtgccattcagttaggcattggttataccgtgggacatctttcaagcaagccagagcgagacgtgcttatgcaggacttctacgttgttgagtccattttctttcccagcgaaggtagcaacctgacaccagcccaccattttcaggattttcgtttcaagacctacgcccctgtcgccttccggtacttcagagagctcttcggaattcgccccgatgattacctttactctctgtgcaacgaacccctgatcgaactaagtaaccctggggctagcggatctcttttctatgtcacatctgacgatgaatttatcatcaagaccgtcatgcacaaagaggctgagtttctgcagaaactactcccaggatattatatgaacctgaatcagaatccaaggacattgctgcctaaattctacgggctgtattgtgtgcagagcggaggcaaaaatattagggttgtcgtcatgaacaacattctgccgcgagtggtgaaaatgcacttgaagtttgacttaaagggttctacgtacaagaggagagccagcaaaaaggagaaagaaaaatccttcccaacctacaaagatctggactttatgcaagacatgccagaaggacttctgctcgacgcagacacctttagcgcccttgtgaagacccttcaacgggactgtctggtactcgaaagttttaaaattatggattactccctgctgctcggcgtgcacaatatcgatcagcacgaaagagaaaggcaagcacagggggctcagagcacaagcgatgaaaagcggcccgtggggcagaaagctctgtactctactgcgatggagtccatccaggggggggccgccagaggcgaagccatcgaaagtgatgacacaatgggaggaatccctgcggtgaacggccgcggggaaaggcttctgctgcatattgggattatcgacatcctccaatcatacagattcataaaaaaattagaacatacctggaaggctctagtccatgacggagataccgtgtctgtccatcggccatccttttacgccgaacgcttcttcaaattcatgtcaaataccgtgttcaggaagaactcgtcccttaagtcctctccttctaagaaaggccgcggaggagccctactggccgtgaaacctctgggccctactgctgctttcagcgcttcacagatacctagcgaaagggaagaagcccaatacgatcttaggggagccaggagttaccccacactcgaggatgagggaaggcccgacttgttaccctgcactccaccctcctttgaggaagccacaaccgctagcatcgctacaactcttagctccaccagcctctctatacctgaacgttccccttccgagaccagtgagcagcccagatatcgccgccgtacccagtcctctggacaggacggacgcccccaagaagaacctcccgcggaggaggacctacagcaaatcaccgttcaggtggagcccgcttgtagtgttgagatagtggttcctaaggaggaggacgccggggttgaagcctccccggctggcgcaagcgccgccgtcgaggtggagaccgcctcacaggcttccgacgaggagggcgctcctgcttcccaagctagtgacgaggaggacgccccagccaccgacatttatttttag

SEQ ID NO: 199257 - DNA, 576 bp, synthetic construct
  misc_feature 1..576: note = Description of Artificial Sequence: Synthetic coding sequence
  source 1..576: mol_type = other DNA
atgcagagcgtgttctaccccgccggccggatcagcgagcggtacgacattaagggttgtgaagtaagccgttgggtggaccccgcccccgaaggcagcccactggtactagtgctgaaggatctgaacttccaggggaagacaataaacctcgggccccagaggagttggttccttagacaaatggagctcgacactacctttctcagggagctgaacgtgctggattactccctgctcattgcctttcagagacttcacgaagacgaaaggggcccgggatcttccctgatcttccgcacggcaaggagtgtacagggggcccaatcacccgaagagtccagagcccagaatcgcagactgttgcctgatgcacctaatgcactccatatcctggatggacccgagcaacgctatttcctaggggtcgtggatctggctactgtatatggcctgcgtaagaggctggaacacttgtggaagactctccgatatcctgggaggactttcagtaccgtgagtccagcccgctacgcccggcgcctgtgtcaatgggttgaggcccataccgaatag

SEQ ID NO: 199258 - DNA, 1185 bp, synthetic construct
  misc_feature 1..1185: note = Description of Artificial Sequence: Synthetic coding sequence
  source 1..1185: mol_type = other DNA
atggccgcccccagccccggcccccgggaggtgctggcccccagccccgaggcaggttgcagggctgtcaccagctctagacgcggtctactctggcggttgagggacaagcagtcgcgattggggctgtttgagattagcccagggcatgaactccatggaatgacgtgtatgatgcaggccggtctttgggccgctactcaggttagtatggaccaccctcccaccggacccccttctagggatgatttttcagaggtcctgacacaagtccacgaggggttcgagttgggcaccttggcaggccccgcatttgcctggttgcgcagatccttagggctggcagaggaggactaccaggctgcgcttgggccaggcggcccctatctgcagttcctgtctactagcaagtccaaagcatccttcttcctctctcacgatcagaggttctttctgaagacgcagggcaggcgtgaagtgcaggctttgctcgcgcacctgcctaggtacgtccagcacctccagaggcacccgcattccctgcttgcccgactgttgggcgtgcattcgctgcgggtagaccgcggtaaaaagacttacttcatagtcatgcaatctgtgttctaccccgccggcaggatctccgagcgctacgatatcaagggctgcgaagtgagtcgatgggtagacccagcccccgaaggatctccgctcgttctggtcctgaaagatctgaacttccagggcaaaaccatcaatttggggccacagagatcttggtttctacggcagatggagctggatacgactttccttagagagttaaatgtgctggactactctctgctgatcgctttccagcgtcttcacgaggatgaaagaggccctgggagcagcctgatatttcgaactgccaggagtgttcagggagctcaaagccctgaagagagccgcgcacagaataggcgcttgcttcctgacgccccaaacgcccttcacatcctagatgggcccgaacagaggtatttcctgggagtggtcgaccttgctacggtgtacggcctcagaaaaaggcttgagcatctgtggaaaacgctgcggtacccaggacggaccttctcaaccgtctcccccgctcgatacgctcggcgtctgtgccagtgggtcgaggcacatactgagtag

SEQ ID NO: 199259 - DNA, 1128 bp, synthetic construct
  misc_feature 1..1128: note = Description of Artificial Sequence: Synthetic coding sequence
  source 1..1128: mol_type = other DNA
atgatgtgccagagcgaggcccggcagggccccgagctgcgggccgctaagtggctgcacttcccacagctcgctttgcgacgtaggctaggccagttgagctgcatgagtagacccgccttaaagttgcggtcatggcctctcaccgtactgtactacctgctaccctttggtgcactgcgccccttgtctcgtgtagggtggcggccagtgtcacgcgtggcactgtacaaaagcgttcccacaagacttctctcaagggcctggggacgcctcaaccaagttgagttgccccattggttgaggcgcccagtctactccctctatatctggacgttcggagttaatatgaaggaggctgctgtggaggatctccaccactatagaaacctgagtgagttttttcgtaggaagttgaagcctcaggccaggccagtctgtggtctccacagtgttatcagtcctagtgatggccggatcctcaactttggccaagtaaaaaactgtgaagtggagcaagtcaagggcgtcacttacagccttgaatcctttctcgggccccgcatgtgcacagaggacttacccttcccgcccgcagcctcttgcgattcctttaagaatcagttggtaaccagagagggtaacgaactttaccactgtgtcatttacctagctcctggggattaccattgctttcatagccctaccgactggacggtcagccaccgccgacatttccctggctccctgatgtctgttaaccccgggatggcccgctggatcaaagagctgttttgtcataatgaaagagtggtgctcaccggagactggaaacatggcttcttttcgctcactgccgtgggggcaacaaatgtgggtagcattcgcatttactttgaccgcgatctacacacaaattctcctcgacattccaaagggtcgtataacgattttagcttcgtgactcacaccaatagagagggcgtccctatgcgtaaaggcgaacatctgggggagtttaacctaggctctacgattgtcttaattttcgaggcaccaaaagatttcaatttccaactaaaaactggccagaagatcaggttcggcgaagcactgggctccttgtag

SEQ ID NO: 199260 - DNA, 1227 bp, synthetic construct
  misc_feature 1..1227: note = Description of Artificial Sequence: Synthetic coding sequence
  source 1..1227: mol_type = other DNA
atggccaccagcgtgggccaccggtgcctgggcctgctgcacggcgtggccccatggaggtcgagtcttcacccctgcgagattactgcgctttctcagagtctacaaccccttcgcaagcttccttttagagcattccgcacagatgcccggaaaattcatactgctcccgccagaactatgttcctcctcagacccttgcccatcttactagtgacaggtgggggctacgccgggtaccggcagtacgagaagtacagagaacgggagctggaaaagctgggactggaaattcctcccaagttagccggacactgggaagtcgcactttataagagcgtgccaacaagattacttagtagggcctggggaaggctgaaccaggttgagctgcctcattggctgcgccgccccgtgtattctctgtacatttggacgttcggggttaatatgaaggaagcagctgtcgaggaccttcaccactatcggaacctcagtgaattttttcggcgcaaattgaaaccacaagctaggccagtgtgcggactgcactctatatctcccagcgatgggcgcatcctgaactttggccaggttaaaaattgtgaggtcgagcaggtgaaaggggtgacctattctttagaatcatttctgggacctcggatgtgtaccgaggacctgcccttcccccctgccgctagttgtgactctttcaagaaccagctggtgacacgggagggcaacgaattgtatcattgcgttatttacctcgcaccgggtgattaccactgttttcattcacctactgactggaccgtgagccatcgacggcattttccaggctctcttatgtctgttaaccctgggatggctcgttggatcaaagagctgttttgtcacaacgaaagggtggtgttgactggagattggaagcacgggtttttttctctcaccgccgttggggctaccaacgtggggagcataagaatctatttcgaccgagacctgcacaccaactcaccccgccatagcaagggtagctacaatgacttttctttcgtcacccacacgaaccgggaaggggtgccaatgcggaagggcgagcaccttggggaatttaatttagggagcacaatagtgctcatatttgaggcccccaaagactttaacttccagcttaagaccggtcagaagatccggttcggagaggccctaggcagtctgtag

SEQ ID NO: 199261 - DNA, 1128 bp, synthetic construct
  misc_feature 1..1128: note = Description of Artificial Sequence: Synthetic coding sequence
  source 1..1128: mol_type = other DNA
atgatgtgccagagcgaggcccggcagggccccgagctgcgggccgccaagtggctgcacttcccccagttggcactgaggaggaggcttggccaacttagctgcatgtcgagaccagcacttaagctacggtcgtggcccctaactgtactttattacctgttgccttttggagccctcaggccgctgtccagagtgggatggagaccagtcagccgagtggcactgtataagagcgtacctacaaggctcctcagtcgcgcatggggcagattgaaccaggtagaacttccccactggctgcggcggccagtgtacagtctctacatctggacgttcggcgttaatatgaaggaagcagctgtggaggaccttcaccactatcgcaacctgtcagagtttttcaggcggaagttgaaaccacaagccaggcccgtatgcggtctacattccgttatctccccatcggacggtaggatcctgaattttggacaggtgaaaaattgtgaggtggaacaggtgaagggcgtcacttactcactggaatctttcctcggcccgagaatgtgcactgaggacctcccattcccgccagccgcaagttgcgactcatttaagaaccagctggtgacccgcgaggggaatgagttgtatcactgcgttatctatctcgctccaggcgattaccattgcttccatagccccactgactggaccgtttcacatcggcgacacttccctggcagtcttatgtctgtgaatccaggcatggcacggtggattaaggaactgttttgtcataacgaaagagtcgttctgacgggggactggaaacacggattcttctccttgacggcagttggcgcaactaacgttggctcaattagaatttactttgatagggacctgcacacaaacagcccacggcatagtaaaggctcgtataatgacttttccttcgtgacgcacacaaaccgtgagggcgtacctatgcgaaaaggcgagcacctgggagagtttaatctgggcagtacaatcgtccttatcttcgaggcacccaaggattttaactttcaactcaagaccgggcagaaaatccgcttcggagaagcacttgggtccctgtag

SEQ ID NO: 199262 - DNA, 789 bp, synthetic construct
  misc_feature 1..789: note = Description of Artificial Sequence: Synthetic coding sequence
  source 1..789: mol_type = other DNA
atgatgtgccagagcgaggcccggcagggccccgagctgcgggccgcgaaatggctacactttccacagcttgctctcagacgacggctgggccaactgagctgcatgagcaggccagcactgaagctccggtcttggcctttgacggtcctgtactacctgcttccttttggggctctgcgacccctgagccgagtcggctggaggcccgttagccgtgtggctctgtataaaagcgtgcccacacggttactttccagggcttggggacgactgaatcaggtggagctcccccactggttaagaagacctgtatacagcttgtacatttggacgtttggcgttaatatgaaagaagctgctgtggaggacttacaccattacagaaacctgagcgagtttttccggcggaagctgaagccacaggctcggcctgtctgtggactacacagcgtgatttcaccaagcgacggccggattctgaacttcggccaagtgaaaaattgcgaggttgagcaggtgaaaggggtcacttacagcctcgaatctttcctcggtccaagaatgtgcaccgaggaccttccctttcccccagccgccagctgcgattccttcaaaaatcaactggtcacacgcgaggggaacgagctgtatcactgcgtgatctatctggccccgggcgattaccattgctttcatagccctaccgactggaccgtatcacacaggcggcactttccagggcccgcccataaacagccgaaagcccagcagggtctcctgcagtag

SEQ ID NO: 199263 - DNA, 687 bp, synthetic construct
  misc_feature 1..687: note = Description of Artificial Sequence: Synthetic coding sequence
  source 1..687: mol_type = other DNA
atgatgtgccagagcgaggcccggcagggccccgagctgcgggccgcaaagtggctccatttccctcagctcgctctgagacgcagactcgggcagctctcgtgtatgtcacgcccagccctgaaactccggagttggccactgactgtcttgtactacctactcccctttggagcgcttcgacccttatcccgggttggttggcggcccgtgagtagggtggccctgtacaaatctgtgcctaccagactcttgtcccgagcatggggcaggctgaatcaggtagaattaccccattggctgagacgcccggtttactctctgtacatctggacatttggggtgaatatgaaggaagctgccgttgaagacttacaccactacagaaatctctccgaattttttcgacggaaactcaagcctcaagcccgtcctgtatgcggcctccactctgttattagcccatctgacggccgaattcttaatttcggacaggtgaaaaattgcgaagtggagcaagtgaagggagtgacctacagtctggaatcttttctggggcctcgcatgtgcactgaagatctgccctttccccctgctgctagctgtgatagttttaaaaaccagttggtgaccagggagggcaacgagctctaccactgtgtgatttatctcgcccccggcgactag

SEQ ID NO: 199264 - DNA, 222 bp, synthetic construct
  misc_feature 1..222: note = Description of Artificial Sequence: Synthetic coding sequence
  source 1..222: mol_type = other DNA
atgatgtgccagagcgaggcccggcagggccccgagctgcgggccgccaaatggctgcatttcccacagttagctcttcgacggcgcctcggacagctgagctgtatgtctaggcccgcgttgaaactgcgcagttggcccctgacggttctgtactaccttctccccttcggcgcgcttaggcctcttagtcgtgtgggctggcggccagtgagccgatag

SEQ ID NO: 199265 - DNA, 222 bp, synthetic construct
  misc_feature 1..222: note = Description of Artificial Sequence: Synthetic coding sequence
  source 1..222: mol_type = other DNA
atgatgtgccagagcgaggcccggcagggccccgagctgcgggccgccaagtggctgcactttcctcaactcgccctgaggcggaggctggggcagttatcctgtatgagccggcccgcgttgaagttacgctcttggccacttacggttctttactatctgcttccgtttggggcgttgcggccactctcacgcgtagggtggaggcctgtgtcaaggtag

SEQ ID NO: 199266 - DNA, 1230 bp, synthetic construct
  misc_feature 1..1230: note = Description of Artificial Sequence: Synthetic coding sequence
  source 1..1230: mol_type = other DNA
atggccaccagcgtgggccaccggtgcctgggcctgctgcacggcgtagccccctggcgctcgagtctgcatccatgtgagatcactgcactttcacaatccctgcagcctctgcgtaaattgcccttccgcgcctttcgcaccgacgccaggaaaatccacaccgcccccgcacgaacaatgttcctgctcagacccctgcctattttgctggtgaccgggggcggatacgccggctaccgacagtatgaaaaatatcgcgaaagagagctggagaaacttggactggaaattcctcctaagctcgccggtcactgggaagtggcattatataaatcagtgcctacccgattgctgtcacgcgcttggggcagactcaatcaggtcgaactacctcattggctcaggagaccagtatatagcctgtacatttggacgtttggcgtcaacatgaaagaagctgctgtcgaggaccttcatcactatagaaatttgtctgagttctttaggcgaaaattgaagccccaggctagacccgtctgtggcctgcattccgtgattagtccgtctgacggacgcatccttaactttggacaggtcaagaattgtgaggtcgaacaagttaaaggcgttacctactccctggagagctttctgggcccccgcatgtgcacagaagatctgcctttcccccctgctgctagttgcgactccttcaagaaccagttggtaactagggagggtaacgaactctatcattgtgttatctacctggcacctggggattatcattgcttccactcacccacagattggacagtgtctcaccgtagacatttcccgggaagtctgatgagcgtaaatcccgggatggcgcgctggataaaagaattattctgtcataatgagagagtggttctaacaggagactggaagcatggcttttttagtctgactgctgttggcgcaaccaacgtcgggagtatccgaatttactttgatcgagatctgcataccaactcgccaaggcactctaagggtagttacaacgatttctcatttgtgacacataccaatagggagggcgtacctatgcgaaagggcgagcatctgggagagttcaatctcggctctacaatcgtgctcatatttgaagccccaaaggattttaacttccagctcaagactggccaaaagatccgattcggagaagccctcggatcactgtag

SEQ ID NO: 199267 - DNA, 246 bp, synthetic construct
  misc_feature 1..246: note = Description of Artificial Sequence: Synthetic coding sequence
  source 1..246: mol_type = other DNA
atgatgtgccagagcgaggcccggcagggccccgagctgcgggccgcgaaatggctgcacttcccacagcttgccttaagacgacgactgggtcagctgagctgtatgtccaggcccgctttgaagctgcgctcctggcctctgactgtgttgtactacctactgcccttcggtgccctcagaccactatctagggtgggctggagacctgtgtcgcgagtggccctgtataaaagcgtaccctag

SEQ ID NO: 199268 - DNA, 981 bp, synthetic construct
  misc_feature 1..981: note = Description of Artificial Sequence: Synthetic coding sequence
  source 1..981: mol_type = other DNA
atgatgtgccagagcgaggcccggcagggccccgagctgcgggccgccaagtggctacattttccacaactggcccttcgaagacggctcggccagctgtcttgcatgagccggcctgccctgaagctgagatcctggcctctgaccgtgctgtactatctgttgcccttcggcgctttgaggcctttgagtcgcgtggggtggcggccagtctctagagttgccctctataaaagtgttccaacccgtctgctgagccgggcttgggggaggctcaaccaagtagagcttccacactggctccgacgcccagtttattccctgtacatctggacgtttggcgtgaacatgaaggaggctgcagtggaggatttgcaccattatcgcaatctgagcgagttctttaggcgtaagctaaagccccaggcccggcctgtgtgcggactccattcggtgattagtccatccgatggcaggattttgaatttcggccaagtgaaaaattgcgaagtagaacaggtgaagggcgtgacctatagccttgaaagctttctgggcccaagaatgtgtactgaagacttgccattcccaccagcagcaagctgcgattcttttaagaaccaactagtcacccgcgaggggaatgagctctaccactgcgtgatttacctcgcccccggagactaccactgctttcatagtccgactgactggaccgtctcacatagacgacacttcccagggagtctcatgtccgtgaaccccggaatggcgagatggatcaaagagcttttctgtcataacgaacgagttgtactaactggtgactggaagcacggctttttcagcttgaccgccgtcggcgcaaccaacgtagggagcatcaggatctacttcgacagagatctccacacaaactccccccggcactccaaaggaagctacaatgacttttcagttgtaggaagtctcactcgatag

SEQ ID NO: 199269 - DNA, 984 bp, synthetic construct
  misc_feature 1..984: note = Description of Artificial Sequence: Synthetic coding sequence
  source 1..984: mol_type = other DNA
atggagtacgccgtgaactgccacgtgatcacctgggagcggatcatctctcatttcgatatattcgccttcgggcacttttgggggtgggcgatgaaggccttgcttatcagatcctatggactctgttggacaatctctattacttgggagttgacagaactcttcttcatgcacctgcttcctaacttcgccgagtgctggtgggaccaggtgatcctggatatcctcctgtgtaacggcggcggaatctggctcggcatggtcgtgtgcaggtttctggaaatgaggacctaccactgggcttctttcaaagatatccatacaactacgggcaagataaaaagagctgtactccaattcacccctgcatcctggacgtacgtgcggtggtttgaccccaagtcatctttccagagagttgctggcgtatacctcttcatgataatctggcagctgacagagctgaataccttcttcctcaaacacatctttgtttttcaggctagccaccccctcagttggggtagaatactgtttattggcggcattacagctccaacggtgcgccagtactatgcctatctcaccgacacacagtgcaaaagagtgggcacacagtgctgggtctttggcgtcatcggcttcctggaggccattgtatgcataaaattcgggcaggatctgttcagtaagactcagatcctgtacgttgtgctgtggctgttgtgtgttgcattcaccacattcctgtgcctgtatggtatgatttggtacgccgagcattacgggcaccgggagaaaacatatagtgagtgcgaagacggaacttactcccccgagatatcatggcaccaccggaaaggcacaaaaggcagtgaagacagtccccccaaacacgccggaaacaacgagtcacattcgtcacgacgaagaaatcggcattctaagagtaaagtgacaaatggcgtgggtaaaaaatag

SEQ ID NO: 199270 - DNA, 1422 bp, synthetic construct
  misc_feature 1..1422: note = Description of Artificial Sequence: Synthetic coding sequence
  source 1..1422: mol_type = other DNA
atggccagctgcgtgggcagccggaccctgagcaaggacgacgtgaattataagatgcacttccgtatgataaatgagcaacaggttgaggatataacaattgactttttttacagaccacatacaatcaccctgttgtctttcaccattgtcagcttgatgtacttcgcctttacccgggacgattcggtgccagaagacaacatctggcgagggattttaagtgtcatttttttcttcttaatcatcagcgtgctggccttccctaacggaccattcaccagaccccatccagccctgtggaggatggtctttggactctccgtgctttacttcttatttctggtgtttctgctgtttctgaatttcgagcaggtcaagagtttgatgtactggttagacccaaatcttcgctacgcaacccgcgaggcggacgtgatggagtacgccgttaattgccacgtaatcacttgggaacgcattatctctcacttcgacatattcgctttcggccacttttggggttgggccatgaaagcactgctaataagatcatatggcctctgttggactattagtataacatgggagttgacagagttattcttcatgcatttgctgccaaacttcgcagagtgctggtgggatcaggtcatcttggacattctcctgtgcaacggcgggggcatctggctggggatggtcgtgtgccgtttcctggagatgagaacataccattgggctagcttcaaagacatacatactaccaccggcaaaatcaagcgcgccgtcctccagttcacacccgcatcatggacctatgttcgctggttcgatcccaagtcatcatttcagagggttgctggcgtttacctctttatgatcatctggcagcttacagagcttaatacattttttcttaagcacatcttcgtctttcaagccagtcatcccttatcctggggccgtatcctcttcattggtggtatcactgcacctaccgtgaggcagtactacgcctaccttactgacacccaatgcaaacgagtaggaacacagtgctgggtgtttggagtcatcggatttctggaggcaattgtatgtatcaaatttggacaagatctgttcagcaaaacccagattttgtacgtagtgctttggctgctgtgtgtggcctttaccacgttcctgtgtctctatgggatgatatggtatgctgagcattatggccatagggaaaagacttacagtgaatgtgaagatgggacctactcccctgaaatctcttggcaccataggaaagggaccaaaggttctgaggacagccccccaaagcacgccggtaacaatgagtcacactcaagtcgtcgcaggaacagacatagtaagagtaaagtgacaaacggcgtcggaaagaaatag

SEQ ID NO: 199271 - DNA, 1464 bp, synthetic construct
  misc_feature 1..1464: note = Description of Artificial Sequence: Synthetic coding sequence
  source 1..1464: mol_type = other DNA
atgcggcggggcgagcggcgggacgccggcggcccccggcccgagtctccagtgccggcaggccgcgcttcattggaggaaccccccgatgggccctccgccgggcaagccacgggcccgggcgaaggaaggagatctaccgagagcgaggtatatgatgatggaacaaacacgttcttttggagagcgcacacactgaccgtgctgttcatacttacttgtacactaggctacgtgacactgctagaagagacgccccaggatactgcctacaacactaaacgaggtatcgttgccagtatcctcgtgtttctttgtttcggcgtgacccaggccaaggacggcccgttcagccgaccccacccagcttactggaggttttggctgtgtgtctcagtcgtgtacgagttgtttctgatctttattctgttccagaccgtgcaggacggaaggcagttcctcaagtatgttgatcctaaattaggagtacccctgccagagcgggattacgggggaaattgtctaatttatgaccccgataatgagacagacccttttcacaacatctgggataagctcgacggcttcgtgcctgcccacttcctggggtggtatcttaagaccttaatgattagagattggtggatgtgcatgatcatttccgtaatgttcgagtttcttgagtatagtctggaacatcagttacccaacttctcagagtgctggtgggaccactggattatggatgtccttgtgtgcaacggtctggggatctactgcggtatgaaaaccctcgagtggctgagcctgaaaacctacaaatggcagggactatggaatattccaacatacaaggggaagatgaagcggattgcgttccagttcacaccgtattcctgggtgcgtttcgagtggaagcctgccagctcgcttcggcggtggctggcagtctgcggaataattttggtctttctactcgcggagctgaatacattttatctcaaatttgtgttgtggatgccgcctgagcactaccttgtcctgctgcgactggttttttttgtcaatgtcggaggcgtagccatgagagagatttatgacttcatggacgatcctaagccacacaagaagttggggccgcaggcttggctcgtggcagccataacagctactgaactgctcatagtggttaagtacgaccctcatacacttaccctctccctcccattttacatttctcagtgttggacactggggtctgtgctcgccctcacctggacagtgtggcggtttttccttcgcgacatcaccctgcgctacaaggagaccagatggcaaaaatggcagaataaggatgatcaaggctccaccgtcggcaatggcgaccaacaccccctgggtttggatgaggacctgctaggtcctggcgttgccgaaggagaaggcgctccgacaccaaattag

SEQ ID NO: 199272 - DNA, 2802 bp, synthetic construct
  misc_feature 1..2802: note = Description of Artificial Sequence: Synthetic coding sequence
  source 1..2802: mol_type = other DNA
atggccgccagccggctggacttcggcgaggtggagaccttcctggatcggcaccctgaactgtttgaagattatctcatgagaaagggcaagcaggaaatggtcgaaaagtggctccagcggcattcacaaggtcagggggcgctggggcccaggccaagccttgccggaacatcttccctcgcccactcaacttgccgaggaggcagctcagtagggggtggaaccgggcctaatgggtcagctcattcacagccacttcccggtgggggggattgtggcggtgtccccctaagcccctcatgggccggcggaagccgcggggacggtaacttacaaaggcgcgcctctcagaaagagctgaggaagtctttcgccagaagcaaggcgatccatgtcaatagaacatacgatgagcaagtcacatccagagcccaggaacctttaagttcagtgaggcggagagccctgctgcgtaaagcctcttcgctgccccctaccactgcacatatactttccgcactcctcgagtctcgggtcaacctgcctcggtatccacctacagcaatagattacaagtgccaccttaaaaagcataacgaacggcagttctttttggagttagttaaagacatatcgaacgatttggatcttacatcgctctcctacaagattctgatattcgtgtgtctgatggtcgacgctgaccggtgttccctgtttttagtggaaggtgctgcagctggcaagaagacactggtatctaaatttttcgatgtccacgccggaacccccttgctgccctgttcctctacagaaaactcaaatgaggtccaggtcccttggggaaagggcatcatcggctacgtaggagagcacggagaaacagtgaatatacccgacgcctatcaggatcggcgcttcaacgacgaaatcgataagctgacaggctataaaactaaatcactcctgtgcatgcccattagaagcagtgatggcgagataataggagtcgcacaagccattaacaagatcccagagggcgcaccttttactgaggacgatgagaaagttatgcagatgtacttacctttttgcggcattgccatctctaacgctcagctgtttgcagccagccgcaaagaatatgagcgttccagggctcttctcgaagtggtaaacgacctgttcgaagagcaaaccgacctcgagaaaatcgtgaaaaaaatcatgcatcgcgcccagaccttgctcaagtgcgagagatgcagcgtcttactgttggaagacatagaaagtccggtggtgaagtttacgaaatcctttgagctgatgagtccgaaatgttctgcggatgccgagaacagcttcaaagaaagcatggagaagagttcctacagcgattggttgataaataacagcatagctgagctggtggcctctacgggcctgccggtaaatatctccgacgcatatcaggacccacgattcgacgctgaggctgaccagatttccggttttcacatacgaagtgtgctgtgtgtaccgatatggaattcgaaccaccagattataggagtggcccaggtcctgaaccgactcgatggcaaacctttcgacgatgccgatcagcgcttgttcgaagcattcgtgatattttgtgggctcggcataaacaacaccataatgtatgatcaagtgaaaaagtcttgggctaagcagtctgtggcgctggacgtgctgtcataccatgctacatgttcaaaggccgaggtagacaagttcaaagccgcgaacatccccctggtatcagaactagcaatcgacgatatccactttgacgatttcagcctggatgtggatgccatgattaccgctgcactgagaatgttcatggagctgggcatggtgcagaagttcaagattgactacgagactctgtgccgctggcttcttaccgtgcggaaaaattacagaatggtgctgtaccacaattggcgacacgcattcaatgtctgccagcttatgtttgccatgctaacaacagcgggattccaagatatcctgacagaagtagagattctggccgtgatagtgggatgcctctgccacgacctggaccacagaggaaccaataacgccttccaggctaagagcgggtctgcattagcccagctgtatggcacgtcagccacactcgagcaccaccactttaatcacgccgttatgatactacagagtgagggccacaatatcttcgcgaatttgtctagcaaggaatattccgatctcatgcagctgctgaaacaatccatccttgccaccgacctaacactgtatttcgagcggcgaacagaatttttcgagttggtgtccaaaggcgagtacgactggaatatcaagaatcatcgggatatcttccggtcaatgttaatgaccgcttgtgacctgggggctgtaaccaaaccgtgggaaatatcgcgccaggtagccgagctggtgacaagcgagtttttcgaacagggtgaccgcgaaagactggaacttaagcttactccttcagccatttttgataggaatcgcaaagatgaactgccccgcctccaactcgaatggatagattccatctgtatgcctttataccaggcccttgtgaaggtgaacgttaagcttaaaccaatgctggactccgttgcgaccaaccgttccaaatgggaggagctgcaccagaagcggctgttagcgtccactgcgtcctccagccctgcatccgtgatggtcgcaaaagaagatcgtaattag

SEQ ID NO: 199273 - DNA, 2052 bp, synthetic construct
  misc_feature 1..2052: note = Description of Artificial Sequence: Synthetic coding sequence
  source 1..2052: mol_type = other DNA
atgctgaagcaggcccggcggcccctgttccggaacgtgctgagcgccacacaatggaagaaagtcaaaatcacaaggctggtgcagattagcggcgccagcctggccgagaagcaggagaaacaccaagactttctgatacagaggcagaccaagacaaaagaccgccggttcaacgatgaaatagacaaactcacggggtacaagactaagagcctgctgtgtatgcctattcggagcagcgacggggaaataatcggcgtagcccaagcgattaacaagatccccgagggtgccccatttactgaggatgacgaaaaagtgatgcaaatgtacctccctttttgtggaatagcaatctcaaatgcccagctgttcgccgcaagcaggaaagagtacgaacgctccagggccctgctggaagtagtcaacgacttgttcgaagagcagaccgacttagagaagattgtgaaaaaaatcatgcacagggcacagaccttactcaagtgcgagcgctgctctgtactcctactagaggatatcgaatctcctgtggtgaagttcacgaaatcatttgagctcatgagtccaaagtgctcagccgatgccgagaactccttcaaggagagcatggagaagagttcctattccgactggttgattaataacagcatcgcggaattggtagccagcacagggttgcctgtgaacatttccgatgcctatcaggatccccgtttcgacgctgaagccgaccaaatatcagggttccacatccgttcggtcctgtgtgtgcccatatggaacagcaatcaccagataatcggcgtagcccaggttctaaatcgactggacggaaagccttttgacgatgcagatcaaaggctgtttgaagcttttgtgatcttttgtggtttaggaataaacaataccatcatgtacgaccaggtcaaaaagtcgtgggccaagcagagcgtggcgctggacgtgctcagctatcacgctacatgctccaaggccgaagtggacaagtttaaggctgccaatatcccattggtgagtgagctcgcaatcgatgatatccactttgacgatttttcactggacgtggatgcgatgatcaccgctgccctgcgcatgtttatggagctggggatggtccaaaagtttaagattgattacgagactttgtgtaggtggctactcacagtgcgcaagaactatcggatggtactttatcacaactggagacacgcctttaatgtctgccagttaatgtttgcaatgttgactactgctggttttcaggacatcctgaccgaagtggagatcctcgcagtcattgtgggttgtctttgccacgacctggatcatcgggggacaaacaatgcttttcaggcaaaaagcggatccgccctggctcagctgtacggcacctctgctactctggagcatcatcacttcaaccacgctgtgatgatactacaatctgaggggcataatatatttgccaacctttccagtaaggagtactctgatctgatgcagctcctcaaacagtcaatactggcaaccgacctgacactgtatttcgaacgcaggaccgaattcttcgaactcgtgtccaagggcgagtatgattggaatataaaaaatcaccgcgatattttcagaagtatgcttatgacggcctgcgacctgggagccgtaacgaagccttgggagatctcccgacaggtggccgaactagttactagtgagtttttcgagcaaggggatcgggagcggctagaactgaagctaaccccctctgcaatcttcgaccggaaccggaaagatgaactgcctagattacaactcgaatggatcgatagtatatgcatgcccctctaccaggcactggtcaaggtgaatgtgaagctgaaacccatgttggacagtgttgccactaatcggtcgaagtgggaagagttacaccagaagcgccttctagccagcacggctagctcttcccctgcaagcgtgatggtcgcgaaggaagacaggaattag

SEQ ID NO: 199274 - DNA, 1470 bp, synthetic construct
  misc_feature 1..1470: note = Description of Artificial Sequence: Synthetic coding sequence
  source 1..1470: mol_type = other DNA
atgagccccaagtgcagcgccgacgccgagaacagcttcaaggagagcatggagaaatcctcctacagtgactggttgattaataacagcatcgccgagctggtagccagcactggcctgcccgtcaatatatccgacgcgtatcaggatcctcgatttgatgccgaggctgaccagattagcgggttccacataagaagcgtgctgtgtgtgcctatctggaattcaaaccatcaaattattggagttgcccaggtgctgaacagactggacggcaagccctttgacgatgccgaccagcgcttatttgaggcctttgttattttctgcggtcttggtattaacaacaccattatgtacgatcaggtcaagaaaagttgggctaagcagtccgttgccctcgacgtgctgtcttaccacgctacctgctctaaggcagaggtggacaagttcaaggccgcaaacatccctttggtgagtgagctcgctatagatgacatccattttgacgacttttcccttgatgtcgacgcaatgattaccgcagctctgcgcatgtttatggaattagggatggtacagaaattcaaaatagattacgagaccctgtgccgatggctgctcactgtgcggaaaaactacaggatggtactataccataattggcgtcacgccttcaatgtgtgccagttgatgtttgccatgctgaccacagccggattccaggatatcctaacagaggtggagatattggctgtgatagtagggtgtctctgccacgacttggaccataggggtactaataacgccttccaggccaagtctgggagcgcgctggctcagttgtacggcacatccgccactctggagcaccatcatttcaaccatgccgtgatgatcctgcaatctgaaggccataatatctttgcgaatctgagcagtaaggagtacagtgatttgatgcaactcctgaaacagagcatcttggcaactgacctgacgctgtatttcgagcgtcgtaccgaattttttgaactggtgtcgaaaggagaatacgactggaatatcaagaatcatcgcgacattttccgttcaatgctgatgactgcctgcgatttaggcgccgtgaccaaaccttgggaaatcagtcgtcaggtagcagagctggtgacaagtgagttttttgaacagggggacagagaaagactggagctcaagctcaccccgtctgctatatttgatcggaatcggaaagacgaattgcccagactccagctggaatggatcgactctatttgtatgccactttatcaggccctcgtgaaggtaaacgtgaaactcaagcccatgctggactccgtcgctactaacagatcgaaatgggaagagctgcatcagaaacggttattagcaagcaccgcctcgtcctcgccagccagtgttatggtggcaaaagaggataggaattag

SEQ ID NO: 199275 - DNA, 1728 bp, synthetic construct
  misc_feature 1..1728: note = Description of Artificial Sequence: Synthetic coding sequence
  source 1..1728: mol_type = other DNA
atgcagatgtacctgcccttctgcggcatcgccatcagcaacgcccagctttttgctgcatccagaaaggagtacgaaaggtcaagggcacttcttgaggtggtcaatgacttatttgaggaacagaccgacctggagaaaatagtgaagaagatcatgcatagagcacaaacactgctgaagtgtgagaggtgttctgttctgctattggaggacatagagtctccagtggtgaagtttaccaagagctttgaactcatgagcccaaagtgttctgcagatgcggagaactctttcaaggaatccatggaaaaatcaagttattctgattggctgatcaataactcaatcgctgagttggtcgccagtacaggccttcccgttaatatttccgatgcatatcaagatccaagatttgatgcagaagctgatcagattagcgggttccacatccgttccgtgttgtgcgtgcctatctggaattctaaccatcagatcattggcgtagcccaggtcctgaatcgcctagatgggaagccattcgacgacgctgatcaaaggttgttcgaggctttcgtcattttttgtgggctggggattaataataccattatgtacgaccaggtgaagaaaagctgggctaaacagtcagtggcacttgatgtgctgtcctaccatgcaacttgttccaaggccgaggttgacaagttcaaagcggccaacatccccctcgtttcggaactagctattgacgatattcattttgacgacttctctctggacgtggacgccatgattaccgcagcgctccgaatgttcatggagctcggcatggtgcagaagtttaagattgattatgaaaccctttgccgctggttgctcacggtacggaagaattaccggatggtgctgtaccacaattggaggcatgccttcaacgtgtgccagttgatgttcgccatgcttaccaccgctggctttcaggatattctgaccgaggtggagatcctggctgtcatcgtaggctgtctatgtcatgatctcgaccatagaggcactaacaacgccttccaagccaagtccgggtcagccctggcccagctgtatgggacttccgcaactctcgaacaccatcacttcaatcatgctgtcatgatcctccagagcgagggccacaatattttcgctaacctttctagtaaagagtacagcgacttaatgcagctgctcaagcagtcaatactagctacagatcttacactctactttgaacgacgtacagaattttttgagttggtttctaagggcgaatatgactggaacatcaaaaaccacagggacattttccgaagtatgctgatgaccgcttgcgatctgggtgcagttaccaagccctgggagatttccaggcaggtcgccgagctggtgacctcagaatttttcgagcaaggagatcgcgagcgccttgaattgaagctgactccttccgccatttttgatagaaatcggaaggatgagctgcctagactgcagctggaatggatcgacagtatctgcatgccgttataccaggctctggtcaaggtcaacgtgaagttaaagcccatgcttgacagtgtagccactaatagatccaagtgggaagagttacatcagaaacggctccttgctagtacggcctcttcgtcccctgcttcagtgatggttgcaaaggaagatagaaactag

SEQ ID NO: 199276 - DNA, 393 bp, synthetic construct
  misc_feature 1..393: note = Description of Artificial Sequence: Synthetic coding sequence
  source 1..393: mol_type = other DNA
atgcccatccggagcagcgacggcgagatcatcggcgtggcccaggcaatcaataagattccggaaggagcaccttttacggaggatgatgaaaaggtaatgcagatgtatctgcctttttgtggcattgccatctcaaatgcccagctctttgctgcatcccggaaagaatatgaacgtagccgggctctgctggaagtggtaaatgacctcttcgaagaacagacagatctcgagaaaatcgttaagaagattatgcaccgggcacagacattgctgaagtgcgaaaggtgcagtgttctactgctggaggatatcgagtctccagttgtcaaattcaccaagagctttgaacttatgtcaccaaagtgctccgcagatgctgaaaactag

SEQ ID NO: 199277 - DNA, 1728 bp, synthetic construct
  misc_feature 1..1728: note = Description of Artificial Sequence: Synthetic coding sequence
  source 1..1728: mol_type = other DNA
atgcagatgtacctgcccttctgcggcatcgccatcagcaacgcccagttgtttgccgcaagtcggaaagaatacgaacgaagcagggcgctgctggaggttgttaatgacctgttcgaagaacagaccgacctcgagaaaattgtgaaaaaaattatgcatagagcccagaccttgctaaagtgcgaaagatgttccgtgcttctgctggaggatatcgagtctccagtggtgaaatttacaaagtccttcgaattaatgtcccctaagtgttctgccgacgcagaaaacagtttcaaagagagcatggaaaagtctagctactctgactggttaatcaataattccatcgctgagctggtcgccagcaccgggctgccagttaatatctccgatgcctatcaggaccccagattcgacgcagaggctgatcaaatttccggattccacatccgatcagtcctttgtgttccaatatggaactcgaatcaccagatcatcggagtggcgcaggtgttgaacagactcgatggcaagcctttcgacgacgctgaccagcgcctgttcgaggctttcgtgatcttctgtgggcttgggattaacaacactattatgtacgatcaggtgaagaaatcatgggccaagcagagcgttgccctcgatgttctcagctatcacgctacctgtagcaaagcagaggtagataaattcaaggcagccaatatccccctcgtgtcagaactggccatcgacgatattcactttgacgacttttctctggacgtggatgcaatgattacggccgccctacgaatgtttatggaacttggaatggtccagaagtttaaaatagactacgagaccctctgtagatggttgttaacagtgcgcaaaaattataggatggtgctctatcacaattggcgtcatgcctttaacgtttgccagctgatgttcgcgatgttaactacggcaggttttcaggacatactgaccgaagtggaaatactggcagttatcgttggatgcctttgtcacgacctcgaccatcgcggtaccaataatgccttccaggctaaaagtggcagtgccttagcccaactgtatggtacatccgcaacacttgagcaccaccacttcaaccacgctgttatgatactccagagtgaagggcacaatatttttgccaatctctcatctaaggagtactccgacttaatgcagctattaaagcaatcaatccttgccaccgacctcacgctctacttcgagcggcggacagaattttttgagttggtgtctaaaggcgaatacgattggaatatcaagaaccacagagacatatttagatcaatgctgatgacagcctgtgaccttggggccgtgaccaaaccttgggagatttcccggcaggtagccgagcttgtaacatccgagttcttcgagcaaggtgacagggaacggctggagttaaaattgacccccagcgcaatttttgacaggaaccgtaaagacgagttgccaagacttcaactggagtggatagactcgatttgcatgcctctgtaccaagctctggtgaaggtgaatgttaaacttaagccaatgttggactccgtagccactaacaggagcaaatgggaggaattgcaccagaagagattgctggcaagtacagcttcctcttcccccgcatccgtcatggtggcaaaagaggaccggaactag

SEQ ID NO: 199278 - DNA, 375 bp, synthetic construct
  misc_feature 1..375: note = Description of Artificial Sequence: Synthetic coding sequence
  source 1..375: mol_type = other DNA
atgctgatgaccgcctgcgacctgggcgccgtgaccaagccctgggagatctccagacaggtcgcagagctcgtaacatccgaattcttcgagcagggcgacagagaaagacttgagctgaagttgacgccaagtgctatcttcgacagaaaccggaaagacgagctacctcggctgcagctagaatggattgattctatatgcatgccactgtatcaagctctggttaaggtcaatgttaagttgaagccaatgcttgattccgtggccaccaacaggagtaagtgggaagaactgcaccaaaagcggctactggccagcactgcctccagtagtcccgcatcagtcatggtcgcaaaggaggaccggaattag

SEQ ID NO: 199279 - DNA, 1638 bp, synthetic construct
  misc_feature 1..1638: note = Description of Artificial Sequence: Synthetic coding sequence
  source 1..1638: mol_type = other DNA
atgggcagcagcgccaccgagatcgaggagctggagaacaccaccttcaagtatcttactggtgagcaaaccgagaagatgtggcagcggcttaagggcattctccgctgcctggtgaagcagctcgaacgaggcgacgtaaacgttgtcgacttgaaaaaaaatatcgaatacgcagcctccgtgctggaggccgtgtatatagacgaaacgcgaaggttacttgacacagaagatgaactctctgacatccagactgattccgtgccttccgaggtgagagattggcttgcctccactttcacgcgcaagatgggtatgactaaaaagaaaccagaggaaaaacctaagttccgctcaattgtccacgccgtgcaggcgggcatattcgtggaaagaatgtataggaaaacctatcacatggtgggactcgcgtaccctgccgctgtgatcgtcactctaaaagatgttgacaaatggagttttgatgtgtttgcccttaatgaggcgtccggtgagcactctctcaaatttatgatatatgaactgttcacaaggtatgacctgatcaaccggttcaaaatcccggtctcttgcttaattacctttgcggaggcgctggaagtgggctactcaaaatacaagaacccctaccataatctcattcacgcggccgatgttacgcagaccgtacattacataatgctgcacactggcatcatgcactggttaaccgagctggaaattttggcaatggtttttgccgccgcgatccacgactatgaacatacgggaacaacaaataactttcatatacaaacccgtagtgatgtggccatcctgtataatgatagaagcgtattggagaatcaccacgtctccgctgcttatcgtctcatgcaggaagaagaaatgaatatcctgattaatctgagcaaggatgattggagggacctcagaaaccttgtgatcgagatggtgctgtccaccgatatgtctggccacttccagcaaatcaagaatatccgaaattccctgcaacagccagagggaattgaccgggccaaaaccatgtctttgatcttacacgctgccgatatcagtcatcctgccaagtcttggaaactccattacagatggacaatggccctcatggaagaatttttcctccaaggcgacaaggaagcagagttggggcttcccttttctcccctctgcgatagaaaatccacaatggtggctcaatctcagatcggattcatcgattttattgtggaaccgaccttctcattgcttactgattctaccgagaaaatagtgatcccccttatcgaagaggcaagtaaagcagaaacctcctcgtacgtggccagctcctctactaccatcgtgggtctgcacattgccgatgcactccggcgctcaaatactaagggctctatgagcgacggaagttacagtcccgattactcactggccgcagtcgacctgaagtctttcaagaacaacctggttgacatcatccaacaaaataaagagagatggaaggaactggccgcacagggggagtctgatctgcacaagaatagcgaagacctggtgaatgccgaagaaaaacacgacgaaacccactcctag

SEQ ID NO: 199280 - DNA, 1536 bp, synthetic construct
  misc_feature 1..1536: note = Description of Artificial Sequence: Synthetic coding sequence
  source 1..1536: mol_type = other DNA
atgggcaagaagatcaacaagctgttctgcttcaacttcctggtgcaatgttttaggggaaagagcaagcctagcaaatgtcagattagaaaaaaagtgaaaaaccatatcgaaagacttctcgacacagaagacgaactgagcgacatccagacagatagtgtgccgtcagaggttagggattggctggctagcacctttaccagaaagatggggatgaccaagaagaagcctgaagaaaagcccaagttcaggagcatcgtgcacgcagtccaggcaggtatctttgtggagcggatgtatcgcaaaacataccacatggtgggattggcctaccccgccgccgttattgtgactctgaaagacgtagacaagtggtctttcgatgtctttgccctcaatgaagcctcaggagaacattctctgaagttcatgatctatgaactgttcacaagatacgatttaataaaccgttttaagattcctgtgtcttgtttgatcacatttgcagaggccctggaggtgggatactccaagtacaagaacccttaccataacctaatccatgctgccgacgtgacacaaacagtgcattacattatgctgcatactggaattatgcactggctgacagaactcgagatactggccatggtttttgcagccgctattcatgactatgagcatacaggcactaccaataacttccacatccagacccggtcggatgtggcaatcctgtataacgacaggagcgttctcgagaaccaccatgtgtccgcagcctacaggttgatgcaggaggaggagatgaatattctcattaacctgagtaaggatgattggcgcgacctgcggaatcttgtgattgagatggtgctgtctaccgatatgagtgggcactttcagcaaatcaaaaacattcgcaacagtctccagcagccagaaggcatagatcgagctaaaacaatgagtcttattctgcatgcggctgacatttcccaccctgctaagtcctggaagctgcactatcgctggacgatggccctgatggaggagttttttctccagggagacaaggaagcagaactgggactgccattcagtcccctttgtgacaggaagtccactatggtggcgcaatctcagattggttttatagattttatcgtagagcctacattcagcctgttaacggactcaaccgaaaaaatcgttatcccgcttatcgaagaggcgtcgaaagctgagacttccagttacgtggcctcaagcagcactaccatcgtcggcctacacatcgccgacgcactccggagaagcaacaccaaaggttctatgtctgacggaagttacagccccgattactctttggctgccgttgacctcaagagctttaaaaataacctcgtagacattattcagcagaataaggagaggtggaaggagctggccgcgcagggagagtccgatctacacaagaatagcgaggacttggtaaatgcagaagaaaaacatgatgaaacacatagttag

SEQ ID NO: 199281 - DNA, 1560 bp, synthetic construct
  misc_feature 1..1560: note = Description of Artificial Sequence: Synthetic coding sequence
  source 1..1560: mol_type = other DNA
atggacgaccacgtgaccatccggaagaagcacctgcagcggcccattttccgtctgcggtgtctggtaaagcagctagaacgtggagacgtgaatgtcgtcgatttaaaaaagaacattgagtacgcagcctccgtgctagaagccgtgtacattgatgagacccgcaggttactggacacagaagatgagctttccgatatacaaacagactcagtaccatctgaagtgagggattggttagcctccaccttcaccaggaaaatgggtatgacgaagaagaaacccgaggaaaaacctaagttcagaagtatcgttcacgcagtgcaggcgggcatttttgtcgaacgcatgtatcgaaagacctatcacatggtaggactggcatatcccgctgccgtcattgtgacattaaaggacgttgacaagtggtcgttcgacgtctttgctctgaatgaagcatccggtgagcacagtctaaagtttatgatctacgaactgttcacaaggtatgacttaattaaccgatttaaaatcccagtgagttgcctgatcactttcgccgaagctttggaggtgggttattcaaagtacaaaaacccttatcataacttgattcacgcagctgatgttacacagaccgtgcattacattatgctgcacaccgggattatgcactggctgacagagctcgaaatcctcgcaatggtgtttgccgctgccatccacgactatgagcacactggtaccactaataatttccacatccagacacggagcgatgtagccattctgtataacgacagatctgtgctggaaaaccaccacgtcagtgctgcctataggctcatgcaagaagaggagatgaacatcctgatcaatctgtctaaagatgattggagggacctccggaatcttgtgattgaaatggtactcagtacggacatgagtggtcactttcagcagatcaagaacatccgcaatagccttcagcagccagagggtatcgacagagccaagacaatgtccctgattctacatgccgcagacatctctcaccccgcaaaatcttggaagctccattacaggtggacaatggcattgatggaagaattcttcctgcagggtgacaaagaagctgaacttggactgccattctcccctctgtgcgatagaaaatctacgatggttgctcaatcccagattggctttatcgatttcatcgtggagcccacatttagtttactgacggacagcacagaaaaaatcgttatacctctaattgaggaggcttcgaaagcggaaacgagttcctacgttgcttcctccagcacaaccattgtaggtctgcacatcgctgatgccctaagacggtccaacactaagggaagcatgtccgatgggtcatattcgccagattattctttggcggcagtggatctgaaatctttcaaaaacaatctggttgacatcatccagcagaataaagagcgctggaaggagctggctgcccaggaggctcggacatcatcacaaaagtgcgagttcatccaccagtag

SEQ ID NO: 199282 - DNA, 1608 bp, synthetic construct
  misc_feature 1..1608: note = Description of Artificial Sequence: Synthetic coding sequence
  source 1..1608: mol_type = other DNA
atgggcagcagcgccaccgagatcgaggagctggagaacaccacctttaagtacttgacaggcgaacagacagagaaaatgtggcaacgactcaaaggaatcctgcgctgcctggttaagcagttagaacgtggggacgtgaatgttgtagatttaaagaaaaatatcgagtacgccgctagcgttcttgaggccgtgtacatcgatgagacacgacgcctcctcgacaccgaagacgaattgtcagacatacagactgatagcgttccctccgaggtacgagactggctcgcttcaactttcactcggaaaatgggcatgaccaagaaaaaaccagaggagaaaccgaaattccgcagcatcgtccacgccgtccaggctggtatcttcgttgagaggatgtatagaaaaacttatcacatggtaggattagcctaccctgcggctgtcattgtgacgctgaaggatgtcgacaagtggtcatttgatgtattcgctctgaacgaagcgagcggcgaacacagtcttaaatttatgatatacgagctcttcacccgctacgacctgattaaccggttcaaaattcctgtgagctgcctgattacattcgctgaagctctggaggttggttattccaaatataagaacccttatcacaacctgattcacgccgccgatgtcacacagaccgtacattatatcatgctccacacaggcatcatgcattggcttactgaactcgagattctggctatggtttttgccgctgccatccacgactacgagcatacagggacgacaaacaacttccatatccaaacacgatcagacgtcgcaatcttatacaatgacaggtccgtgcttgagaatcatcacgtgagcgcagcctaccgcttgatgcaagaggaagagatgaacattctcattaatctgtccaaggacgactggcgggacctacgaaatttagtgatcgaaatggtattgagcaccgacatgagtggccactttcagcagatcaagaacattcggaattcgttgcagcagcctgagggcatcgatagagctaagactatgtccttaatcctacacgcggcagacattagccaccccgcgaagtcctggaagctccattatcgatggactatggcccttatggaggagttttttctgcagggagacaaggaggccgagctcggattgcctttcagcccactctgtgacaggaagagtacgatggtcgcacaatcacagattggcttcatagattttattgtcgagccaacattctccctgctgactgactcaaccgaaaaaattgtgatacctcttattgaagaggcctcgaaggccgagaccagcagctacgttgctagttctagcacaaccatcgtgggactgcatattgctgatgctttacgaagaagcaataccaaagggtctatgagtgatggctcatatagtccggattactccctggcagcagtcgaccttaagagcttcaaaaacaacctggtggatatcattcagcagaacaaagagcgttggaaggaactggcagcccaggaggcccggaccagctcacagaagtgtgaatttatacatcaatag

SEQ ID NO: 199283 - DNA, 1590 bp, synthetic construct
  misc_feature 1..1590: note = Description of Artificial Sequence: Synthetic coding sequence
  source 1..1590: mol_type = other DNA
atggacgaccacgtgaccatccggaagaagcacctgcagcggcccatctttagactccgctgcctagtgaagcaactcgagcggggagacgtgaacgtggtggatttaaaaaagaatatagagtacgcggctagcgtcctggaagctgtctacatcgacgagactcggagactgttggatacagaagacgagctctcagatattcaaactgatagtgtgccctctgaagtgcgggactggctcgccagcacattcacccgcaagatgggtatgaccaagaaaaagcccgaggagaaaccaaagtttcgtagtatcgtccatgctgtccaggctggcatttttgtcgagcgaatgtacaggaagacctatcatatggtcggcctggcctacccagctgcggtgatcgtcaccttaaaggatgtggacaaatggagctttgacgtattcgcactgaacgaggcctccggggagcactccctcaaatttatgatctatgagctgttcacacgttacgacctgataaataggttcaagatcccggtcagctgcctcatcacttttgctgaggcattggaggtcggctactcgaagtacaagaatccttaccacaacttaatccatgccgctgacgtgacacaaacagtacactacataatgctccacacaggtataatgcactggttaacagaattagagatcctagcgatggtctttgctgccgcgatccatgactacgaacataccggcactaccaataactttcatattcagactcgctctgatgtggctattttgtataatgatcggtccgtgctggaaaatcatcatgtgagtgcagcgtataggttaatgcaggaggaggagatgaacatcctgattaacttatcaaaggatgattggcgcgacctccggaacctggtgattgagatggtactgtccaccgacatgagcgggcacttccagcagattaagaacattcgcaacagcttacaacagcctgaaggcatcgatcgtgcaaaaaccatgtcattaatactgcacgccgcagacatctcccatccggcaaagtcttggaaacttcactatagatggacgatggctttgatggaagaattcttccttcaaggggacaaagaggctgagctaggcctgccgttttcgcccctgtgcgatagaaaaagtaccatggtagcccagagccagattggcttcatcgactttatagtcgaaccaactttttccttattgaccgacagcacggaaaaaatagtcatcccgctgatcgaggaggcctctaaggccgagacaagcagctacgtggcgagctcttccacaacaatcgtagggttacacatagccgatgcacttcgccggtcaaacacgaaggggagcatgagcgacggttcctactccccagactactcactcgcggccgtggaccttaagtcgtttaaaaacaatttagtggacatcattcagcagaacaaagagcggtggaaggaactggcggctcagggcgagagcgatctgcataagaattcggaagatctggtcaatgccgaagagaagcacgatgagacgcattcctag

SEQ ID NO: 199284 - DNA, 1608 bp, synthetic construct
  misc_feature 1..1608: note = Description of Artificial Sequence: Synthetic coding sequence
  source 1..1608: mol_type = other DNA
atgggcagcagcgccaccgagatcgaggagctggagaacaccaccttcaaatatctcactggcgaacagactgagaaaatgtggcagcgtctaaagggcattttgagatgcctggtgaagcagctcgaacgcggggacgtgaatgtcgttgatttaaaaaagaatatcgaatacgcagctagcgtgctcgaggcagtgtacatagacgaaacaaggcgactgctcgacaccgaggatgagctgtccgacatccaaacagacagcgtgcccagtgaagtccgcgattggctcgctagcacctttactaggaagatgggcatgacaaagaagaagcccgaagaaaagccgaagttcagatcgattgttcatgccgtgcaggcggggatctttgtggaacggatgtataggaaaacttatcacatggttggcttggcctatcccgcagccgtgattgtgacactgaaggacgtggacaaatggtcttttgatgtcttcgcactgaacgaggcaagtggcgagcattctctcaagtttatgatttacgagctgtttacaagatacgacctaatcaatagatttaagattcccgtcagctgcctgattacatttgccgaagcactggaggtgggatacagtaagtataagaatccatatcataaccttattcatgccgctgatgtgacccagaccgtgcactatatcatgctacacactgggataatgcactggctcacagagctggaaatcttggctatggtttttgccgccgcgattcacgattatgaacacacaggtacaacaaataatttccacatccagaccaggagtgacgtggcaattctctataacgatcggagcgtgttagaaaatcaccatgtgtcagccgcttatcggctgatgcaggaagaggaaatgaatatcttaatcaatcttagcaaggatgactggagggatttgaggaatttggtcatcgagatggtcctttcgacagatatgagtgggcactttcagcagatcaagaatataagaaattcactccagcaacctgagggtatagaccgcgccaagaccatgtccctaatcctgcatgccgccgacatctcccatccagccaagtcctggaaattgcattatcggtggacaatggccctaatggaggagtttttccttcaaggggacaaggaagccgaactgggacttcctttcagcccattgtgtgacaggaagtctaccatggttgctcagagccagatcgggttcatcgatttcatcgtagagccgacctttagtcttctgacagactccacggagaaaattgttatacctttaatcgaggaggcatctaaagcagagactagctcttatgtcgccagttcctcaacaactattgtcggccttcacatcgccgacgctctgcgtcgatcaaatactaaggggtctatgagcgacggctcgtatagtcctgactactctctcgccgctgtcgacctgaaaagcttcaagaacaacctggtggacattattcaacaaaataaggaacggtggaaagagctggctgcccaggaagctcggacaagctcccagaagtgtgaattcatccatcaatag

SEQ ID NO: 199285 - DNA, 1638 bp, synthetic construct
  misc_feature 1..1638: note = Description of Artificial Sequence: Synthetic coding sequence
  source 1..1638: mol_type = other DNA
atgggcagcagcgccaccgagatcgaggagctggagaacaccaccttcaagtatctgactggagagcaaacagagaagatgtggcagaggcttaaaggaattctgaggtgtttagtgaaacagttagaacgcggggatgtaaatgtggttgatctgaaaaaaaatatcgaatatgccgccagcgtcttggaagcagtctatattgatgaaacgcgccggttgctggatacagaggatgagcttagcgatatacagaccgattctgtgcccagcgaagtcagagactggttagcctcaacctttactaggaagatggggatgaccaagaaaaaacctgaagagaaacctaagttccgcagtatcgtgcatgcagtacaggctggtatcttcgtcgagagaatgtatcggaaaacttaccatatggtcgggcttgcctatcccgccgctgtgatagtgaccctcaaagacgtagataagtggtctttcgatgttttcgctctgaacgaggcgtccggcgagcactctcttaaattcatgatctacgagctgtttactagatatgatctcatcaaccgctttaaaatacctgtgagctgccttatcacttttgctgaggctcttgaggttggctacagtaaatacaagaacccatatcacaatctcatacacgctgctgacgtgacccagactgtgcattacatcatgctgcacactgggatcatgcactggctaacagaactggaaattctggctatggtgttcgctgccgctatccacgattatgaacataccggcactacaaacaatttccatattcagacccgttcagacgtggctatcctgtataacgacagaagcgtcttggagaatcatcatgtctcagcagcgtaccgtctaatgcaggaggaggaaatgaatattttaattaatctttcaaaagatgattggcgggacctcaggaacctggtaatcgagatggtgcttagcacagacatgtcggggcatttccagcagatcaagaacatcaggaacagtcttcagcagcctgagggcatcgaccgcgccaagactatgtccctcatactacatgcggccgacattagccaccctgctaaatcttggaaactgcactataggtggacaatggccctgatggaagagttctttttgcagggcgacaaagaagctgagctgggattacctttctctcccctgtgcgatcggaaatcgacaatggttgcacagagtcagatcggctttatcgacttcatcgtcgagcccacattttctctgttaaccgatagtaccgagaagattgtcattccactcattgaagaggctagtaaagctgaaacgagctcctatgtggctagcagctcaaccacgatcgtgggactgcacatcgctgatgccttaagacgcagcaacacaaagggctctatgtcagatgggagttattctccagattattccctggccgccgtcgacctgaagagcttcaagaacaatctggtggacatcattcaacagaacaaggaacgctggaaggaactggccgctcaaggggaatccgacctccacaagaatagcgaagatctcgtcaatgctgaggagaagcacgacgaaactcatagttag

SEQ ID NO: 199286 - DNA, 1659 bp, synthetic construct
  misc_feature 1..1659: note = Description of Artificial Sequence: Synthetic coding sequence
  source 1..1659: mol_type = other DNA
atgggcagcagcgccaccgagatcgaggagctggagaacaccacctttaagtacctcactggcgagcagactgaaaagatgtggcagcggctaaaagggattctccgctgtttggtgaaacaactcgagcgtggtgatgttaacgtagtcgacctgaagaaaaacatcgaatatgcggcctcagttctcgaggcggtctatatcgatgaaacaagaaggctgctcgacactgaagatgagctgtcggatatacagactgacagcgtgcctagcgaggtgcgcgactggctggccagcacatttactcgaaaaatgggcatgaccaagaaaaaaccagaggagaaacccaagtttcgctccatcgtgcatgccgtgcaagccggtatattcgtggaaagaatgtaccgcaaaacttatcacatggtaggccttgcatatcccgcagccgtgatcgtgactcttaaagacgtggacaagtggtcattcgatgtgttcgcattaaatgaggcctctggcgaacattccctcaaatttatgatctacgagctgttcacccgttatgatttgataaatagattcaaaattcccgtgagttgcttgatcacgtttgctgaggcactggaggtgggctactctaagtataaaaatccataccataacttgatccatgccgccgacgtgacccagaccgtgcattacattatgcttcacaccggcattatgcactggttgacagagttagaaatattggcaatggtcttcgcggcagcaatccacgattatgagcatactgggaccactaacaactttcacatccaaacgcggagcgacgtcgctatcctctacaacgacagatccgtactggagaaccaccacgtatccgcagcctaccggcttatgcaggaggaggagatgaacatccttatcaatctatccaaagatgattggcgtgatctacgtaatctcgtcattgaaatggttctttccacagatatgtcaggccactttcagcagattaagaacattcgcaactccttgcagcagcctgagggaattgatcgggcaaagaccatgagcctcatactgcacgcagccgacatatctcatcccgccaaaagctggaaactgcactaccgatggaccatggccctcatggaggaattttttctgcaaggcgacaaggaagcggaacttggactgcctttctccccactgtgtgaccgcaagtctacgatggtcgcccaatcccagattggattcattgacttcatagtggagcccacattcagcttactcactgacagcacggagaaaatagtgatacctctaatcgaggaggccagtaaagccgagacgagttcttacgttgccagcagtagcacaacgatcgtgggcctgcacatcgccgacgctctccggagaagtaacaccaaaggcagcatgtcggacggctcatattctcctgattacagtctggccgcggtagacctgaagagcttcaaaaacaatttggttgacattattcaacagaataaagagaggtggaaagaacttgccgcacagggctccgtggtatatgaggcactgcttccaagtctgtcagtgtttaccagccccctacgggtatggatcacaagcagtagatttttgctgttatag

SEQ ID NO: 199287 - DNA, 1326 bp, synthetic construct
  misc_feature 1..1326: note = Description of Artificial Sequence: Synthetic coding sequence
  source 1..1326: mol_type = other DNA
atgggcatgaccaagaagaagcccgaggagaagcccaagttccggtccattgtgcacgccgtgcaggccgggatctttgtggaaaggatgtacagaaagacatatcatatggttggcctggcctacccagccgctgtgatcgtgacactcaaagacgtggacaagtggagctttgatgtgttcgcactcaacgaggcctctggcgagcattccctgaagttcatgatctacgagttgttcacaaggtatgacttgataaaccggttcaaaattccagtatcttgcttaatcacttttgcagaggccctcgaggttgggtactccaagtacaagaatccctaccacaatctaattcacgccgcagatgtcacccaaaccgtccactatatcatgttgcacacagggattatgcactggctgactgaactcgaaattcttgctatggtttttgcggccgcaattcacgactatgagcatacggggaccaccaataatttccatatacaaaccaggtccgatgtcgcaatcctgtataacgatcgatcagttcttgagaaccaccatgtgtccgccgcataccggttgatgcaagaagaggaaatgaatatcctgatcaatctgtccaaagatgactggcgcgatctgcgcaatctggtaatagagatggtcttgagcacggacatgagtggacattttcagcaaattaagaacattcggaactcgctgcagcaacccgagggcattgatcgggccaaaaccatgtccctcatcttgcatgccgctgatataagccacccggccaagagctggaaacttcattatcgctggacgatggctctgatggaggagttctttctgcagggggataaagaggcagaactcggcctgcctttttcccccctgtgtgatcgtaagtcaaccatggtcgcccagtctcagattggcttcatcgatttcattgtagaaccaactttttcattactgactgacagcacggagaaaatcgtgatacctctgatagaagaggcttccaaggcagaaacttctagctacgtcgctagctcctctaccacaattgtggggctgcacatcgctgacgcgctccgtaggagcaacacaaaagggtcgatgagcgacggcagctactctcctgactactcactcgcagcagtggatctcaagtcctttaaaaacaatctggttgatatcattcaacagaacaaagaaaggtggaaggagctcgcagcccagggagagagcgacctgcataagaactccgaagatcttgtgaacgctgaggaaaagcacgacgaaacacattcctag

SEQ ID NO: 199288 - DNA, 1611 bp, synthetic construct
  misc_feature 1..1611: note = Description of Artificial Sequence: Synthetic coding sequence
  source 1..1611: mol_type = other DNA
atggagctgagcccccggagcccccccgagatgctggaggagagcgactgtccaagccccttggagctcaaatctgccccaagcaagaaaatgtggattaagctgagaagcttgttgcgatatatggtaaagcagctggagaacggggagatcaatatcgaagaattgaaaaagaatcttgaatacacagcctccctactggaagctgtgtatatcgatgagacacgacaaattctggacaccgaggatgagctccaagaattgcggtcagacgccgtgccatctgaagtccgggattggctcgcttccacatttacacagcaagcacgagccaaggggcggagggctgaagaaaaacctaagtttcgctcaattgtgcacgctgtccaagcaggaatcttcgtggaaaggatgtttagacgcacctacactagtgtgggccctacgtactcaacagctgtccttaactgccttaagaaccttgacttatggtgttttgacgtgttttccctgaatcaggcagccgacgatcatgccctacgcaccatcgtctttgagctgctgaccagacacaacctgatatcaaggtttaaaattcctaccgtctttctgatgtcttttttagatgccctggaaacaggatatgggaagtacaagaatccatatcataaccaaatccacgcagccgatgtgacacagaccgtccactgcttcctcctgcgcacgggaatggtgcattgcttgtccgaaatcgagctcctggccatcatcttcgcggccgctatccacgactacgagcacacaggcacaaccaactccttccacatacagactaaaagcgagtgtgctatcgtctataatgatcgcagcgttcttgagaatcaccacatctcctcagtcttcaggctgatgcaagatgacgagatgaatatcttcataaatctgaccaaagacgagtttgtcgagcttcgcgctctcgtcattgaaatggtcctggccacggacatgtcatgccattttcaacaggtaaagactatgaagacagcccttcagcaactcgaacgcatcgacaagcctaaggctctctcacttctactgcacgcggccgacatttcacatcccacaaagcaatggctggtccacagccgctggacgaaggccctgatggaggaatttttccgacagggcgataaggaagccgagctgggcctgcccttcagtcctttgtgtgacagaaccagcactctcgtagcacagagtcagatcggttttatcgattttatagtggagcctaccttttccgttctgaccgacgtagctgagaagagtgtgcagcctcttgctgatgaggattctaaatctaagaaccaacccagcttccaatggcggcagccctccctggatgtcgaggttggcgatcctaatcctgatgtggtctcgttcagaagcacttgggtgaagcgaatccaagagaataaacagaagtggaaagaacgagcggcttcaggcatcacaaaccagatgtccatcgacgaactctctccctgcgaagaagaagcacctccgtctcctgcggaagatgagcacaaccaaaacggcaacctggactag

SEQ ID NO: 199289 - DNA, 1488 bp, synthetic construct
  misc_feature 1..1488: note = Description of Artificial Sequence: Synthetic coding sequence
  source 1..1488: mol_type = other DNA
atggtgaagcagctggagaacggcgagatcaacatcgaggagctgaaaaagaacctggagtatacagcctccttgcttgaggcagtgtacattgatgaaacgcgccaaatcctggacaccgaggacgagttacaggaactgcggagtgatgcagtgccatccgaagtgagagattggctagcctctacatttacccagcaggcccgcgccaaaggaagaagagcagaggagaaaccaaagtttcgctcgattgtgcatgctgtgcaggcaggcatatttgttgagcggatgtttcgccgcacgtatacctccgtgggaccaacatacagcactgcagtgctgaattgcctgaagaacctcgacctgtggtgttttgacgtgttcagcttgaaccaggccgcagatgaccacgccctgaggacaatagtgtttgagctgctgacaagacataacctcatttctcgattcaagatccctacggtgtttttaatgtctttcctggacgcgttagagacaggttacggcaaatacaagaatccctatcacaatcagatccacgccgctgatgtgacccagacggttcactgcttcctgttacggactggtatggtccactgcctttccgaaatcgagctccttgctattatcttcgctgccgcgattcacgattatgaacacactggtacaacgaacagcttccacatccaaaccaaaagtgaatgcgctattgtgtacaacgaccgctccgttctcgagaaccaccatatcagtagcgtctttcgcttaatgcaggacgacgaaatgaacatcttcattaacctaacaaaagacgaatttgtggagcttcgggcactcgtcattgaaatggtgctagcaaccgatatgagctgccatttccagcaagtgaaaacaatgaaaactgctctgcagcagctggagaggatcgacaagcccaaggccctctcccttctgctgcacgctgccgacatttcccaccccactaagcaatggctggtacactcccgctggacaaaagctctgatggaggagttcttccggcaaggggataaagaggccgagttggggctacccttcagcccgctctgtgacagaacgtccacacttgtcgcccagagtcaaattggattcatcgacttcattgttgaacccaccttctctgtattgaccgatgttgcagagaagtcagtacagcctctggctgatgaagacagcaagtccaaaaaccagccttctttccagtggagacagccgtcacttgatgtggaggtgggagacccaaatccggacgtggtttcctttagaagcacatgggtcaagcgaattcaggagaacaaacagaagtggaaggaacgggctgcctctggtatcacaaaccaaatgtcaattgacgagcttagcccttgcgaagaagaggctccgccatctcccgcagaagacgagcataatcaaaatggcaatctggactag

SEQ ID NO: 199290 - DNA, 1551 bp, synthetic construct
  misc_feature 1..1551: note = Description of Artificial Sequence: Synthetic coding sequence
  source 1..1551: mol_type = other DNA
atggccaaccccgtgcccgtgcagcggagccacctgcagggccccattttacgcctgaggtacatggtcaagcaactggagaatggagaaatcaatatcgaggaactgaagaagaacttagagtatactgcatcacttttggaagccgtttatatcgacgaaacccggcaaatcctggacacagaggacgaactgcaggaattacgctctgacgccgtgccctctgaagtgagggattggctagccagcacatttactcagcaggccagagcgaagggccgccgcgccgaggagaagcctaagtttcgctctatcgtgcatgccgtgcaggccggcatcttcgtggaaagaatgtttcggaggacctatacatccgtcggacccacatatagtactgccgtactaaattgccttaagaacctcgacctttggtgcttcgacgtcttttcccttaaccaggccgcagatgatcatgctctgagaacgatcgtgttcgaactgctcactagacataatctcatttcacgattcaagatccctacggtgttcctgatgtctttccttgatgcactcgaaacaggttatggcaaatacaagaacccttaccacaaccagatacacgctgccgatgttactcagacagtgcattgcttcctgctccgcacaggtatggttcactgcctgtccgagatcgagctgctggccatcatcttcgccgccgccatacacgattatgaacacaccgggactaccaacagcttccatattcagaccaagtctgaatgcgctatcgtgtacaacgaccgctccgtgcttgaaaatcaccacatcagctcagtcttcagactgatgcaggacgacgaaatgaatatctttattaatctgactaaagacgaatttgtcgaactgagggctcttgtgatcgaaatggtactggcaactgatatgagctgtcacttccagcaggtgaagaccatgaagactgccctgcagcagttggaacggatcgacaagcccaaggctctctctctattactacatgccgccgacatatctcacccaacaaaacagtggctggtacattcccgctggacaaaagccctcatggaggagttcttcagacaaggcgataaggaggcagaactcggcctgccattttccccattatgcgaccgcacctcaaccttggtggcgcaatcgcagatcgggtttatagacttcatcgtagaaccaaccttctccgtcctgaccgacgtcgcggagaagagcgtgcaacccctggccgacgaggactccaaatcaaagaaccaaccctcattccagtggcggcaaccctctctggatgttgaagtcggggacccaaatcccgacgtggtaagctttcggagcacttgggtaaagaggatccaggagaacaaacaaaagtggaaggaaagagcggcgtcaggcattacgaatcagatgtctatcgatgagcttagtccctgtgaggaagaagcacccccaagtccagctgaagatgagcacaatcagaatgggaatctggattag

SEQ ID NO: 199291 - DNA, 2310 bp, synthetic construct
  misc_feature 1..2310: note = Description of Artificial Sequence: Synthetic coding sequence
  source 1..2310: mol_type = other DNA
atgaccgacgccggcaaccggaaggagggcttcaagaagtgccggagtgcaacattttctatcgacggatactcatttactatcgtggctaatgaggctggagacaaaaacgcccggccactcgctcgcttctcccgatctaaaagccagaactgcctgtggaattctctgatcgacgggttaacgggaaacgtcaaggagaagccccgaccaactattgtccacgatccccgccccccagaagagatcctcgccgacgaactcccccaactcgattcatcagaggtacttgtgaagaccagctttagattgcgctcattagtgaagcagctggagcgcggagaagcttccgtggtggaccttaaaaaaaacttagaatatgctgccacggtcctggaatcggtgtatatcgatgagacacgacgactcctggacacagaggatgaactatccgatatccagagcgatgctgttccgtcagaggtcagggactggctggctagtacattcacacgtcaaatgggaatgatgctcaggcgcagtgacgagaagcccagattcaaatccatcgttcacgccgtgcaggccggtattttcgtcgagaggatgtaccgacggacatccaatatggtgggtttatcttaccccccagcagtgattgaggctctgaaggatgtcgacaaatggtcattcgacgtgttctctttgaatgaagcaagcggcgaccacgcgctcaagttcattttttatgagctgctgacacgttatgatcttatctctagattcaagatccctatttccgcactcgtctcatttgttgaagctctcgaggtgggctactccaagcacaagaacccatatcacaacctcatgcatgctgccgatgtgacacagaccgtccactatctcctctataagaccggagtcgctaattggcttacggagctcgagatcttcgcaataattttctctgcagctattcacgattacgagcataccgggacgaccaacaatttccatatccagactagaagcgacccggctattctgtataatgaccggtcagtgttggaaaaccaccatttgagcgcagcctacagactgctccaggatgatgaagagatgaatattctaatcaatctcagtaaagatgactggcgggagtttaggacgcttgtgatcgagatggtcatggccactgacatgtcatgtcactttcagcagatcaaggctatgaaaactgcactgcaacaacccgaagcgatagagaaaccaaaagctctgtctctcatgctccacaccgcagatatttcccacccagccaaagcgtgggatctgcatcatcggtggactatgagcctcttggaggagttttttagacagggcgaccgtgaggcagagctgggtctgccattctcccccctgtgcgatcggaagagtaccatggtggcccagtcgcaagtgggcttcatcgatttcatcgtggaacctaccttcacagtccttaccgatatgaccgaaaaaatcgtttcccccctgatagacgaaacgtcgcagactggcggcacgggccagcgccggagcagcctgaattccatatcttcctccgacgccaagaggagcggcgtgaaaacctcagggtctgaggggtccgcgcccataaacaattctgtaatatctgtcgattacaagagtttcaaagccacgtggactgaggtggttcacatcaatagagagaggtggagagctaaggtcccgaaagaggagaaagccaagaaagaggccgaagaaaaagctcgcctagctgcagaagaacagcagaaggagatggaggcgaaaagtcaggctgaagagggcgcttccggaaaggccgagaagaagacatcaggcgagaccaagaaccaggtcaacgggacaagagctaacaagtcagacaaccctcggggtaagaacagcaaggcggagaagtccagcggagagcagcaacagaacggcgactttaaggatggtaagaataagaccgacaagaaagaccacagcaacatcgggaatgattccaagaagaccgatggtacaaagcagagatcacatgggagtcccgctcctagtacatcgtctacctgcaggctcacactccctgtaattaaaccacctctacgacacttcaaaagacctgcatacgccagctcatcctacgcccctagcgtgtcaaaaaaaacagacgaacacccagctaggtacaaaatgctagatcagagaataaagatgaaaaagatccagaacatttcccacaattggaataggaagtag

SEQ ID NO: 199292 - DNA, 2130 bp, synthetic construct
  misc_feature 1..2130: note = Description of Artificial Sequence: Synthetic coding sequence
  source 1..2130: mol_type = other DNA
atggagagccccaccaaggagatcgaggagttcgagagcaacagcctgaagtaccttcaacccgaacaaatcgaaaaaatctggctcagattgcggggcctacgcaagtataaaaaaacctcccagcgccttagaagtttggtaaagcaactggagcggggcgaagcatcggtagtggatttaaagaagaatttggaatatgccgccacagtactcgagtcggtttatattgacgagacgcgcagactgcttgacacagaggacgaactctcagacatccaatcagatgcggtgcccagtgaagtcagggactggttggccagtacattcactcggcagatgggaatgatgctgagacgttcagatgagaagccccgctttaagagtattgtgcacgccgtgcaggccggcatcttcgtagaaagaatgtaccgaaggacctcaaacatggtaggtctgtcatatccacctgccgtgatagaggccctgaaagacgtagataagtggagctttgatgtcttctccctgaatgaagcaagcggcgaccacgccttaaaattcatcttctacgagctgttgacccgatatgatctgatcagccgctttaagatccctatcagcgcccttgtgtcattcgtggaagcgcttgaagttgggtatagtaaacataaaaacccatatcataacctgatgcatgccgccgacgtgacacagaccgtccattacctgctgtacaaaaccggagtcgcgaattggctgacggaacttgaaattttcgcaattattttctctgctgctattcatgactatgaacatacagggaccacaaataatttccacattcagactaggagcgatcctgccattttatacaatgacagatcggtgctggaaaatcatcacctgagtgccgcctacaggcttctgcaggacgatgaagaaatgaatattctgataaacctgtcaaaggatgattggcgggagtttcgcacactcgtaatcgaaatggtcatggctactgatatgagttgtcatttccagcagattaaagctatgaaaacagctcttcagcagcccgaggctatcgaaaagccgaaggcgctgtccttaatgcttcatacagccgacatctcccatcctgcaaaggcgtgggacctgcatcatagatggacaatgtctctgttagaggagttttttagacagggcgatcgcgaggcagagctcggcctcccattcagccctttgtgcgacaggaaatctactatggttgcacagagccaggtgggttttatcgattttatagtggaacctacttttacagtcttgaccgacatgaccgagaaaatcgtgagccctctcatcgatgaaacctcacagaccggtgggaccgggcagcgccgcagttccctcaatagcatcagttctagtgacgctaaacgtagtggcgtcaaaacgagtggcagtgaggggtctgcacccataaacaacagcgtgatttccgttgactacaaatcttttaaggcaacgtggacagaggttgtccacatcaatcgggaacggtggcgggcaaaagttccaaaggaagagaaggcaaaaaaggaagcggaagaaaaagctcgtctcgcggccgaggagcagcaaaaggaaatggaggctaaaagtcaggctgaagaaggtgcctcaggaaaagctgaaaaaaaaacgagcggcgaaaccaagaatcaggttaatggcactcgcgccaacaaaagtgataatccacgaggtaagaacagtaaagcagagaagtcatcaggcgagcaacaacagaacggggacttcaaagatggaaagaacaaaactgacaagaaggaccatagcaatatcgggaacgactcgaagaagactgacggaacgaagcagagatcacacggatcgcctgcaccatctacatcttcaacatgtcgcctcactctgcccgtgatcaagccgccactcagacattttaagcgtcctgcatatgcgtcctcctcctatgcacccagcgtttctaagaaaactgacgagcacccagcgcgctacaagatgcttgaccagagaatcaaaatgaagaagattcagaacatttctcataactggaaccgaaaatag

SEQ ID NO: 199293 - DNA, 1905 bp, synthetic construct
  misc_feature 1..1905: note = Description of Artificial Sequence: Synthetic coding sequence
  source 1..1905: mol_type = other DNA
atggagagccccaccaaggagatcgaggagttcgagagcaacagcctgaagtacctgcagcccgaacaaattgagaagatctggcttagactgcgcggcctgcggaagtataaaaagacatcgcagagactgcgcagcctcgtgaaacaacttgagcggggggaggcttctgtggtggacctcaaaaagaacctcgagtacgccgctacggttctggaatctgtttacatcgacgagacaagacggctgctggatactgaggacgagctctctgatatacagtcggacgccgtcccctctgaggtgagggattggctcgctagcacatttacgagacagatgggcatgatgctgagacggtctgacgaaaagccgagatttaaatccatagtgcacgccgttcaggcaggcatattcgtcgagcggatgtacagacggacctcgaacatggtcgggctgtcttacccacccgccgtgatcgaggctctcaaggacgtggacaaatggtccttcgatgtgttttccctcaacgaagccagcggagaccacgccctgaagttcatcttttatgagctcctcacgcgctacgacctcattagcagattcaagatcccaatttccgccttagtatcattcgtggaagctctcgaggttggctactcaaagcataagaatccttatcacaatctcatgcacgctgctgatgtcacacagacagtccactaccttctgtataaaacaggcgtggctaactggctcacggagctggaaattttcgctattattttttcagccgctatacacgactacgagcacactgggacgactaataatttccacattcagacccgaagcgacccagccattctgtataatgaccgtagcgtgctcgagaaccaccatttgtccgctgcctaccggctgttgcaggacgatgaggagatgaacattctcataaacctcagtaaggatgattggcgtgagtttaggactctggtgatagaaatggtgatggctacggatatgtcatgtcacttccagcagatcaaagccatgaaaacagcactacagcagcctgaagcgatcgagaagccaaaggctctgagtctgatgctgcatactgccgacattagccatcccgcgaaagcgtgggacctgcatcaccggtggacaatgtcccttctggaagaattctttaggcagggcgatcgcgaggcagagcttggattgccattctctcccctttgcgatcggaagtcgaccatggtggctcagagccaagttgggttcatcgatttcatcgtggagcctacattcaccgtcctcacagatatgaccgagaaaatagtgtccccactgattgacgagaccagtcagaccggtggcacaggccaacgaaggtcctctctgaactctataagttccagcgacgcaaagcggtccggcgtgaaaacaagcggaagcgagggatcagcgcctatcaacaactctgtgatcagtgtcgactacaaatccttcaaagctacttggactgaagtggtacatattaaccgcgagcgctggagggccaaagtccccaaggaggagaaagcgaagaaggaggcagaggagaaagcccgcctggccgcagaagagcaacagaaggaaatggaggcaaaaagtcaggccgaagagggagctagcggtaaggctgagaagaagacaagtggcgaaaccaagaaccaggtgaatgggaccagggctaataaatctgacaacccaaggggcaagaactctaaagccgaaaaaagtagcggggagcagcagcagaatggagatttcaaggatggcaagaataagacggataaaaaggatcattcaaatatcgggaatgatagcaagaagacggatgactcccaggaatag

SEQ ID NO: 199294 - DNA, 1905 bp, synthetic construct
  misc_feature 1..1905: note = Description of Artificial Sequence: Synthetic coding sequence
  source 1..1905: mol_type = other DNA
atggagagccccaccaaggagatcgaggagttcgagagcaacagccttaagtacctacagccagaacaaattgaaaagatatggctgcgactgcggggccttcgcaaatacaagaaaacaagccagaggctccgttccctggtgaaacagttagaacggggggaggctagtgtggtcgatctgaagaagaaccttgagtacgcggccaccgtcctggaatccgtctacatcgacgagaccagacgattgcttgacacagaagacgaattgagcgacatccagtctgacgctgtgccgtcagaagtgcgggattggttggcttccacctttacacgtcagatgggtatgatgctccggaggagcgatgaaaaaccccggtttaagagcatcgtccacgccgtgcaggccgggatttttgtggaaaggatgtacaggaggacatcaaatatggtgggcctcagttatccccctgctgttattgaagcactgaaagatgtggataaatggtctttcgacgtgttctcgctaaatgaagcttctggcgatcatgccctcaagtttattttctatgaactgcttaccaggtatgaccttatctctaggtttaaaatcccgatctccgctttggtgtccttcgtggaggccttggaggttgggtacagcaagcataagaacccctaccataatctgatgcacgccgcggatgtaacccagactgtacattatctgttgtacaaaacgggggtggccaattggctgaccgagctggaaatctttgcaataattttcagcgccgctatccacgattacgagcataccgggactacaaataattttcacatccagactcgaagcgaccctgcaatcctgtacaatgaccgcagcgttctggaaaatcaccacctttctgctgcttataggttattacaggacgacgaagaaatgaacattctcataaatctgtctaaggatgactggcgcgaatttagaacacttgtgattgagatggttatggccacggatatgtcctgccactttcagcagataaaggccatgaagactgcactgcagcagccagaggcgattgaaaagcccaaggccttgagtcttatgctccacacagccgatatttcccacccagccaaagcctgggatttgcaccacaggtggaccatgagcctgttggaggagtttttccggcagggagaccgtgaagcagagctcgggttacctttctctcctctgtgtgaccggaagtcgacaatggtggcccagtctcaggtcggctttatcgatttcattgtggaacctacctttacagtactcaccgatatgaccgaaaaaatcgtctctccactcattgatgaaacttcccaaaccggcgggaccggtcaacgccgttctagcctgaacagtatcagtagctcagacgcaaagaggagcggggtaaagaccagcggctccgaaggctccgcgccgatcaataacagtgttatctctgtggactacaaaagctttaaggctacctggacagaagtagtacacattaacagggagaggtggagagcaaaggtccccaaggaggagaaggcgaagaaagaggccgaagaaaaagcccgcctcgcagcagaggagcagcaaaaggagatggaagcaaagagtcaagcagaagaaggggctagcggcaaggcggaaaagaaaacctcgggtgagacgaaaaaccaggttaatggaacccgggcaaacaagtctgacaatccccgcggcaaaaattcaaaggcggagaagagttctggagagcagcagcagaacggcgattttaaggacggaaagaacaaaacagacaagaaggatcattcgaatataggaaacgattcgaaaaagaccgacgatagccaggaatag

SEQ ID NO: 199295 - DNA, 141 bp, synthetic construct
  misc_feature 1..141: note = Description of Artificial Sequence: Synthetic coding sequence
  source 1..141: mol_type = other DNA
atggagagccccaccaaggagatcgaggagttcgagagcaacagcctaaaatatctccagccagagcagattgaaaagatctggttgcgcctgaggggtctccggaaatacaagaagaccagccaaaggctccgctcgtag

SEQ ID NO: 199296 - DNA, 2130 bp, synthetic construct
  misc_feature 1..2130: note = Description of Artificial Sequence: Synthetic coding sequence
  source 1..2130: mol_type = other DNA
atggagagccccaccaaggagatcgaggagttcgagagcaacagcctcaagtatctccaacctgaacagattgagaagatatggctgcggctgcgaggcttgaggaagtataaaaagacttcccagaggttacggagccttgtcaagcagcttgaaagaggagaagctagcgtggtggacctcaagaagaatctggaatatgccgcaactgtgctggagagtgtgtacatcgatgaaactcgcaggcttctggatacagaggacgagttgtctgacattcagtcggacgcagtgccttctgaggttcgcgactggctggcgtctaccttcacaagacagatgggtatgatgctgcgccggtccgacgagaaaccaagatttaaatccatagtacacgccgtccaagcaggaatttttgtagagcgtatgtaccgccgaaccagtaacatggtaggcctttcatatccccctgcagttatcgaggccctcaaggatgtggacaagtggtccttcgacgtcttctccctaaatgaggccagcggcgaccatgccttgaagtttattttctacgaactgcttacccggtacgatctcatcagcagatttaaaattcccatttctgctttagttagctttgtagaggctttggaggtaggttattccaagcataagaacccctatcacaacttaatgcacgcagccgatgtcacccaaaccgttcactacttactctataagaccggcgtggcaaattggctgacagagttagaaatattcgccatcattttcagcgcggcaatacacgactacgagcacacagggacgactaacaatttccacatacagacacggtcggatccagcaattctgtacaatgaccgatccgtcctggaaaatcatcatttaagcgcggcctatcgcttacttcaggacgacgaagagatgaatattctcattaacttatccaaggatgactggcgcgagtttcgcacgttagtaatcgaaatggtgatggcaacagacatgagctgccattttcagcaaatcaaggccatgaaaaccgcgctccagcagcctgaggccatcgaaaaacccaaggctctgtcgttgatgttacatacagccgatatttcacacccagcaaaggcatgggatctgcaccaccggtggaccatgagccttctcgaggagtttttcaggcaaggcgatagggaggccgaacttggactgcctttttccccgctttgcgatcggaaatccactatggtggctcagtcccaggtagggttcatagacttcatcgttgagcctaccttcactgtgttgacagacatgacagaaaagatcgtctctccactgattgacgagacctcccagacaggagggacagggcagcggcggagctctcttaattccatttctagttcggatgccaagcgctctggggtcaagaccagcggctccgaggggtccgcccctataaacaatagtgtgatcagcgtggattataagtcttttaaagcgacttggactgaggtcgtgcatattaatagagagcgctggcgagcaaaggttcccaaggaggagaaggctaaaaaggaagctgaggagaaagcacggttagccgcagaggagcagcagaaggagatggaggcaaagtcacaggctgaggagggcgcctctgggaaagcagaaaaaaagacgagtggcgagacaaagaaccaggtaaatgggactcgcgcaaataagtctgataatccccgtggcaagaattccaaggccgagaagagttctggggagcagcagcagaatggtgatttcaaagacgggaaaaacaagacagataaaaaggatcactccaacatcggcaacgatagcaaaaaaaccgatggcaccaaacagcggagccatggttctcctgctccctccacctcatccacgtgccgtttaactttgcctgttatcaaacccccgcttcgtcacttcaaaagaccagcgtacgcttcctcctcatacgcacctagcgtgtcaaagaaaaccgatgagcaccccgcccgctataagatgttagatcaacgcataaagatgaagaagatccaaaatatttcacataactggaaccggaaatag

SEQ ID NO: 199297 - DNA, 3339 bp, synthetic construct
  misc_feature 1..3339: note = Description of Artificial Sequence: Synthetic coding sequence
  source 1..3339: mol_type = other DNA
atgcggcgggacgagcgggacgccaaggccatgcggagcctgcagccccccgatggcgccggttcaccccctgagtcccttcggaatgggtacgtcaagagttgcgtgtctcccctacgccaggatccccctaggggctttttttttcatctgtgccggttctgcaatgtggaactgcgccctccccccgcgagtccccaacagccaagaaggtgttcacccttctgtagggcgagactctcattgggagccctcgccgccttcgtgctagcactgctgctgggagcagagcctgaatcctgggctgccggcgctgcatggctccgcacactgctatctgtgtgctcccactctttgtcaccacttttctcaatagcctgcgccttcttctttctgacttgtttcctcactagaactaaaagggggccaggtcccggcagatcctgcggatcctggtggcttttggcactgcccgcttgctgctacttaggagatttcctcgtgtggcagtggtggtcctggccatggggagatggtgatgctgggagcgctgctccacatacccccccagaagcagcagccggtcggctgctgctggtgctctcttgcgttggacttttattgactctcgcacatcctctgagattaaggcactgcgttcttgtgttgctgttagcctctttcgtatggtgggtcagcttcaccagcctcgggtccttgccatccgcccttcggccattgctctcaggtctggtaggcggagccggttgcctgctagcactgggtctcgaccactttttccagatacgcgaagctccgctgcatcccaggctgtcaagcgccgctgaagagaaagtgccggtaattagaccccggcgccgaagctcatgtgtcagcctaggggagacagcggcctcatactacggcagctgcaagatcttcagaaggccctccctcccatgcatctcaagagaacagatgatcttgtgggattgggacctgaagcaatggtacaagccacactatcagaactctggcggtggcaacggagttgatctttcggtgttaaacgaagccagaaacatggtttcagacctgttaactgacccctcactccccccacaggtgatttcatccctgaggtcgatttcatccttgatgggagcgttctcaggctcctgtcgaccaaagatcaatcccctgaccccatttcctggcttttatccctgtagtgaaatcgaagaccctgcagaaaaaggcgacagaaaattaaacaaggggttgaacaggaattcgcttcctacaccacagctgaggcgtagttcaggcacgtccgggctgctgcccgttgagcagtcttctcggtgggatcgtaacaacggcaagcggcctcaccaggaattcggaatctcctcccagggctgctacctgaacggacctttcaactctaacctcctgaccattcctaaacagagatcttcatctgtctctctgactcaccatgtgggcctccgtcgcgctggtgttctgagctccttaagccctgtgaactcatccaatcacggaccagtatctaccgggagcctgactaatcggtcacctatagaattccccgacaccgcagatttccttaacaaacccagtgttatactacaacggtcactgggtaacgcccctaacacaccagacttctaccagcaactgcgaaacagtgactcaaacctatgcaatagctgcggtcaccagatgctgaagtacgtgagcacctcggaaagtgatggaaccgactgctgctcgggcaagagcggggaagaggaaaacattttttcgaaagagtctttcaagctgatggaaactcagcaggaggaggagaccgaaaagaaagattcaaggaaacttttccaggaaggggacaagtggcttactgaggaggcccagagtgaacagcaaaccaatatcgagcaagaagtgtcattagacttaatcttggtggaagaatatgactctcttatcgaaaaaatgagtaattggaatttccccatcttcgagctggtagagaaaatgggcgaaaagtcgggcagaatcctaagtcaggtgatgtacaccctgtttcaggacacgggcctgttagaaattttcaagattccaacacaacagtttatgaattactttcgggcactagagaacggctacagagacatcccttaccataataggattcatgcaaccgacgtgttacatgcagtttggtacctaaccacacgcccggttccaggcctacaacagattcacaatggttgcgggactgggaatgaaactgacagcgatgggcgaatcaatcacggccgcatcgcctatatctcgtcaaaatcttgctctaacccagacgagagctacggctgtctgtcctccaacatcccagctttggagcttatggctttgtacgtcgctgctgccatgcacgactatgatcacccaggccggacaaacgctttccttgttgctaccaatgctcctcaggctgttctatacaacgacagatctgtgcttgagaaccaccatgctgcctcggcctggaacctgtacctgtccagacccgagtacaacttcctgttacatctggaccacgtcgagttcaagagatttaggttccttgtgatcgaggctatcctggccacagatttaaaaaagcacttcgattttctggccgaatttaatgcgaaagccaacgatgtaaattctaatgggatagagtggtcgaacgagaatgatagactcctggtctgccaggtttgcatcaagctcgcagatataaacggacccgcaaaggtgcgggacctccatctcaagtggactgagggcatagtcaacgagttttacgaacagggggacgaggaggccaacttagggctgcccatctccccttttatggaccgctcttcgccacaactcgcaaaattacaggagagctttatcacacacatcgttggccccctatgtaactcctacgatgcagctggtttattacctgggcagtggctagaggcggaggaggataatgacacggagtcgggcgatgacgaggatggtgaggagttggacaccgaggatgaggagatggaaaataacctgaatccaaagcccccgagaagaaagagccggaggcggatcttttgtcagctgatgcaccatctcaccgagaatcataaaatctggaaggaaatcgtcgaggaggaggagaagtgtaaggccgatggcaacaagttgcaagtcgagaatagctctttgcctcaggctgatgaaattcaggtaatagaggaggccgacgaggaagagtag

SEQ ID NO: 199298 - DNA, 3186 bp, synthetic construct
  misc_feature 1..3186: note = Description of Artificial Sequence: Synthetic coding sequence
  source 1..3186: mol_type = other DNA
atgcggcgggacgagcgggacgccaaggccatgcggagcctgcagccaccggatggagccggctcaccccccgaatccctcaggaacggttacgtgaagagctgtgtgagtcctctgagacaggaccctccaagagggttcttcttccatctttgtagattctgcaacgtcgagcttcgaccacccccagcatctccacagcaacctcggcggtgcagtccgttttgtcgtgcccggctatcactcggcgcgctggccgcctttgtccttgctctgctgttgggtgccgaacccgagtcttgggctgccggtgccgcctggctcaggacactactatccgtatgttcccacagcttgtctccactctttagtatcgcttgcgcctttttcttcttaacttgctttctgacccgaaccaaacgagggcctggcccaggcaggtcctgtggttcatggtggttactggccctaccagcgtgctgctatttgggagatttcctggtatggcagtggtggtcctggccatggggggacggtgacgctggtagcgcagcccctcacacaccaccagaggccgccgctgggaggcttttgcttgttctgtcttgcgtgggactgctgcttacgttagcacatcccctccgcttacggcattgtgtgcttgtgctcctgcttgcctctttcgtctggtgggtgtcgttcactagtctgggcagcttgccctctgccctgcgtccactgctgtccgggctcgtcgggggtgcaggatgcctgctggctctgggactggaccacttttttcagattagggaggctccactacaccccaggctgagcagtgctgcagaagaaaaagtgcccgtcattcgtcctcggagacggagttcttgtgtcagcctaggtgaaactgcagcctcctactatggcagctgcaagatcttccggcgacccagtctgccatgcatttcccgggagcagatgatcctttgggactgggatctcaagcaatggtacaaacctcattatcagaatagcggaggaggtaacggcgtcgatctgagtgtgctcaacgaggctcgtaacatggtctccgacctcttgaccgacccatccctcccacctcaaggactcaaccgcaactccctgcccacacctcaactgaggcgcagttcaggaacctccggtctccttccggtggagcagtccagccggtgggacaggaacaacgggaagcggccgcaccaggagttcgggattagctcccagggttgttaccttaatggaccatttaactccaacctcctgactatccccaaacagaggtcctccagcgtgtcgctgactcatcacgtcggtttgcgccgagctggagttctgtcctctttatcccccgtgaactcatccaatcacggaccagtgtctacggggagcctcactaatcgctcaccaatagagtttccagataccgccgactttttgaataagcccagcgtgatactccagagaagcttaggcaacgccccaaacacccccgacttttaccagcaacttcggaactccgattcaaacctatgcaatagttgcgggcatcagatgctgaaatatgtgtccacttcagaatccgacggtaccgactgttgcagtggaaaaagtggagaagaggaaaatatcttttcaaaagagtcctttaaactgatggagacccagcaggaagaggaaaccgagaagaaggacagcaggaagctgtttcaggaaggcgacaagtggttaacagaggaggctcagagcgaacagcagacgaatatcgaacaagaagtcagtctggatttgatactggtcgaagaatacgactccctgattgagaagatgtccaactggaactttccaatcttcgaactcgtagaaaaaatgggggaaaaatcaggccgcatactctcccaagtcatgtacacgttatttcaggataccggattactagagatctttaaaattcccactcagcagtttatgaattactttagagccctcgaaaacggctaccgggacataccttatcataataggatccatgctacagatgttttacacgccgtgtggtacttgaccaccaggccagtgcctgggttacagcaaatccacaatggatgcggtactggtaacgagacagactcagacgggaggatcaatcatggaaggattgcctacatcagctctaagtcgtgctccaacccagacgaatcttacggttgcctgagttccaacataccagcactcgaattgatggccttgtacgtcgccgccgcaatgcacgattacgatcatcctggcaggacaaatgctttcctggttgccacaaacgcccctcaggccgttctgtacaatgatcggtccgtgctggaaaatcaccatgctgcctcagcgtggaacctctatttaagcaggcccgagtacaacttcttgctccacttagaccatgttgaatttaaaaggttccggttcctggtgatcgaggccatcttggctaccgacctgaagaagcactttgatttcctagccgaattcaatgcgaaagcaaacgatgtgaactcgaacggtatcgaatggtctaatgagaacgacaggctactggtgtgtcaggtgtgcattaaattggccgatattaacgggcccgccaaggttagagacctgcacctgaaatggaccgaaggaattgttaatgagttctacgagcagggggacgaggaagccaatttgggattgcctatctcacccttcatggataggagcagcccccagttggcaaagcttcaggagtcctttattacccacattgtcggtccactatgtaatagttatgatgcagccgggctgctgcccggtcagtggctagaagcagaggaggacaatgatactgagtctggagacgacgaggatggcgaggaacttgacactgaggatgaggaaatggaaaataatctcaaccctaagccaccccggaggaaatcccgaaggcgcattttttgtcaactaatgcaccacctgacagaaaaccacaaaatctggaaggagatcgtggaggaggaggagaaatgcaaagccgatggaaacaaactgcaggtcgaaaactcaagtctgccccaagcggacgaaattcaggtgatagaggaagccgatgaggaggaatag

SEQ ID NO: 199299 - DNA, 2583 bp, synthetic construct
  misc_feature 1..2583: note = Description of Artificial Sequence: Synthetic coding sequence
  source 1..2583: mol_type = other DNA
atggcccggccccggggcctgggccggatccccgagctgcagctggtggcctttcctgtggccgtagctgccgaagacgaagcttttctaccagagcctctggcacctcgcgctccacggcgacccaggtctccccccagcagtcccgtcttttttgcctccccgtctcccacattccgacggcgacttcgacttctgcgctcatgtcaggatctcggccggcaagcgtgggcaggcgcagggttcgaggctgaaaatggcccaaccccatcgccagggcgaagcccacttgatagtcaggcatctccaggactcgtcctacacgccggggctgctaccagccagaggcgggagtcgtttctctaccggtctgattccgactacgacatgtccccaaagactatgtcacgcaacagtagcgtaacatctgaagcacacgcagaggacttgattgtcaccccctttgcacaggttctagcctctcttagatccgtgcgttcaaatttttcactgctgacgaacgtgcccgtgcccagtaataaacggagcccactgggcggacccacccctgtgtgcaaagccacattaagcgaggaaacatgtcagcagctggcacgcgagactttggaggaacttgactggtgtctggagcagctagagactatgcagacatatcggtccgtgtctgagatggcctctcataaattcaagagaatgctgaatagggagctcactcacttgagtgagatgagcagatccggtaatcaggtgtcagagtatatctccaccaccttcctggacaaacagaatgaggtggaaatccctagccccacaatgaaggagcgggagaagcagcaggcaccaagaccacggccatcacagccaccgcccccacctgtgccacacctccagccaatgtctcaaatcaccggcctgaagaagctcatgcacagcaactctctcaataattctaatatccccagatttggtgttaagaccgaccaggaggagttactggctcaggagcttgaaaaccttaataagtggggcttaaatattttctgtgtcagtgattacgcaggaggccgatccctgacttgcattatgtacatgatcttccaggaacgggatcttctaaaaaagttcaggattcctgttgacacaatggtgacatatatgcttacattggaggatcactaccacgccgatgtggcttatcataactccctccacgcggctgacgtgctccagagcacccacgtcttgttagcaacgcccgcgctcgacgctgtatttacagacctggagatcctagccgccctgtttgccgccgctatccacgatgtagatcatcctggtgtcagcaaccagttcctaattaatactaactctgagctggcactcatgtataacgatgagtcggtactggaaaaccaccatctagcggtaggtttcaaactcctacaggaggacaattgcgatatctttcaaaatctgagcaaaaggcagcgccagtcccttcgaaaaatggtgatagatatggtgcttgctacagacatgtctaagcacatgaccttgttggctgacctgaagacaatggttgaaactaagaaggtgaccagttcaggagtgctgctcctggataattatagcgaccgcattcaggtgctgagaaacatggtgcactgtgccgatctgtctaatcccaccaaacctctggagctgtaccgccagtggaccgataggattatggccgaattttttcagcaaggagacagggagagggagcgaggcatggaaattagtcctatgtgcgacaaacataccgcctcagtagagaaaagccaggtgggtttcatcgactacatcgtgcacccactttgggaaacctgggctgacctcgtgcacccggatgcccaggagatattagacaccctcgaagataatcgggattggtattactctgccattagacagtctcctagcccccccccggaggaggaatcacgcgggcctggtcaccctcctctccctgataagtttcagttcgagctgaccctcgaagaggaggaagaggaggagatctccatggctcagataccatgtaccgcacaagaggcccttacagcacaagggctttccggagtggaggaagctttggacgccactattgcctgggaggccagccccgcccaagaatcactcgaggtcatggctcaggaggcaagcctggaggctgaactggaggctgtgtacctcacccagcaggcgcagagcactgggtccgcccctgttgccccagacgaattctcctcaagagaggaattcgtcgtggctgtgagccactcctcccctagcgcgctggccctgcaatcccctctgctacctgcctggcgcactctgtcagtgagtgaacatgcacctggtctgcctgggcttccgagtacagctgcggaggtcgaagcccagcgagagcatcaggctgccaaacgcgcatgcagcgcctgcgccggcaccttcggggaggatacaagcgctctgcctgccccgggtgggggtgggtctggaggagaccctacgtag

SEQ ID NO: 199300 - DNA, 1944 bp, synthetic construct
  misc_feature 1..1944: note = Description of Artificial Sequence: Synthetic coding sequence
  source 1..1944: mol_type = other DNA
atgcccctggtggacttcttctgcgagacctgcagcaagccctggctggtgggctggtgggaccagttcaaacgcatgctgaacagggagctaactcacttgtcagagatgagcagatcaggcaaccaggtctctgagtatatctccactacttttctggacaagcagaatgaagtggagatcccgtctccgaccatgaaggagagggagaagcaacaggctccccgccctagaccctcccagccccccccccctccagttccccacctgcagcccatgagtcaaatcactgggttaaaaaagctcatgcatagcaattccctgaataatagtaacattccccgcttcggggttaagacggatcaggaggagctgttggcccaggagcttgaaaaccttaacaagtggggattgaatattttttgtgtgtctgactacgccggaggccggtcactcacttgcattatgtacatgatttttcaggagagggacttgcttaagaaatttcggatccccgtggacaccatggtaacgtatatgctcacccttgaggatcattaccacgcagacgttgcttaccataactctttacacgctgctgatgtgctccaatccactcatgtgttgctggccacccctgctctcgatgctgtgtttacagatctcgaaatcctggccgccctctttgccgcagctattcatgatgtggaccatccaggtgtatcaaatcagttccttatcaatactaattccgaactggcactcatgtacaacgatgagtctgtactggagaaccaccacctggcggtcggatttaagcttcttcaggaagacaactgcgacatattccagaatctttcaaaacggcagcgccaatccttgcggaagatggttatcgacatggtgctggccacggatatgtccaagcatatgaccctcctggctgacttaaaaactatggtcgagaccaaaaaagtcacatcctctggagtgctgctactagataactatagcgatcggattcaagtcctgaggaacatggttcactgcgcagacctgtcaaaccccaccaagcctctggagttgtacagacaatggacggacagaattatggcagaattctttcagcagggcgaccgggaacgcgagcggggaatggaaatctcaccgatgtgcgacaagcacaccgcctctgtcgaaaagagtcaggtaggcttcatcgattacatcgtacaccccctgtgggaaacctgggctgacttagtgcacccggacgcacaggagattttagatactctcgaggataaccgcgattggtattacagcgcgattcgccagtcgcccagcccaccacctgaggaggagagtcgcggtcctggacacccccctctgccggacaagtttcagttcgagctgacgttggaggaggaggaagaagaggaaatcagcatggcccaaattccttgcacagcccaagaggcactcactgcccagggtttaagtggtgttgaggaggccttggatgccaccattgcttgggaggcctctcccgctcaggaaagcctagaagtgatggcccaggaggcttccctggaggctgagctcgaagcggtgtatctcactcagcaggcccagagtacagggagcgccccagtggctcccgatgagtttagctcccgagaggagttcgtggtcgctgtcagccatagcagcccttccgcgctcgccctgcaaagtccactgcttccagcctggcggaccctttcagtgagcgagcacgcccctggacttcccggtctgccaagtacggccgccgaggttgaagcgcaacgggaacaccaggcggctaaacgtgcttgctcagcctgcgccggtacttttggtgaagatactagcgcactcccggctcccggcggggggggatctggtggagacccaacatag

SEQ ID NO: 199301 - DNA, 2661 bp, synthetic construct
  misc_feature 1..2661: note = Description of Artificial Sequence: Synthetic coding sequence
  source 1..2661: mol_type = other DNA
atggagccccccaccgtgcccagcgagcggagcctgagcctgagcttaccaggtcctcgggaggggcaagccacattgaagcctccaccacagcatctctggaggcagcctagaactcctattcgtatccagcagcgtggatatagcgacagcgctgagcgggctgagagagagaggcagccccatagacctatcgaaagggccgacgccatggacacctcagaccggccaggactgcgcacaactagaatgagttggccttcatcttttcatgggactgggactggctccgggggcgcaggcggcggttcctctcgccgattcgaggccgagaatggcccaaccccatctccagggcggtctccattggattcacaagcttccccggggctggtcctgcacgcaggggccgccacctcgcaaagacgtgagtcttttctgtacagatcagattctgactacgacatgtccccaaaaacgatgtcccgcaattcaagtgttacatcagaagcccacgcagaggacctaatcgtaaccccctttgcccaagttctagcttcactacgctcagtgaggagcaatttttcgctcttgaccaatgtacctgtgcctagcaacaagagatctccactggggggccctactcccgtctgcaaagcaaccttatccgaggaaacttgtcaacagctagctcgggaaaccctcgaggaactggattggtgtctcgagcagcttgaaaccatgcagacgtaccgttctgtgagcgaaatggcctctcataaatttaaacgaatgttgaaccgagagctaacccacctgtccgaaatgtcacgaagtgggaaccaagtatctgagtacatttccacaacatttttggacaaacagaacgaggttgaaatcccttcgccgaccatgaaggagagggaaaagcaacaggctccacgccctcggccttcccagcctccaccaccacccgtgccccacttacagcccatgagccagattacagggctcaaaaaacttatgcattcaaacagcctgaacaactcaaatatacctcgcttcggcgttaagacagatcaggaagagctgctggctcaggaactcgagaatttaaacaagtggggattgaatattttttgtgtgagcgactacgccggcgggcgatccctgacatgcatcatgtatatgattttccaagaaagggatttgctaaaaaaattccggatcccagtagacaccatggtgacctatatgctcactctcgaagaccattatcatgcagatgtggcttatcacaacagtttacatgctgctgatgtcctgcagtctacacatgttcttctggccactcctgccctggatgccgtgttcaccgatcttgaaatccttgccgctcttttcgctgccgctattcacgacgtcgatcacccaggcgtgtcaaaccagttcctgattaataccaattcagagcttgccttgatgtataacgatgagtccgtgctggaaaaccatcacctggcagtgggcttcaagctcctccaggaagataattgcgatatctttcagaatttatcgaagcgacagcgtcagtccttaagaaaaatggtgatagatatggtcttagctacagatatgagcaaacacatgaccctgctcgctgacctgaagactatggtggagactaagaaggtcactagctctggggtcctgttactcgataattactcagaccgaattcaagtgttgcgtaatatggttcactgtgccgacctgtctaaccccacaaagccgctcgagctgtaccgccagtggacagaccgcataatggcggagtttttccagcagggggaccgggagcgggagaggggcatggaaattagccctatgtgcgacaagcatactgcgtccgttgagaaaagccaggtgggtttcattgattatattgtgcatccactctgggagacctgggccgatctcgtacatccagatgcccaggaaatactcgacaccctcgaagataaccgcgattggtactattccgctattcgtcaaagcccgagtcctcccccagaggaagagtctcgtgggcctggacaccctccacttccagacaaattccagtttgagttgaccctggaagaagaagaagaggaggagatctccatggcacagatcccatgtacagcccaggaagctctaacagcgcaggggctcagtggagtggaggaggccctggacgccaccatcgcctgggaggcctcacctgcacaagaatcactcgaagtgatggctcaagaggcctcccttgaggccgagctggaagccgtgtatctgacacagcaggcgcagagtaccggctccgcccctgtggctcctgacgagttctctagccgggaagagttcgtggtcgcggtcagccatagctccccatctgctctcgctctccaatctccactgctgcctgcctggagaacactgagtgtgtcagagcacgctccaggcctgccaggacttccttctaccgctgctgaagtggaggcccaaagagaacaccaggctgccaaaagggcctgctctgcctgcgcaggcacatttggggaggacacttctgcgttgcctgcaccaggaggcggtggatctgggggggatcccacgtag

SEQ ID NO: 199302 - DNA, 972 bp, synthetic construct
  misc_feature 1..972: note = Description of Artificial Sequence: Synthetic coding sequence
  source 1..972: mol_type = other DNA
atggtgctgcccagcgaccagggcttcaagctgctgggcaacgtgctccagggtccagagccttatcgactacttaccagcggtttgcggctccaccaggagctcgaaaatctaaacaagtggggtctgaacatcttctgtgtcagcgactacgcagggggtcgtagcctgacctgtatcatgtacatgattttccaggagagggatctgctgaagaaatttagaataccagtcgataccatggtgacttacatgctgacactggaagaccactatcacgccgatgtcgcttaccataatagcctccatgcagcggacgttcttcagagtacacatgtgctgttggcgacgccagctctcgatgccgtgttcacagacctggaaatcctcgctgcgttgtttgccgccgctatccacgacgtcgaccatcccggagtgtctaatcagttcctgatcaatacaaatagcgagctggcattgatgtacaacgacgagtccgtgctcgaaaaccatcacctcgcggtcggattcaaactactacaggaggacaattgcgacatattccaaaatctgtctaaacggcagaggcaaagtctccgaaagatggtcatcgacatggtgcttgcaacggatatgtctaaacatatgaccttgctggccgacctaaagacaatggtggagactaagaaagtcactagcagcggagtcctattactcgacaactactccgataggatacaggtccttcgaaatatggtgcactgcgcagatttatccaaccctactaaaccccttgagctgtaccgacagtggacggacagaattatggcagaattctttcaacagggagatcgggaaagagagcgtggaatggagatctctcccatgtgtgataagcacaccgcctcggtggaaaaatcccaggtgcaggcacggggcattgatgggcgggcgcagggggagttttactag

SEQ ID NO: 199303 - DNA, 2595 bp, synthetic construct
  misc_feature 1..2595: note = Description of Artificial Sequence: Synthetic coding sequence
  source 1..2595: mol_type = other DNA
atgaagcggagccggagcgccctgagcgtggccggcaccggcgacgagaggtcacgcgaaacaccggagagtgatcgagcaaacatgctcggcgccgatctcagaaggcctcggaggaggttatctagtggtcccggactgggttgggcccagccagaaccctcggatcctggcgtgcctctgccgccgagacccacaaccctccccctcttgattcctccacgcattagtattacgcgggccgagaatgactcattcgaagctgagaacggcccaacgccttctccgggcagatcccctctggactcccaggcgtctcctggtctagtgctccatgcaggagctgcaacttctcaacgaagagaaagcttcctgtatagatctgactccgactacgatatgtcccctaaaacgatgagcaggaatagctcggtgaccagcgaagcccatgccgaagacttgatcgttacaccgttcgcccaggtcctggcatccctcaggtcggttaggagcaatttttcccttctgaccaatgtgcccgtcccctcaaataagcggtctccattgggcggtcctacacctgtgtgtaaagctactttaagtgaggagacatgtcagcaattggcaagagaaactctggaggagctcgattggtgtctggaacaactcgagacaatgcagacataccggtccgtgtcagaaatggcttctcacaaatttaagagaatgctgaacagagagctgacacatctctcagagatgtcaaggtccgggaaccaggtcagtgagtacattagtacaacttttctggataagcaaaacgaggttgagatcccatccccgactatgaaggaacgagagaaacagcaggctccacgacccaggccttctcagcctccacctcctcccgtgccccatctccaacctatgtctcagattacaggcctgaagaagctcatgcattccaattctcttaacaattccaacatcccgcggttcggagtcaaaacggaccaagaggaactgctggcccaggagctggagaatcttaataaatgggggcttaatatcttttgcgtatctgattatgccggtggccggtcacttacctgcatcatgtacatgatattccaggaacgggacttgctcaaaaaattcaggattcccgttgacactatggttacatacatgcttacgttagaggaccattatcatgcagacgtggcctaccataactccctgcatgcagccgacgtgttgcaatctacccacgtgttacttgcaacccctgcactggatgctgtgttcactgatcttgagattctggccgcattgtttgccgcagccattcatgatgttgaccatcctggtgtgtccaatcagtttctcatcaacaccaattctgagcttgccttgatgtacaatgacgagtctgtgttagagaatcaccaccttgctgtgggattcaaattactccaagaggataactgtgacattttccaaaatctctcaaagaggcagagacagtccctgcggaaaatggtgatcgacatggtccttgctaccgacatgagtaagcacatgacactactagctgatcttaagaccatggtggagacgaaaaaggtgacttcttctggagtgctcttgctagataattactctgaccgaattcaagttctgcggaacatggtgcactgcgccgatttgtccaatcctaccaaacccctggagctttacaggcagtggacagatagaattatggccgaattctttcagcagggtgatcgggagcgggagcgggggatggaaatttcccccatgtgcgacaaacatactgcatctgtggagaaaagccaggtcggctttatcgattatatcgtacatcccttgtgggaaacctgggccgatctcgtccatccagacgcacaggaaatcctggataccctcgaagacaaccgcgactggtactattcagcaatcagacagtctccgtcacctcctcccgaggaggagtctcgcggccccggccacccacccctgcccgacaaattccagtttgaacttactttggaagaagaagaggaggaggaaatcagcatggcacagatcccctgtacagcacaagaagccctcacagcccagggtctaagcggcgtggaggaggccctggacgctacaatcgcctgggaggcttctccagcgcaagaaagcctcgaagtcatggcccaggaggccagccttgaggctgagctcgaggctgtgtatttgacccaacaggcccagtccaccggctcagcccccgtcgccccagatgagttttccagcagagaagaattcgtggtggccgtgtcacattctagcccctccgctttggctctgcagagtccactgctgcccgcttggcggaccctgagtgtgagcgagcacgcgcccggactgccaggccttccttctactgctgctgaagtggaggcacagagagaacaccaggccgccaagcgtgcctgcagtgcttgcgcaggaacgttcggcgaagacacctctgccctacccgcacccggcggcggggggagcgggggcgatcccacctag

SEQ ID NO: 199304 - DNA, 309 bp, synthetic construct
  misc_feature 1..309: note = Description of Artificial Sequence: Synthetic coding sequence
  source 1..309: mol_type = other DNA
atggtggagaccaagaaggtgaccagcagcggcgtgctgctgctggataattatagtgataggatccaggtgctgcgtaacatggttcactgcgctgacctgtcaaatccaaccaagccactagagttgtataggcagtggacggataggatcatggcagaattctttcagcagggtgatagagagagagaacgcggcatggaaatcagccccatgtgtgacaagcatacagcctcggtggagaagtcgcaggttggattcatcgattatattgttcaccccctgtgggaaacgtgggccgacctctag

SEQ ID NO: 199305 - DNA, 2478 bp, synthetic construct
  misc_feature 1..2478: note = Description of Artificial Sequence: Synthetic coding sequence
  source 1..2478: mol_type = other DNA
atgcggagcggcgccgccccccgggcccggccccggccccccgcccttgccctgccgccaaccggcccagagtccctgactcacttcccatttagcgacgaggacacccgtaggcatcctccgggtcgatcagtatcctttgaggcggagaatgggcctactcctagccccgggcgaagtcctctcgactcccaggcctcacccggattggtgctacacgccggggccgcgacttcccagcggagggagagctttctctatcggtccgactccgactacgatatgtcgcctaaaactatgagtaggaactcgtctgtgacgagcgaggctcacgcggaggacctcattgttactccttttgcccaggtgctggcatccctgcgttcggtccgttccaatttctctctgctaacgaacgtacctgtgccatccaacaagaggagtccactcggggggccaacccctgtatgtaaggccacgctgtctgaggagacttgtcagcagctggctcgagaaaccctggaggagttggactggtgcctcgaacagctagaaaccatgcagacatataggtctgtctctgagatggcctcacacaaattcaagaggatgctgaaccgggaacttacacacttaagtgagatgagtcgcagtggcaaccaggtgagcgaatatatttccacaaccttcctggacaagcaaaatgaggtagagatcccttcccctaccatgaaagagagggaaaagcagcaggccccacgcccacgcccatctcagcctcccccacctcctgtaccccatctgcagccaatgagtcaaataaccgggctgaaaaaactaatgcatagtaacagtctaaataacagcaacatcccccgcttcggcgtgaagactgatcaggaggagttgctggcacaagaacttgagaatttaaacaagtggggtctgaacatattctgtgtgtcggattacgcaggcggcaggagcctgacctgcataatgtacatgattttccaggagagggacctgctgaagaaattccgaattcctgtggataccatggtcacgtacatgctgaccctagaggaccattaccacgccgacgtggcctaccataatagtcttcatgctgctgatgttttacagtcgactcatgtattattggccaccccagccctcgacgccgttttcacagatcttgaaattctggcagcgctatttgctgcagctatacacgacgtggatcacccgggtgtgagcaaccagtttttgatcaataccaacagtgagctcgctctaatgtacaatgacgaatctgtgctggaaaaccaccatctggccgtgggctttaaactgctccaagaagacaattgtgatatctttcagaatctctctaagaggcagcgccaatccctacggaaaatggtcatcgatatggttctcgccacagacatgtctaaacacatgacgcttctagccgacttaaagactatggtggaaacaaaaaaagtgacctccagcggggtcctgctgctggacaattactccgatagaattcaagtcctgcgaaacatggtccattgcgcagacctgtccaacccaaccaagccactcgaactgtatcgacaatggaccgatagaatcatggccgaattcttccagcagggtgatcgggaacgtgaacggggcatggaaatctcgcctatgtgcgataagcacactgccagtgtagagaaatcccaggtggggttcatagactatatcgtacatccgctctgggaaacctgggccgatcttgttcatcccgacgctcaggaaatactggatacactagaagataatcgggattggtattactcagctataagacagtctcccagtcccccgcccgaggaggagagcaggggcccaggacatccgcctttgccggataaattccagttcgagcttaccctggaagaggaagaggaagaggagatttccatggcccagatcccctgcaccgctcaagaggcactgacagcccagggactgtcaggcgtggaagaggctttggacgcaactattgcctgggaggcttcgccagcccaggagtctctagaagtcatggctcaggaagcctctctggaagccgaactggaagctgtatatctgacccagcaggcccagagcacaggctcggctcctgtggctcctgatgaattcagcagtagagaggaatttgtcgtagcggtgtctcatagctccccaagcgcactggcactgcagtccccgctgctgccagcttggcgaacgttgtcagtctccgagcacgcccccggtctcccggggctcccatcaacagccgccgaagtggaagcccagagagaacaccaagctgctaagagggcctgttcagcatgcgcaggcaccttcggtgaggacaccagtgcgttaccggccccgggcgggggaggctctggtggagatcctacttag

SEQ ID NO: 199306 - DNA, 2211 bp, synthetic construct
  misc_feature 1..2211: note = Description of Artificial Sequence: Synthetic coding sequence
  source 1..2211: mol_type = other DNA
atgaagaagagccggagcgtgatgaccgtgatggccgacgacaacgtcaaagattatttcgagtgctctctgtccaagagttacagctcctcctcaaatactcttggcatcgatctttggcgcgggaggagatgctgttcagggaatcttcaactgccgccattgtctcagcggcagtctgagcgcgcccggactccagagggtgacggcatctctaggccgaccaccctgcccttgaccacacttccatctattgctattaccaccgttagccaggaatgttttgatgtcgagaatggacccagtccggggaggtcgcctctcgacccacaggcctcctcttcagccggactagttctgcacgctactttcccggggcattcacagaggagagagtctttcctgtacagatcagactctgactacgaccttagtccaaaggccatgagccgcaactcatctttgcccagcgaacagcacggcgatgaccttatcgtgactcccttcgcacaagtcctggctagtctacgctccgtacgcaacaactttaccatcctgacaaatttgcatggcacttctaataaaaggtcacccgccgcttcacagccacctgtctcacgggtgaacccacaggaagagtcgtatcaaaaactggcgatggagaccctggaggaattagactggtgccttgaccagctcgaaaccatccagacctaccggtctgtgtcagagatggcctccaataaattcaaacggatgctcaatcgcgagctgacccacctctctgaaatgtctagaagcggcaaccaggtctccgaatacatttccaatacatttctggataagcagaacgacgttgaaattccaagccccacgcagaaagaccgggaaaaaaagaaaaaacagcagcttatgacacaaattagtggcgttaaaaaattgatgcactcgagttcactcaacaatacttctattagtcgatttggtgtgaacactgagaacgaagatcacctggctaaggagttggaggatctgaacaagtggggattaaacattttcaacgtggcagggtacagtcacaatcgtcccctaacttgtattatgtatgcaatctttcaagaacgtgacctactcaagacctttcgaattagctccgacacattcataacctacatgatgactctggaggaccattaccactccgacgtggcataccacaattctctgcacgcggcagatgtggcccagagcacacacgtcctcttgtctactcctgctctggatgctgtgtttacagacctcgaaatcctggccgcaatttttgccgccgccatccacgacgttgaccatcctggtgtttctaaccagtttctgattaacactaatagtgagctggcactgatgtataatgatgagtcggtgcttgaaaaccaccatctagcagtgggttttaaattgctccaggaagaacactgcgatatctttatgaacctgaccaaaaagcaaaggcagacattgcggaaaatggtgatagacatggtcctggcaaccgatatgtccaaacatatgagcctgttagctgacctgaagactatggtcgaaactaaaaaagtcacctcatcgggggtcttgctactagataactacacggaccgtattcaggtgctgcgtaatatggtgcattgcgctgatttgagtaacccaactaaatcgctagagctctatcgacagtggaccgatcgcattatggaagagttcttccaacaaggagacaaggaaagagagcgggggatggagatcagccccatgtgcgataagcataccgcgagcgtggagaagtctcaagtgggcttcatcgactatatcgtgcaccctctgtgggaaacttgggctgatcttgtccagccggacgcccaggatattctcgacacgttggaagacaacaggaattggtaccagagtatgattccacagtctccctcgcctccacttgatgagcagaaccgggattgccagggcctgatggaaaaattccagtttgagttaaccctagacgaggaagactccgaaggccccgaaaaggagggtgagggacatagctatttctcaagcaccaagactctgtgcgtgatcgacccggaaaacagggacagcctgggggagaccgacatcgatatagccacggaggacaaatctcccgtcgacacatag

SEQ ID NO: 199307 - DNA, 2211 bp, synthetic construct
  misc_feature 1..2211: note = Description of Artificial Sequence: Synthetic coding sequence
  source 1..2211: mol_type = other DNA
atgaagaagagccggagcgtgatgaccgtgatggccgacgacaacgtcaaggattatttcgaatgttccctgagcaaaagctattctagtagcagtaataccctcgggatcgacctgtggcggggtcgcaggtgctgtagcggtaaccttcagctgccccccttaagccaacggcagtctgagagggcaagaacgcccgagggcgatgggattagccgccctaccacactccctctcactactctgcctagcattgccataaccacggtttctcaagaatgtttcgacgtggagaacggtccatcccccgggaggtctccactcgatccccaagcttcatcttcagcaggccttgtattgcatgccaccttcccaggacattctcagagacgggagagctttttgtaccgctccgacagcgattatgatctgtccccgaaggcaatgagcagaaacagttctctcccctccgagcaacacggggatgatttaattgtgaccccttttgcacaggtccttgcttctttgcgcagcgtccggaacaatttcacgatcctcactaatttacacggaacctctaataaaaggtctccagctgccagccagccaccggttagcagagtgaatccccaggaagaaagctaccagaagctcgctatggagacccttgaggagctcgattggtgccttgatcagctggagactatccagacctatcgcagtgtgagcgaaatggcaagtaacaagttcaaacgcatgctgaaccgcgagctcacccacctcagcgaaatgtcacgctctggtaaccaggtcagcgagtatatctccaacacttttttagacaagcaaaacgacgtggaaatccctagtcctactcagaaggacagggaaaagaaaaaaaaacagcagctgatgacacagatcagcggggttaaaaaactcatgcattcctcatcattgaacaatacatcaatctcacgctttggggtcaatacagagaacgaagatcatctggccaaggaattggaggatctcaataagtggggactgaacatctttaatgtcgcaggatatagccataacagacctctgacctgtataatgtacgccatcttccaggaacgggacctgctgaaaacatttcgcatttcttcggacacctttattacgtacatgatgacgctcgaggaccattatcatagcgatgtggcctatcataactccttacacgccgctgatgtcgcacagtccacccatgtgttgctgtcgactccggcactagacgcggtcttcacggacttggaaatacttgcggctattttcgccgctgccattcatgacgtggaccatcctggggtctccaatcagtttctcatcaacaccaattctgagctcgctcttatgtataacgacgaaagtgtactggaaaatcaccacttagccgttggattcaagcttctgcaggaagagcactgtgacatttttatgaacctgacgaagaagcagaggcagacgctccgcaagatggtcattgacatggtgctggcaaccgatatgtcaaaacacatgtcccttctcgcagacttgaagacaatggtcgagactaagaaggtaaccagttcaggtgtcctgttactggacaattacaccgatcgcatccaggtgttgaggaatatggtccactgtgcagacctgagcaatccaacaaagagcctcgagctctatcgccaatggacagaccgaatcatggaggagttcttccagcagggcgataaagaacgtgaaagggggatggagattagccctatgtgcgacaagcatacagcctccgtggaaaagagccaggtcggctttatcgattatattgtgcatcctctgtgggaaacgtgggctgatttggtgcagccagacgcccaggacatactggatactctggaagataacagaaactggtaccaaagcatgatcccacagagcccctctcccccactggacgaacagaaccgagactgtcagggtcttatggagaagttccagttcgagttgaccttggatgaggaggactcagagggcccagagaaggagggtgagggtcactcctacttctcgtccaccaaaactctgtgtgtgattgacccagagaacagggacagtctgggggagacagatatcgatatagccacggaagacaagtcccccgtagacacgtag

SEQ ID NO: 199308 - DNA, 1695 bp, synthetic construct
  misc_feature 1..1695: note = Description of Artificial Sequence: Synthetic coding sequence
  source 1..1695: mol_type = other DNA
atgaaggagcacggcggcaccttcagcagcaccggcatcagcggcggtagtggcgactcagccatggactcattgcagccgctacagccaaactatatgccagtgtgcttgtttgcagaagagtcgtaccaaaagttggcaatggaaacactcgaggagttggattggtgccttgatcagctcgagacaatccagacctatagatcagtatcagagatggcatcaaataagtttaagcggatgctcaaccgggagctgacccacttatccgagatgtcacgcagcggtaatcaggtgtccgaatatatttccaatacctttctggacaaacaaaacgacgttgaaatcccaagtcccacccagaaagatagggaaaaaaagaagaagcagcagttgatgacccagatctcaggagtgaaaaagcttatgcattcttccagcttaaataacacaagcatttccaggtttggcgttaatacggagaatgaggatcacctcgccaaggaactggaggacctcaataaatggggccttaatattttcaatgttgctgggtactcccacaaccgtcccctgacgtgcattatgtacgccatctttcaggaacgggacctgctgaagactttcagaatatcgtcagatactttcatcacctacatgatgactttagaagaccattaccactctgacgtggcctaccataattctctacatgccgccgacgtcgcccaatccactcacgtactactatccaccccggccctggacgccgtgttcacggatctcgaaatcctggccgctatctttgccgccgccatacacgatgtggaccacccaggagtgagtaaccaatttctcatcaataccaattcggagcttgcccttatgtacaatgatgagtcagtcttggaaaaccatcacctggcagtcgggttcaagcttttacaggaagaacattgtgacatctttatgaaccttaccaaaaagcagcgccagacactcagaaagatggtcatagacatggtcttggctaccgacatgtctaagcacatgtctctgctcgccgacctgaagactatggtagaaactaaaaaggtcacatcatctggggtattgttgctcgacaactataccgatagaatccaagtactcagaaatatggtccactgcgccgatctctcaaatcccacgaaaagcttggaactgtatcgacagtggactgataggatcatggaagagttttttcaacagggtgataaagagagagaaaggggcatggagatcagccccatgtgcgataagcacaccgcgtcagtggagaaaagccaggtcgggttcatcgattatattgtgcaccccctgtgggagacatgggccgatctggtccagccggacgcacaggatatactggataccctggaagataaccggaactggtaccagagcatgatcccacaaagtccgagcccccctctggatgagcagaatcgcgattgccagggcctgatggaaaaattccagtttgagttaactcttgacgaggaggacagtgaaggccctgaaaaagagggagagggacatagctacttctcatctactaaaaccctgtgcgtgattgatcccgagaaccgggatagtctaggcgaaaccgacattgacatcgccacagaagacaagtcacccgttgatacttag

SEQ ID NO: 199309 - DNA, 2211 bp, synthetic construct
  misc_feature 1..2211: note = Description of Artificial Sequence: Synthetic coding sequence
  source 1..2211: mol_type = other DNA
atgaagaagagccggagcgtgatgaccgtgatggccgacgacaacgtgaaggattattttgaatgttctctgtctaagagttatagtagctccagcaacacactggggatcgacctctggaggggacgcaggtgttgctcgggtaatctgcagctgcctccattgtcccaaagacaaagtgaaagggcccgaacaccggagggcgacggcattagccgcccaacaacgttgccgcttaccacccttcctagtatagctatcaccaccgtgtcacaagaatgcttcgatgtggaaaatgggcccagcccaggccgaagccctctcgacccgcaggcatcttctagcgcgggcctggtcctgcatgccacctttccgggtcattcccagcgcagggagtcctttctgtatcgaagtgattcagattatgatctttcccccaaagccatgagtaggaattcaagcctgccctcagaacaacacggagatgatctcattgtgacaccttttgcccaagtgttggcctcactgagatccgtgaggaacaacttcacaatactaactaatctgcacggtacgtcaaataaacgctcccctgccgctagccagcctcctgtgagccgggtgaatccacaggaagaatcctaccagaagctggctatggaaacactggaagaattggactggtgcctggaccagttggaaaccattcagacatacaggtccgtgagcgagatggcgtcgaacaaattcaagcggatgttaaaccgggagctcacacacctctctgagatgagtaggtccggtaaccaggtttctgagtatattagcaatacgtttctagataaacagaacgacgttgagataccatccccaactcaaaaggatagagagaagaagaaaaaacagcaactgatgacccaaatcagcggtgtgaaaaagctgatgcatagctcttccctgaacaatacctctatttctagattcggagtgaataccgagaatgaagatcacctagccaaggaactggaagacctgaataagtggggactcaatatttttaacgtggctggctacagccacaataggccactgacatgtatcatgtatgccatcttccaggagcgcgacctcttgaagaccttccgaatttcttctgacacatttatcacctatatgatgaccctggaagatcactatcatagcgatgtggcttaccacaattccctgcacgccgctgacgtggcacagtctactcatgtgctactcagtactcctgctcttgatgccgtattcacagatctggagattttggccgccatcttcgccgccgccattcatgatgtagaccaccccggcgtttccaatcagttcctgatcaacacaaatagtgaactggcccttatgtataacgacgagtccgtccttgaaaaccaccatctcgccgttggattcaagcttttgcaggaagaacactgcgacatcttcatgaatctgaccaagaagcaaagacagaccttacgaaagatggtgatcgacatggttctggctacagacatgtccaaacacatgagcctgcttgctgacctaaagaccatggttgaaaccaagaaagttacgtccagtggcgtgcttcttcttgacaactacaccgaccgcatccaggtgctgcgaaacatggtgcattgcgcggatttgagcaaccccacaaagtcgctcgaactctatcgacagtggactgacagaatcatggaagaattttttcaacagggggacaaggaaagggaaagaggaatggaaatctctccaatgtgtgacaaacatacggcctccgtggagaagtcacaggtgggattcatcgattacattgtccacccgctctgggaaacctgggccgatctagtccagcccgacgcacaggatattcttgatacacttgaggacaaccgtaattggtaccagtcaatgataccacaatcaccatctcctcctctagatgaacagaaccgagactgccagggattgatggagaaatttcagttcgagctaaccctggacgaagaagattccgagggtcctgagaaggaaggggagggacactcctactttagctcaacgaaaactctgtgtgtgatcgacccagaaaacagagatagcctgggagaaaccgatatcgatattgcaaccgaggacaaaagccctgtcgatacctag

SEQ ID NO: 199310 - DNA, 2166 bp, synthetic construct
  misc_feature 1..2166: note = Description of Artificial Sequence: Synthetic coding sequence
  source 1..2166: mol_type = other DNA
atgaccgccaaggacagcagcaaggagctgaccgccagcgagcccgaggtctgcatcaagaccttcaaggagcagatgcatctggaattggaactgcctcgactgccaggtaacaggcccacatctccgaagatttccccgagatctagcccccgcaatagtccctgcttcttccgcaagctgttggttaacaaatccatccgccaacggcggagattcactgttgctcatacgtgttttgacgtggaaaacggaccaagtccaggcaggtcccccctcgatccgcaggcatcaagcagcgccggtttggtactgcatgctacttttcctggccacagtcagcggcgggagtcatttctctataggtccgattctgattatgatctatcccctaaggctatgtcaaggaactccagtttgccaagcgagcagcacggtgatgacctgattgtgaccccatttgcgcaggtcctggcctcacttcgttcagtaaggaataatttcacgatcctgactaatctgcacggcacttctaacaaaagaagcccagcagccagccagcctcctgtaagtcgagtgaatccccaggaggagagctaccaaaagctcgcgatggagactttggaggagctcgattggtgcctagatcagctggagacgatccaaacttacagaagtgtcagcgaaatggcctctaacaagttcaagcgtatgctcaatagggaacttacccatctgtccgaaatgagtagatcggggaaccaggtgtcggagtatatctccaatacatttcttgataaacaaaatgacgtggaaattccctccccgacccaaaaagacagggagaagaagaaaaagcaacaactgatgacccagatcagtggggttaagaagctaatgcacagcagcagcctgaataacacctccatctcacggtttggtgtgaacacagagaacgaggatcacctggccaaagagctcgaagacctaaacaaatgggggcttaacatctttaacgtcgctggatattcccataataggcccctgacgtgcattatgtacgcgatcttccaggaaagagacttactgaagacgttccggatttccagcgacaccttcataacatacatgatgaccctggaagaccattaccactctgatgtcgcttaccacaacagtctgcacgctgccgacgtcgcacagtccactcacgtgctgttgtccaccccagcactagatgccgtttttacagatcttgagatcctggccgctatctttgccgccgccatacatgatgtggatcatcccggtgtctccaatcagtttctgatcaacacaaacagcgagttggctctaatgtacaatgatgagtctgtgctggagaaccatcatctcgccgtgggatttaagcttcttcaggaagaacactgcgacattttcatgaatctgacaaagaagcagcggcaaactctgcgcaaaatggtaatcgacatggtgcttgcgaccgacatgagcaaacatatgagtctgctcgccgatctcaaaactatggtggagaccaagaaagttacaagtagtggtgttttgttgctcgataattacacggacaggatccaagtattacggaacatggtgcactgcgcagacttgagcaacccaactaagagtctggagctgtacagacagtggactgatagaataatggaagaattcttccagcagggtgataaggagcgcgaaagggggatggagatcagtcctatgtgcgataagcataccgcgtctgtcgagaagtctcaagtgggctttatcgactatatagtccaccccctgtgggagacctgggccgacctcgtgcagcccgacgctcaggatatcttggatacgctggaggacaaccggaactggtaccagtctatgatcccccagtctccgtccccacctctggatgaacaaaaccgtgattgtcaggggctgatggaaaagttccagtttgaactcaccctggacgaggaggactcagaggggccagagaaggagggagaaggccacagttacttcagcagcactaaaacactgtgcgtcatcgatccggagaatcgggacagtctgggcgagacagacatcgacatcgccaccgaagacaagtcaccagtcgacacgtag

SEQ ID NO: 199311 - DNA, 2043 bp, synthetic construct
  misc_feature 1..2043: note = Description of Artificial Sequence: Synthetic coding sequence
  source 1..2043: mol_type = other DNA
atgcagggcccccccgcccccgcccccgtgcccggccccggcagccctagaggatctccccggggttcaccaggcctcttccgcaaattacttgtgaatcagtctataaggctgcagaggagattcacagttgcccaccccttgtgtttcgatctcgaaaacggcctttcttgtggaaggcgagctctcgatccccagtcgtcacccggactaggtcggattatgcaggccccagtgcctcacagccaacgtcgggagtcctttctctaccggagcgattccgactatgagctgagccccaaggccatgagtcggaactcgagtgtggcttctgatttgcatggagaagacatgatcgtcaccccgttcgcccaggtcctggcttctctgcgtactgtgcgatcgaatgtggctgctctagccaggcaacagtgtctgggagcagccaaacagggacctgtggggaacccttcaagttcaaatcagcttccaccggctgaagacaccggacagaaacttgcgctcgaaacactggatgagctcgattggtgcctggaccagttggagaccctgcagaccaggcactctgttggagagatggcttccaataaattcaaacgcatactgaacagggagctgacacatctgagtgagacaagtagatcagggaaccaggtgtccgagtatatatctaggaccttcttggatcagcagactgaagtcgagctgcctaaggtgacagccgaggaggccccccaacctatgtcgcgcatatcaggacttcatggcctctgtcacagcgccagtctctcttcagctactgtgccacgattcggagttcagacagatcaggaggaacagttagccaaagaacttgaggacactaataagtggggcctggacgtctttaaagtggccgaactcagcggaaatagacctcttaccgctattatcttttcgattttccaggaacgtgatctcttaaaaacatttcaaattcctgctgacaccctcgccacatatctcctgatgctcgaggggcactaccatgccaatgtggcataccacaacagcttacacgcagccgacgtagctcaaagcacacatgtactgctagctacacctgccttggaggctgtttttacggacctggagatcttggctgctctgtttgcgagcgctatacacgatgtggatcaccctggtgtttccaatcagttccttatcaatacaaactcggaacttgctctcatgtataatgatgccagtgtgctcgaaaatcatcatcttgctgttgggtttaaactactgcaagccgaaaactgcgacattttccagaatctgtcagccaaacagaggctctcacttcgaagaatggtcatcgacatggttctggccaccgacatgtcaaaacatatgaacttactggccgatttgaaaacaatggtagagaccaaaaaagtcacttctctgggcgtccttctgctggataactacagcgatagaatccaggtgctgcagaatctcgttcactgcgccgatttgtcaaacccgactaaacccttacctctgtacaggcagtggacagatagaattatggctgagttctttcagcagggtgatagagaacgagagtctggactagatatcagccccatgtgtgataagcatacagccagcgtggagaaaagccaagtaggcttcattgattacatcgcacatcccctgtgggagacctgggcagatctggtgcatccggatgctcaggacctgctcgacactttggaagacaacagggagtggtaccagtctaaaataccaagaagtccaagtgacctcacaaaccctgagagggatgggcccgacagattccaattcgagcttactcttgaagaagccgaggaagaggatgaggaagaagaggaagagggagaagaaaccgcgctggcaaaagaggcgcttgagctaccagacacagagttgctgtctcccgaggcgggaccagatccaggagaccttcccctggacaatcagcgaacctag

SEQ ID NO: 199312 - DNA, 1281 bp, synthetic construct
  misc_feature 1..1281: note = Description of Artificial Sequence: Synthetic coding sequence
  source 1..1281: mol_type = other DNA
atggccagcaacaagttcaagcggatcctgaaccgggagctgacccacctatccgaaacttcaagatcaggcaatcaggtgtccgaatacatcagcagaacattcttagatcagcagacagaagtggagctccctaaagtaacagcggaggaggccccccagccaatgtcccgtattagtggacttcatggactctgccactcagcctcgctgagctctgctacggttccaagatttggagttcaaaccgatcaagaagagcagcttgccaaggaattggaggacaccaacaaatggggtttagacgtgtttaaggtcgcagaactctccggaaatcggcctctgactgcaatcatcttcagtatctttcaggccgtgttcaccgacctcgaaatcctggccgccctttttgcctctgctatacacgacgtagaccatcctggggtcagtaatcagtttctgattaacactaacagcgagctcgccctcatgtacaatgacgcaagtgtgttagagaaccaccacctcgccgtgggatttaaactgttacaggccgaaaattgcgatatttttcagaatctgtccgctaagcaaaggctttccctgaggagaatggtaatcgatatggttctggccactgacatgagcaagcacatgaacctgctggctgaccttaaaaccatggtggagactaagaaggtgacgtcattaggcgtactcctgttggacaattactccgatagaatccaggtacttcagaatctggtacattgtgccgatcttagcaacccaaccaaaccattacctctttaccgacaatggacagatcgaattatggctgagtttttccagcagggcgatcgagagcgcgaaagtggactggatatatctcctatgtgcgataaacacactgctagcgtcgaaaagagccaagtggggttcatcgactacatcgcccatcctttgtgggagacttgggccgacctcgtacaccctgatgctcaagacttacttgataccctggaggataaccgagagtggtatcagtctaagatccccagatccccctccgatctgactaacccagagcgcgacggcccggaccggttccaatttgaactcactctcgaggaggcggaggaagaggatgaggaagaagaggaagaaggagaagagacagcactggctaaggaggccctggagctgcccgacacggagctgttgtccccagaggccggaccggatccaggagatttgccattggacaatcaacggacatag

SEQ ID NO: 199313 - DNA, 2139 bp, synthetic construct
  misc_feature 1..2139: note = Description of Artificial Sequence: Synthetic coding sequence
  source 1..2139: mol_type = other DNA
atggagaacctgggcgtgggcgagggcgccgaggcctgcagccggctgtcccgcagcaggggccggcactcaatgactcgcgctccaaagcacctgtggaggcagcccagacgtcccatacgcattcaacagaggttctatagcgatcccgacaagtctgcagggtgcagggaaagggaccttagtccgagacctgagctgcgaaagtcaaggctgtcctggcctgtctcgagctgcaggcgttttgacctcgaaaatgggctcagctgtggccgtagggccctcgacccacagagctcgccgggactaggtaggattatgcaggctccggtgccacattcccagcgcagggaatctttcctctacagatccgactctgattacgagctgtcacctaaagcaatgtcacggaacagttctgtagcgtcagacctgcacggggaggacatgatagtgacgcccttcgcccaggttttagcctcactgagaactgttcggtcaaacgttgccgcgttggcgagacagcagtgcctcggggctgccaagcaggggcctgtagggaatccctcctcttcaaatcagctccctcctgccgaagacacaggacagaaactggctctcgagactctcgacgagttggattggtgcctggaccagctggagaccctgcagaccaggcattcagtgggagaaatggcctccaacaagtttaagagaatactcaatcgggagttgacccatctgtctgagacatcaaggtcaggtaaccaggtgtccgagtatatctctagaacctttctggaccaacaaactgaggtggagttgcccaaagtaactgccgaagaggcaccccaaccaatgagccgaatttctggcttacacgggctgtgtcacagtgcttctttgtcgtcggcaacggtccctagattcggcgttcagactgatcaagaggagcagttagccaaggaacttgaagataccaataaatggggtctggatgttttcaaagtggccgagttatctgggaaccgaccactcaccgccatcattttcagtattttccaggaacgcgacctgctgaagacctttcagatccctgcagatacgctggccacctacctacttatgctcgaaggacattaccacgctaacgtcgcataccacaatagcttgcatgctgccgatgtggctcaatcaacacacgtgttgctggcaacgccagcgttggaagccgtgttcactgatctggagattctggctgccctgtttgcaagtgcaattcatgatgttgaccaccctggggtgtcgaatcaatttctgattaacacaaactctgaattggcactgatgtacaatgatgcatccgtcctggaaaatcaccatctagctgtgggttttaaactgctacaggcagagaactgcgatatttttcagaacctgtcagccaaacaaaggttgagcctccggcgtatggtgattgatatggttctagctaccgatatgtccaagcatatgaacctgcttgctgatctgaaaactatggttgaaaccaagaaagtgacctctttaggcgttctcctcctagacaactactctgatcggattcaggtgcttcaaaacttggtccattgtgctgacctatccaacccaacaaagcctctcccactgtatcgtcagtggaccgatcgcataatggccgagttcttccagcaaggcgatagggaacgggagagtggcctggacatttccccaatgtgtgataagcacaccgcttctgtagagaagagccaggtgggtttcattgactatatcgcacaccccctctgggagacctgggcagatctggtccacccagacgcccaggatctgctggatactctggaggataatcgtgagtggtatcagtcaaagatccccagaagtccatctgacctgaccaaccctgagcgagatggaccagatcgatttcagttcgaattgacacttgaggaggctgaagaagaggacgaagaggaggaggaggagggcgaagaaaccgcgcttgctaaggaggcgctcgaacttccagatacagaactcctgtccccagaggcaggacctgaccctggggacctccctctagacaaccagcggacctag

SEQ ID NO: 199314 - DNA, 1821 bp, synthetic construct
  misc_feature 1..1821: note = Description of Artificial Sequence: Synthetic coding sequence
  source 1..1821: mol_type = other DNA
atgcaggcccccgtgccccacagccagcggcgggagagcttcctgtacaggagcgacagcgactatgagttatcgccaaaggccatgtctcggaatagttccgtggcatccgacttgcacggggaagatatgatagttacaccatttgcccaggtgctggcaagccttaggactgtccgttctaatgtagccgctctcgctaggcagcagtgtttaggggctgccaaacaaggccctgtagggaacccttccagcagcaaccagttacctccagcggaggacaccgggcagaagctggccctggaaacgctggacgaattggattggtgcttggatcaattggaaaccctccagacccgtcactcagtgggagaaatggcatccaataagttcaagcggatcctcaacagggagttgacacacttatctgagaccagtcgttccggtaatcaggtgtctgagtacatctcccggacctttctcgaccagcagaccgaagtggaattaccgaaggtgaccgcagaggaagctccgcagcctatgtctaggatctctggtctgcatggcctgtgtcatagcgccagcctgagcagcgctacggtccctcgttttggagtacagacagatcaggaagagcagcttgctaaggaactcgaggacacaaataagtggggacttgatgtttttaaagtcgcagagctgagtggcaacagaccgctcaccgcaattattttttcaatcttccaggagcgggaccttctgaaaactttccagattcccgcagatactctggctacctatctcctcatgctggaaggacactaccacgctaatgtggcctatcacaacagcctgcacgccgccgatgtcgctcagagtacacatgtcctgcttgctacccccgctctggaagcggtttttactgatctggagatattggccgccctgttcgcatctgcaatacacgacgtcgaccatcctggcgttagcaatcaatttttaatcaacacaaactctgagctggccttaatgtacaacgacgctagcgtcctggagaaccatcacctggccgtgggcttcaagttgcttcaggccgagaattgtgacatattccagaacctgtccgcgaaacaaagacttagcctgcggcgcatggtgattgacatggtattagcgaccgatatgtccaagcatatgaacttactggccgatctgaagacaatggtcgagacaaaaaaggtgacgtccttaggggtacttttgctcgataactattctgaccgtatccaggttctacagaacttggtgcactgtgctgacctgtccaaccctacaaaaccgctgccactgtaccgccagtggaccgatcggattatggcagagttttttcagcagggggacagagagcgtgagtctggactagacatttctcccatgtgcgataagcatacagcttcggtggaaaagagtcaagtgggtttcatcgactatatcgctcaccccctgtgggagacatgggccgacctagtgcaccccgatgctcaggacctccttgatactctggaagataaccgcgagtggtatcagagcaagatccctcgaagcccgtctgatcttaccaaccccgagagagacggccctgatagattccaatttgagctaactttggaagaggccgaggaggaagacgaggaggaggaggaagagggagaagagactgcactggccaaggaagctctagaattgccagacacagaactgctgtcgccggaggcaggcccagacccaggtgacttgcccctggataatcaacgcacatag

SEQ ID NO: 199315 - DNA, 2376 bp, synthetic construct
  misc_feature 1..2376: note = Description of Artificial Sequence: Synthetic coding sequence
  source 1..2376: mol_type = other DNA
ggcacccaggccggcctgcggagcggcgcccccagcggccaccggcaactgcttggagttgggcctactctgagtccttcatccaccttttatagattttccacttccggggccgactcctctagcctgtcaccaccccttcctgccctgggcaggacacgggaacaaacactcctgggagcgaggtcacgggggagagttctcctccctgctattcccgacccgtttttgtggaggatggaaaatttgggagtaggagaaggagccgaggcctgcagtcgactgagtagatcaagagggagacattccatgactcgggcacccaaacacctctggaggcagcccagacggcccatcaggatccagcagaggttctacagcgatccggataagtctgcaggctgccgagaacgcgatctgagcccacggcccgagctcagaaaatccagactcagctggccggtgtcttcctgtcgccgatttgatctggagaatggattgagttgtgggagaagagcgttggacccacagagcagccccggactcggccgtatcatgcaagcgcccgtgcctcacagccagcggcgggagtcttttctctaccgctccgattccgactacgaattgtcaccaaaggccatgtctagaaactcctctgtggcatcagatttacatggcgaagatatgatcgtaacaccttttgcccaggtgcttgcaagcctcagaactgtgcggtcaaacgtggctgcgctggcgagacaacagtgcctaggcgctgcaaaacagggtcctgtaggcaatccttcatcaagtaaccaactccctcctgctgaagatacagggcagaagctggcactggagactctggacgaactggattggtgcctcgaccagctcgaaacattgcagaccagacacagcgtgggcgagatggcatcgaataaattcaagcgcattctgaatagggagctcacacacctgagtgagacaagccgtagtggcaaccaggtgagcgagtacatttctcggacatttctcgaccagcagacagaggttgagctgcccaaggtaaccgctgaggaggcaccacaacctatgagcaggattagcgggctccatggcctgtgccactccgcatcactttcaagcgccactgtccctcgcttcggtgtccaaacggaccaagaggagcaactcgccaaagagttggaggacactaacaagtggggtcttgacgtgttcaaagtggcagaactgtctggaaaccggccccttaccgctatcattttcagcatttttcaggagcgcgatctattgaaaacgtttcagattccagccgacaccttggccacataccttctgatgcttgaaggccactaccatgcaaatgttgcctaccacaactctctccatgcagccgacgtggctcagtcgacacacgtcctgctggcaacacccgctctggaggccgtctttactgatttagaaatcctggcagcgctgtttgccagcgccattcatgatgtggaccatcccggcgtctccaaccagtttctcataaacaccaattccgaactggctctgatgtacaatgatgcgagcgttttggagaaccatcatttggccgtcggctttaagctgctgcaggcagagaattgcgatattttccaaaatctctcagctaagcagcgcctttcgttaaggcgcatggtgatcgatatggtgctggctactgatatgagtaaacatatgaatctcctggcagatctcaaaactatggtcgaaacaaaaaaggtgaccagcctgggcgtgctgctcctcgataattactccgataggattcaggtgctgcaaaatttggtccattgcgctgatctgtctaacccgactaaacctttaccactgtatcggcaatggacggatagaatcatggccgagttctttcagcagggtgaccgggaacgggagagcggcctggatattagcccaatgtgcgataaacataccgcttcggttgaaaaatcgcaggtgggattcatcgactatattgcacaccccttgtgggagacatgggctgatctggtccatccagacgcccaggatctcctcgatacattggaagataatcgcgagtggtatcaaagcaaaatccccaggtctccctcagacttgactaatcctgagcgcgatggtcctgatcggtttcagttcgagctgactttggaagaggccgaggaagaggacgaggaagaggaagaggagggcgaggaaacggcattagctaaggaagctctggaattgcccgatactgagctgctgtcaccagaagccggcccagacccaggcgatttaccactggataaccagcgcacatag

SEQ ID NO: 199316 - DNA, 2103 bp, synthetic construct
  misc_feature 1..2103: note = Description of Artificial Sequence: Synthetic coding sequence
  source 1..2103: mol_type = other DNA
gccgtgcagaagcggagccgggccgccggcgcccggagcagcctgcacgcagtgcttgccatgcagggtcctccagctcccgctccagtgcccgggcctggttcaccgcggggatcgccccgcgggagcccaggtctattccggaagctcctcgtgaaccagtctatccgcctacagaggaggtttacagtggctcatcctctttgtttcgatctggagaatggactcagttgcggcagaagagccctagacccccagtcatcacctggcctcggccggatcatgcaggctcctgtgccgcattctcaacggcgggaatctttcctgtaccgctccgactctgattacgagctgtccccaaaagcaatgtccagaaattcctcagtcgcatctgacctgcacggagaggacatgatcgtgaccccgtttgcgcaagtactggcatctctgagaactgtgcggagcaacgtcgctgcgttggctaggcagcagtgcctcggagctgccaagcaggggccggtgggcaatccctctagcagcaaccagctcccaccagccgaggacactggccaaaagcttgcactggagactctggatgagctcgattggtgcttggatcagctggaaacattgcagactaggcattccgttggagaaatggcctccaacaagttcaaacgaattctaaacagggagctgacacatctttcagaaaccagtcgtagcggcaatcaggtaagtgagtatatttcaaggacctttttagatcagcagaccgaggtcgagctgcccaaggtcaccgctgaagaggctccacagcctatgagtcggatatcgggcctccatggactgtgccattcagctagtctctcatcggcaacggtaccaaggtttggggtgcagactgaccaggaggaacaactcgccaaagaactggaggacaccaacaaatggggcttggatgtgtttaaggtggctgaactatccggcaaccggccactgactgctatcatcttctcaattttccaggagcgcgacctcctcaagacattccagattccggccgataccctggctacctacctgctaatgctcgaaggacattaccacgccaacgtggcctaccacaactcactgcacgcagcagacgtggcccagtctactcatgtcttgctcgcgacacccgccctggaggcagtattcaccgacctggagattctcgccgctctcttcgcctccgccattcatgatgttgaccatccgggagtaagcaaccagttccttattaacaccaactctgagctcgctctgatgtacaacgatgcaagcgtcttagagaatcatcacctcgctgttggatttaagctgctgcaggccgaaaactgcgacatttttcagaacctttccgcaaaacagcggctatcactccgcagaatggtgatcgacatggtcctggccacggatatgagtaaacatatgaacttgctcgctgatctcaaaacaatggtggagacaaagaaggtgacaagcctcggcgtgctgctgctcgacaactacagcgatcgaattcaggtcttacagaatttagtgcattgcgctgatctgtccaaccccacgaagcctctccctctctatcgacagtggacagaccggataatggccgagttctttcagcagggcgatcgggaaagggaatctggattagatatctctcccatgtgtgataaacacacagcttcggtggagaagagtcaagtgggctttatcgactatatagcacatcctttatgggagacgtgggctgatctggtgcatccagacgcccaagatctactggataccctggaggataatagggaatggtatcagagtaaaatccccagaagtccatccgatctgaccaaccccgagcgcgacgggcctgatcgattccagtttgagctgaccctggaggaagccgaggaagaagacgaagaagaagaggaagagggcgaagaaactgctctggcaaaggaagctctcgagctccccgacacagaactcctttcaccagaagctggtccagaccctggtgacttgccgttagacaatcagcgcacatag

SEQ ID NO: 199317 - DNA, 1446 bp, synthetic construct
  misc_feature 1..1446: note = Description of Artificial Sequence: Synthetic coding sequence
  source 1..1446: mol_type = other DNA
atggccagcaacaagttcaagcggatcctgaaccgggagctgacccacctctcggaaacaagccggtcagggaaccaggtcagcgagtacatttcccggacctttttagaccagcagaccgaggtggagctaccgaaagtgaccgccgaggaggccccccagcctatgagccggatctcagggcttcatgggctatgccacagtgcctctctgagtagcgccaccgtgcccaggtttggcgtacaaaccgatcaggaggaacagctggccaaggagcttgaggataccaataaatgggggctagacgtgttcaaggtggccgaactgtcagggaaccgacctttgacagcaatcattttcagcattttccaagaacgcgacctcttgaagacatttcagattcccgccgataccttggccacgtacttactgatgctggagggacactaccacgctaatgttgcctatcacaattccctgcatgccgcagatgtggctcagagcactcatgttctgcttgccacacccgccctggaggctgtatttactgatttggagatcctggccgcgctcttcgcatctgctatccatgatgtggaccatcccggcgtgtccaatcaattccttattaacactaatagcgagcttgccctgatgtacaacgacgcttcagtcctggagaatcatcacttggccgtagggttcaagctgttgcaggccgagaactgcgacatcttccagaatcttagtgctaagcagcgcctttccttgagacggatggtcatagatatggtccttgctaccgatatgagcaaacacatgaatctgctggccgatctgaagactatggtagagactaaaaaggttacttctctgggggttctcctgctcgacaactattccgacagaatccaagtgctgcaaaatttagttcattgtgccgacctgtcaaaccccaccaagcctcttcccctgtaccgacagtggacggatcgaatcatggcggaattttttcagcagggtgatcgagagcgcgagtctggtttagacataagtcctatgtgcgataaacacaccgcaagtgtggaaaagagtcaggttggctttattgactacatagcccaccccctgtgggagacctgggccgacctagttcaccctgacgctcaagatctcctagacacactggaagacaaccgcgaatggtatcagtccaaaataccccgaagcccctcagatctaaccaaccccgaacgggacggcccggatcgatttcagttcgagctcacactggaggaggccgaagaagaggacgaggaggaggaggaggaaggggaggaaaccgctctggcaaaagaggccctagagttgccagacacagaactcctgagcccagaagccgggccagaccccggcgacctgcctctggacaaccagagaacctag

SEQ ID NO: 199318 - DNA, 2466 bp, synthetic construct
  misc_feature 1..2466: note = Description of Artificial Sequence: Synthetic coding sequence
  source 1..2466: mol_type = other DNA
atgcagcggtaccggggccggcagaccgtgttcggcgccggcgtgttgggaggggtgagctctgcaccctctttcaatacgcccagtccaaggtcttcccccctcttctacccttctgccccttcagggcaccgccaactgttgggggtgggcccaacccttagtcctagtagcactttctaccggttctccaccagcggcgctgactcctcctccctatcaccccccttgcctgccctggggcgaacaagagagcagaccttgcttggcgcaaggtcaagaggccgggtgttactgcccgctattcccgatccattcttgtggcgtatggagaatctcggagtgggcgaaggagcagaagcctgctcgagattgtccagatctagggggaggcattctatgactagagcccccaagcacctgtggagacagccacggcgcccaattagaattcagcagcgattctacagcgacccggataaaagtgcaggttgtcgagagagagatctctccccgaggcccgaattaagaaagtcacggttgtcttggcccgtgtcttcttgtcgccgattcgacctggagaacggcctgagctgtggcagacgcgctctggacccccagagcagcccaggactgggacgcatcatgcaagccccagtgccacattctcagaggcgagagagctttctgtataggtcagactctgactacgagctgagccctaaggccatgagtcggaacagttccgttgccagcgatttgcacggggaagatatgatcgttacacccttcgctcaggttctggcatccctgaggaccgtgagaagcaatgtcgctgccctggccagacagcagtgcctcggggcggctaaacaaggccccgtcggcaacccttcttcttcgaatcaacttcctcccgcagaagataccggacagaagctggcactggaaactctggacgagttggattggtgcttagatcagctggaaaccctccaaactcgtcacagcgtgggcgagatggcatctaacaagtttaaacgaattctgaaccgcgaactgactcacctgagtgaaactagccgatctgggaaccaggtgtccgagtacatttctcggacattcctagaccagcagaccgaagtggagcttcctaaggttactgccgaggaggctcctcagcctatgtcgaggatcagcggactgcatggtctttgccacagtgcctcactgagttcagccaccgtgccccgtttcggcgttcagacagatcaagaggagcaattagctaaagaactggaggacacaaacaagtgggggttagatgtgttcaaggttgccgagctctcaggcaacagaccactcaccgccatcattttttccatttttcaggagcgcgacctgcttaagacttttcagatccctgctgacaccttagctacctatctccttatgctcgaggggcattaccatgccaatgttgcctaccacaatagccttcatgccgccgacgtcgcacaaagtacccacgtcctccttgcaacacccgctctggaagccgtctttactgatctggagattctggcagcattgttcgcttcagccattcacgacgtggaccatccaggcgtttcaaatcagtttttgatcaatactaactccgagctggcgctgatgtataacgatgccagcgtgctggaaaatcaccacctggcggttgggtttaagctgctgcaggcagaaaactgcgatatcttccagaatctgtcagccaagcaaaggttatctttgcgtcgcatggttattgacatggtattggcaaccgacatgtctaagcacatgaatctcctagctgatctcaagaccatggtagaaaccaaaaaggtcacttctcttggggtcctgctcctggacaattactcagacaggattcaagtccttcagaacctggtgcactgtgctgacctctcaaatcccactaagcccttaccgctgtacagacaatggacggatcgaataatggccgaattcttccagcagggggatagagagagggagtctggactagacatcagcccgatgtgcgacaaacacacggcatctgtggaaaagtcccaggtcggttttatcgattatatcgcccacccactttgggagacctgggcggatctcgtacatccagatgcccaggacttattggatacattggaggataaccgcgagtggtaccagtctaaaatcccgaggtccccctcagatctgaccaatccggagagggatggacccgatagatttcagtttgagcttaccctggaagaggccgaggaggaagatgaggaagaagaggaagagggagaggagactgccctcgccaaagaggccctggagctcccggacacagaactgctctcacctgaggccggacccgatcctggcgacctgcccctggacaaccaacggacctag

SEQ ID NO: 199319 - DNA, 1557 bp, synthetic construct
  misc_feature 1..1557: note = Description of Artificial Sequence: Synthetic coding sequence
  source 1..1557: mol_type = other DNA
cccctgcggatccggcccctgctgcccaccgcctaccacctgctgcccacgggacccggtcagagtgcagatagatccgaacagaggggtggtccatgtcctccagctatgccccgctcttcacagtttaaacgcatcctcaatagagagttgacccacctgagtgaaactagtaggtctggtaaccaagttagcgaatatatctctcgaacgttcttggaccaacagaccgaagtggaacttcccaaagtcacggccgaagaggctccccaaccgatgtcaaggatctcagggctgcatggactttgtcatagcgcttcacttagttccgcgactgtcccccggttcggcgtccagaccgatcaggaggaacaactcgccaaggagctggaagacactaacaaatggggtctggatgtgtttaaagtcgcggaactgtctgggaaccgccccttgactgccattatcttctctatctttcaggagagggacctactgaagaccttccagatccccgctgatactcttgctacatatctgctgatgctcgagggacactatcatgctaacgtggcttatcacaattctttacacgctgctgacgtcgcccagtctacacacgttttattggctacgcccgcccttgaggcggtgtttaccgatctggaaatcctggccgcactcttcgcaagcgcaattcatgacgttgatcaccccggcgtcagtaaccagttcctcataaatacaaacagtgaactggccctgatgtacaatgatgcctccgtgctcgaaaaccatcatctggcagtggggtttaagctgctccaggcagaaaactgtgatattttccaaaatctgtctgccaaacaaagacttagcttacggcggatggtgatagacatggtgctggctacggacatgtctaaacatatgaacctcttggccgaccttaaaacgatggtggaaacaaagaaagtgacgtctcttggtgtcctcctcctggataattatagtgatagaatccaggtcttgcaaaacctggtgcattgcgctgatctgagcaatcccaccaaacctctgcccctgtataggcaatggaccgacaggattatggctgagttcttccagcaaggagatagagagcgcgaatcgggactggacatcagcccgatgtgtgacaaacatacagcatcagtagagaaaagccaggtcggctttattgattacattgcacatcccctgtgggagacttgggctgacttagtgcacccagatgcacaggatctcttggacactctagaggacaatagagagtggtaccagagcaagattccgcgttcaccgagcgaccttaccaacccggagcgcgacggaccggataggtttcagttcgagctaactctggaagaggccgaagaagaagacgaggaagaggaagaagaaggagaggagacagccttggccaaagaggcgttagagctgcccgacacggagctgctttcaccagaagccgggcccgatccaggcgacctgcctctcgacaaccagcgaacatag

SEQ ID NO: 199320 - DNA, 6723 bp, synthetic construct
  misc_feature 1..6723: note = Description of Artificial Sequence: Synthetic coding sequence
  source 1..6723: mol_type = other DNA
atggagcagacctggacccgggactacttcgccgaggacgacggcgaaatggtgcctcggaccagccacacagctgcctttctatccgataccaaagatcgtgggcccccagtacagtctcagatttggcgtagtggcgagaaggtgccgttcgttcagacctatagcctgagggcgttcgaaaagcctccccaggtccagactcaggcactgagagattttgagaagcatctgaacgacctcaaaaaggagaatttctccttgaagttgcgtatctacttcctggaggagcgcatgcaacagaaatacgaagcatcccgcgaggatatctacaagcgaaatatcgagttgaaagtggaagtggaatccctgaaacgggagttacaggataagaagcagcacctcgacaagacctgggccgacgtagagaacctgaatagtcagaacgaggcagaactgagacgccaattcgaggagcgacagcaagaaaccgaacacgtgtacgaactgctggagaacaagattcagttacttcaggaagaatcaagactggccaaaaacgaagccgcgagaatggccgctcttgtagaggctgaaaaggagtgcaatcttgagctctcagaaaaactcaaaggcgtgaccaaaaattgggaggacgtcccgggggaccaagttaagcccgaccagtacaccgaggccctagcccaacgtgataagcgaatcgaagaactgaaccagtcgctggccgcccaggagcgcttagtcgaacagttgagtcgggaaaaacagcagcttttgcacctgctggaggagccgaccagcatggaagtccaaccaatgaccgaggagcttcttaaacaacagaagctgaattcccacgagacaactattacccagcagtctgtaagcgattctcatctggctgaactgcaggaaaagatacagcaaaccgaggcaacaaacaagatcctgcaggaaaaactgaacgagatgtcttacgagctgaagtgtgcacaggaaagttcacaaaagcaggacgggaccatacaaaatctgaaggagaccttaaagtcaagagagagggaaaccgaagagctttatcaggtgattgagggacaaaatgatactatggctaagttacgtgagatgctgcatcagagccagttgggacaattgcacagctctgaaggcacctccccggcccaacagcaagttgcccttctcgacctccaatctgccctgttctgttctcagttagagattcaaaaactgcaacgcgtggtccgacaaaaagagcgccagttagccgatgccaaacaatgtgttcagtttgttgaggccgcagcacatgaatcagaacagcaaaaggaagcttcctggaagcataaccaagagctcagaaaagccctgcagcagctgcaggaagagcttcagaataagagccagcaacttcgggcctgggaagcggagaaatacaatgagattcgcactcaggagcagaacattcagcacctaaatcatagcttgagccataaagagcagctgctccaggagttccgcgaactgttgcagtacagggacaacagcgataagactctcgaggctaatgaaatgctgctagaaaagttgcggcagcgcattcatgacaaagcagtggctctggaaagggcaatcgacgagaagttttcggccctcgaggaaaaggagaaggagctcaggcagttgcgcctcgcagttcgagagcgggatcacgacctggagcggctccgtgacgtcctgtccagtaatgaggccacaatgcaatctatggagtccctgttacgtgccaagggcctggaagtagaacaacttagcacaacctgtcaaaacctacagtggttaaaggaggagatggaaacgaaattttccaggtggcagaaagaacaagaatccatcatacagcagctccaaaccagcctccatgaccgcaataaagaggtcgaagatctctcagcaaccctgttgtgtaaacttggacccggtcagagtgaaatagccgaggaactctgccagagactgcaacggaaggaacgcatgttgcaagacctgttgtcagaccggaacaagcaagttctagaacacgaaatggaaatccagggcctcctacagtccgtgtcaactcgagagcaggaatcacaggccgctgccgagaaactggtgcaggcactcatggaaaggaacagcgaactacaggccctgcggcaatatctaggcggtagagatagtctcatgtctcaagctcccatttccaatcagcaggctgaggtgacccctacgggctgtctggggaagcagacggatcaggggagcatgcagatccccagtcgtgacgattccacatctctgacagccaaggaggatgtatccattccccgtagtaccctgggcgacctcgatacagtcgccggtctcgagaaggagctgtcgaacgccaaggaggagctcgagctgatggccaagaaagaacgcgaatcgcagatggagctgtcagctttgcagtctatgatggccgtgcaggaagaagagctgcaggtccaagctgccgacatggaaagcctaactcgcaatatccagatcaaggaggacttgatcaaggacctgcagatgcaactggtcgatcctgaagatatccctgctatggagcggctgactcaggaggtacttttgttaagagaaaaggtggcctccgtggaatcacagggacaggagatttctggaaatcgtaggcagcaactgctcctgatgctggagggattggtcgacgagcggtccaggttgaacgaggccttgcaggctgagagacaactctatagctccctggtgaagtttcatgcccaccctgaaagttctgaacgggatcgaaccctccaggtggaacttgagggcgctcaggtgctgagaagtcggctcgaggaggtgctgggtcgctcattggaacgtcttaatcgtcttgaaactctggccgcaattggcggagctgccgcgggggacgatacagaagacacatctaccgagttcaccgacagtatcgaggaggaagccgctcaccatagccatcagcagctcgttaaggtggctctggaaaagtccctggccacggtcgagacacagaacccctcattctctcctccgtctcctatgggaggcgactcaaaccgatgcttgcaagaagagatgttgcatcttcgcgccgagtttcatcagcatctggaagaaaagcgcaaggctgaagaagaactgaaagaactcaaggcacaaatagaagaggccggattttccagcgtcagccacatccgaaatacaatgctctccttgtgcctggagaacgctgagctcaaggagcagatgggggaggctatgagcgacggctgggagatcgaggaagacaaggagaagggggaacttgataatcaaagccagccccgagacccaggccctcagtcagcgttctccctgccgggcagcacacagcacctgcgttctcagttaagccagtgcaagcagcgctaccaggatcttcaggaaaaactgttgttgagtgaggctaccgtctttgcgcaggcgaacgagctcgagaaataccgcgtaatgctgactggggagtctttggttaagcaggattccaaacaaatacaggtagatcttcaggatctggggtacgagacatgcgggagaagtgagaatgaggctgaaagagaggagaccacctcccctgagtgcgaagaacacaacagcctaaaagagatggtcctgatggaaggcttatgcagcgaacagggccggaggggctctactctggcttcatcttccgagagaaaacccctagaaaatcagctgggaaagcaagaagaatttcgagtgtatggtaaatccgagaatattttggttctgagaaaggacatcaaagatctgaaagcacagctgcagaacgccaacaaagtgattcagaacctgaagtctcgggtcaggagcctcagcgtcacatcagactacagctcatcactggaacgcccttggaaactccgggccgttggtacactggagggatcaagcccacactcggtgccagatgaggacgaaggttggctctccgacgggaccggcgccttttattcaccagggttgcaggcaaaaaaggatctagaatctctcatacagcgggttagtcagctggaagcccagcttccgaagaatggcctggaagaaaagctggctgaggagctcagatcagcctcctggccaggcaaatacgatagtctgatacaggaccaggcgcgcgaactcagttatttgcgccagaaaattcgggagggcagagggatctgttacctgattaccaggcacgccaaagatacggtgaaaagcttcgaggacttgctgagaagtaacgatattgattactatctcgggcagtcattccgggagcagctggcccaaggatcccagctcactgagcgcctgacgagcaaattgtctacaaaggaccacaaatcggagaaggatcaggccggcttagaaccgctggcgctgcggctgtccagagaactgcaggagaaagaaaaggtgatcgaagtgctgcaggcaaaactcgacgcgcggagtctgactcccagctcctcacatgcgctgtccgacagccacaggtccccaagctctaccagctttttgagcgatgagctcgaagcttgcagtgacatggatattgtaagtgagtatacccactacgaggagaagaaggccagtccttcccactccgattcaattcatcactcttcacacagcgccgtcctgtcttctaagccctccagcaccagcgcctcacaaggcgcgaaagccgaaagcaactcgaaccccatcagcctgcccacaccacaaaacactccaaaggaggccaatcaggcacattctggggcatctacagtgccgccagcatccactgcaactctgctgagcaacgacctggaggctgattcatcctactacttgaattccgcacagccccactctccaccaaggggaacgatcgaactggggagaatattagagcctgggtatctcgggagcagtggcaagtgggacgtaatgagaccgcagaagggctctgttagtggggacttgtcctctgggtccagtgtctaccaactcaatagcaagccaaccggagccgatctgctcgaagagcacttgggagaaattcggaacctcaggcagaggctagaagagagcatttgtatcaacgacagacttagggaacaattggaacatcggctaactagcactgctcgtggccgaggctccaccagcaacttctacagccaaggtttagagtccattccgcaactgtgtaacgagaatagggtactgcgggaggataaccgtcggttgcaagcccagctcagtcacgtctcccgagagcactcccaggagactgagtcgctgcgggaggctctgctcagctcccggtcccacctgcaagaactggaaaaggagttagagcaccagaaagtggaacgccagcaactcctggaggacctgcgcgagaagcaacaggaagtgctgcacttcagagaggaaaggctgtctttacaggaaaacgactccagactgcagcataagctggtcctcctacagcagcaatgtgaggagaaacagcagttgttcgagtccctgcagagtgagctgcaaatctatgaggcactgtacgggaacagcaagaagggactgaaggcctacagtctggatgcatgccatcagatcccactgtcctccgatttgtcacacctcgtggcggaggttagagcgctgcgcgggcagctagaacagtccatccagggaaataactgcctgaggctgcagctgcagcagcagctcgaatcgggagccggaaaggcctcactgtccccttctagcatcaaccagaatttcccagcatcgaccgaccccgggaacaaacagctgttgctgcaggactccgcggttagcccgcctgtacgagacgtagggatgaatagcccggcgttagtatttccatctagcgcgtcttctaccccaggatcagaaacccccattatcaaccgggccaatggccttggcttagatactagcccagtgatgaagacaccacctaaactcgaaggcgacgcaacagatggatcctttgcgaataagcacggcaggcatgtaatcgggcacattgacgactattccgccctgcgtcaacaaatcgccgagggcaaactgctcgttaaaaaaattgtgagcttggtgagatccgcatgtagcttccccggactggaggcccaaggaaccgaggtcttaggcagtaagggaattcatgagctgcgatcaagtacctctgcactgcatcacgctctggaggaatcggccagtctcctgaccatgttctggcgcgccgcccttccctccacccacataccagtgctccctggaaaggttggcgaatccacagaacgggagctgcttgagctgagaacgaaagtgtctaagcaggagaggctgctacagagcactactgagcatctgaaaaacgcaaaccaacagaaagaatccatggaacagtttatcgttagtcagctgaccagaactcacgacgtactgaagaaggcaaggacaaacctggaagttaagagtcttcgtgcgctgccttgcaccccagccctgtag

SEQ ID NO: 199321 - DNA, 3399 bp, synthetic construct
  misc_feature 1..3399: note = Description of Artificial Sequence: Synthetic coding sequence
  source 1..3399: mol_type = other DNA
atgaaggagatctgccggatctgcgcccgggagctgtgcggcaaccaacgaagatggatcttccacactgcttcaaaactaaatctgcaggttttactttcccacgtgttgggcaaggatgtgccaagagatggaaaggccgagtttgcatgctccaagtgtgcttttatgcttgaccggatatataggttcgacaccgtgattgctcgaatcgaagccctgtctatcgaacggttgcagaagctcctcttggaaaaggatcgtctcaaattctgtatcgcttctatgtaccgcaagaacaatgacgactccggggcggaaatcaaagctggcaacgggacggtggacatgtccgtactgcctgacgcccggtacagcgccttactccaagaggattttgcttacagcggttttgagtgttgggttgagaacgaggaccagatccaggagccccattcctgccacggttccgaggggcctggcaatcgcccacgaagatgtcgcggttgtgctgcgctcagggttgccgactccgattacgaggccatttgcaaagtgcctcgcaaggtcgctcgcagcatcagttgcggtccgagctctcgctggtccacaagtatttgcactgaggagcctgccctgtcagaagtaggtcctcccgatttggcttctaccaaggtgccaccggacggcgagagcatggaggaggagacaccagggtcctcagtggaatctctggacgccagtgttcaagcttcacctccccagcagaaggatgaagagaccgaaagatccgccaaggaactcgggaagtgtgactgttgctccgatgatcaggcaccgcagcacggctgcaatcataaattagagttggccttgagcatgattaagggcctggattataagcctatacagtccccccgcggctctaggctgcctattccagtcaagtcctcactgcctggagccaagcccggccctagcatgaccgatggtgtgtcctccggcttcttgaacagatctctgaagccattgtacaagactcctgtgtcttatccccttgagctttcggatctgcaggaactttgggatgatctgtgtgaagattacttgcctcttcgggttcagcccatgacagaagagctcctcaagcaacagaaactcaattcacacgagaccaccatcacacagcagagcgtctctgactcccatttggccgagctgcaggagaagattcaacaaacagaagctactaataagatccttcaggaaaaacttaatgagatgagctacgagcttaaatgcgctcaagagagtagccagaagcaggatggaaccattcagaatttaaaggagactcttaagtcgcgtgagagggagaccgaggagctgtaccaggtgatcgaaggtcaaaacgatacgatggctaaactccgtgaaatgttgcatcaatctcagctgggacaacttcatagctccgaggggactagtcctgcacagcagcaggtcgcactgctggatcttcagagcgctcttttttgcagccagctggagatccagaaactgcagcgagtcgtccggcaaaaggaacggcagctcgccgacgctaaacagtgcgtgcagttcgtagaggccgcagcccacgagagcgagcagcaaaaagaagcgagttggaagcacaaccaggagctgcggaaagccctgcagcagctgcaggaggaattgcagaataaaagccagcaactgcgggcatgggaggctgagaaatacaacgaaatccgcacacaggagcagaacatccagcatttgaaccactctctgagccacaaagagcaactcctccaagaatttcgggaactccttcagtaccgggacaatagcgacaaaactctcgaggcaaacgaaatgctacttgagaaactaaggcagcgcatccacgacaaagccgtcgccctggagcgtgcaatcgatgaaaagtttagcgctttggaggaaaaagagaaggagcttaggcagttacgtctggccgtgcgcgaacgcgaccacgatctggagcgcctccgggacgtgctttcgagtaacgaggcaaccatgcaaagcatggagtcccttctgagggccaaggggctggaagtggagcagctgagcactacctgccagaacctccagtggctaaaagaggaaatggagaccaaattttcgcgctggcagaaggaacaggagagtattattcagcaactgcaaacgtcattgcacgatcgcaacaaagaggtagaggaccttagcgccacactgctgtgcaagctcgggcctgggcagtctgaaatagctgaggagctttgccaacgtttacagcgcaaagaacgaatgctacaggacctcctgtcggatcggaacaaacaggtactagagcacgagatggagattcaggggctgctccaaagtgtttccacacgcgagcaggaaagtcaggcggctgcagaaaagcttgtacaggccctgatggagcgaaattctgaactgcaggcactccgacaatatctgggaggacgggattctctgatgagccaagcaccaattagtaaccagcaggcagaggtgacacccacgggttgcctcggcaagcagacagaccaaggctcaatgcagatcccgtcccgggacgattccacgagtctgactgctaaagaggatgtatctatccctaggtcgacgctgggggaccttgatacagtggcgggcctggaaaaggagctctccaacgccaaggaagagttagaacttatggcaaaaaaggagcgcgaaagccagatggagctttcagcgctccagtctatgatggccgtacaagaagaggagctccaagttcaagcagctgacatggagagcctgacacggaatattcagataaaagaggatctaatcaaggatttgcagatgcagctggttgaccccgaggatatacctgcaatggagagacttacccaagaggtgctgctactgcgcgaaaaggtggcgtccgtagaaagtcaggggcaggaaataagtgggaacaggaggcagcagttactgctgatgctggaaggcctagtggatgaacgatccaggctcaacgaggcactccaagctgagcggcagctgtattcctcactcgttaaattccatgctcaccccgagtcctccgagcgggatagaacactacaggtagagctggagggagcccaggtcctcaggtcacgcctggaagaagtgcttggaaggagtctggaaaggctcaaccggctagagacgctggcagcaataggcggtgcagcagcaggcgatgacacagaggacacatcgacagagttcaccgactctattgaggaggaagcagcccaccatagccaccaacaattgtag

SEQ ID NO: 199322 - DNA, 522 bp, synthetic construct
  misc_feature 1..522: note = Description of Artificial Sequence: Synthetic coding sequence
  source 1..522: mol_type = other DNA
atgagcaacggctaccggaccctgagccagcacctgaacgacctgaaaaaagagaacttcagtctgaaactccgcatttacttcctggaggagcgtatgcagcaaaagtacgaagcgtcacgggaggacatttataagcgcaatatcgagttaaaagtggaagtcgagagcctgaaacgggagctgcaggataagaaacagcacctcgacaagacatgggccgacgttgaaaacttgaactcacagaatgaggccgagctgcgacgacagttcgaggagagacagcaagaaacagaacatgtctacgaactgctggaaaataaaattcagctgctgcaggaagaaagcagactggccaaaaacgaggccgccagaatggccgctctagtggaggcagagaaggagtgcaaccttgagctcagcgagaaattgaagggtgtaacaaaaaactgggaggacgtgccaggagaccaggtaaaacccgaccagtacactgaggcactggcccaaagggataagtag

SEQ ID NO: 199323 - DNA, 933 bp, synthetic construct
  misc_feature 1..933: note = Description of Artificial Sequence: Synthetic coding sequence
  source 1..933: mol_type = other DNA
atgaagggcaccgacagcggcagctgctgccggcggcggtgcgacttcgggtgttgctgtagagcttcaagaagagcacattacaccccctacagaagcggggacgcaacacggacaccccagtcccccagacaaacaccttcacgtgagaggcgccggcctgaaccagccggctcttgggcagcggctgcggaggaggaggaagctgcagcggcagcgactccatggatgcgcgattatttcgccgaggatgatggcgagatggtgccccgcacatcacacacggctgcatttctgtccgacaccaaggacagaggcccccccgtccaatcccagatttggcgcagcggagaaaaggtcccctttgtgcaaacctatagcctgagagcattcgaaaagccaccccaggtgcaaacacaagcactgagggacttcgagaaacacttgaatgacctgaaaaaggagaacttcagcctgaagctgcgtatttattttctggaggagcggatgcagcagaaatacgaggcctcccgggaggatatatacaagcgaaacatcgagctgaaagtcgaggttgagtcactgaaacgtgaactacaggacaaaaagcaacatctcgacaaaacatgggccgatgtcgaaaatctgaattcacagaacgaagctgaactgcgtcggcagttcgaagagcgtcagcaagaaactgagcatgtgtacgagttgctggagaacaaaatacaattgctgcaagaagagtctcggttagcaaaaaacgaagccgcccgtatggccgctctcgtcgaggctgagaaagaatgtaacctggagctgtccgagaaactaaaaggggtgactaaaaactgggaggacgttccaggcgaccaagtcaaaccagatcagtacactgaagcactggcccagcgcgataagtag

SEQ ID NO: 199324 - DNA, 2910 bp, synthetic construct
  misc_feature 1..2910: note = Description of Artificial Sequence: Synthetic coding sequence
  source 1..2910: mol_type = other DNA
atgagcaacggctaccggaccctgagccagcacctgaacgacctgaaaaaggagaacttctctctcaaacttcgcatctattttctcgaagaaagaatgcaacaaaagtacgaggcctcccgcgaagatatctataaaaggaatatcgaattgaaggtcgaggtggaatcactaaagagggagctccaggataagaaacaacatctcgacaagacttgggcagatgtagaaaacctgaatagccaaaacgaagctgagctgcggagacagtttgaggaacgtcagcaggaaaccgagcatgtctacgagctgctggaaaacaaaattcaactcttacaggaagaatccaggttggccaaaaatgaggctgcacgcatggccgctctggttgaagcagagaaggagtgtaatctggagctgtccgagaagttgaagggcgtcaccaaaaattgggaagacgtgccgggggaccaggtgaaacctgatcagtataccgaggccctcgcccagagggacaagaggatcgaggaattgaatcagtctttggctgcccaggaacgactcgtggaacagctctctagagaaaagcagcaactgctccacctcttagaggaacctacctctatggaggtgcagccaatgactgaggaactcttgaaacagcagaaactgaacagccacgaaacaaccatcacccaacagtcagtcagtgatagtcacttggcagagcttcaggaaaagattcagcagacagaagctaccaacaagattctccaggagaaattgaatgagatgtcatacgagcttaagtgtgctcaggagagtagccagaaacaggatggcacaatccagaacctgaaggaaactctgaagagccgagagcgtgaaactgaggagctgtatcaagtgattgagggccagaacgacaccatggccaagctgcgggaaatgttgcaccagtcccagcttgggcagctacattcttccgagggcacatcccctgctcagcaacaagtcgccctactggacttgcagagcgcccttttctgctctcaactcgaaattcagaagctgcagcgtgttgtaaggcagaaggaacggcagttggcggacgctaaacagtgtgtgcagttcgtcgaggcggctgctcacgaaagtgagcaacagaaagaagcttcttggaagcataatcaggagctaagaaaggccctgcagcaattgcaagaagagctgcagaataagtcccagcagctcagggcctgggaagccgagaagtacaatgagattagaacccaggaacagaacatccagcacttgaaccacagcctgagtcataaggagcagcttctccaggagtttcgggaacttcttcagtaccgcgacaactccgataagactctggaggctaacgagatgttactggaaaagttgaggcagcggatccacgacaaggccgtggctctggagagggccattgacgagaagtttagcgcgctcgaggaaaaggagaaagaactgcgccaactccgattagccgtccgagaaagagaccatgatctggagcggcttcgcgatgtgctgtctagcaacgaggctactatgcagagcatggagtcactgctgcgcgcaaagggactagaggttgagcagctttccacgacttgtcaaaacctacagtggctgaaagaggagatggagaccaagttctctcgttggcagaaggaacaggagtctattatacaacaactgcagacttcactgcacgataggaacaaggaagtggaagacctgtccgcaactttgttgtgtaaactcggacccgggcagagcgagattgcagaagaactctgccagcggctgcagagaaaggaacggatgctgcaagatcttttatctgaccgcaataagcaagttctggaacatgaaatggagattcaaggactgctgcagagcgtttccactcgagaacaggaaagtcaggcggctgcggaaaaactggtccaggcacttatggagcggaactccgaattgcaggcattgcgacaatatctcggcggtagagacagcttgatgagccaggcgcctatttcaaatcagcaggctgaagtcactccaacaggatgtctcggcaagcagacggaccaggggagcatgcagatcccatcaagagacgactcaactagcctgacagcaaaagaagatgtcagcattcccaggtcgaccctgggcgatcttgacaccgtggctgggctagaaaaagaactgtccaacgccaaagaggaactcgagcttatggcgaagaaggaacgcgagtcccagatggagctaagcgccttacagagcatgatggccgttcaggaagaggaactgcaggtccaagctgccgacatggagagcttaactaggaatatccaaataaaggaggacctgataaaagatctccagatgcagttggtagacccagaagacattcctgccatggagcgcctgacacaggaagtgctgttgctgagggagaaggtggctagtgttgagtcacagggccaggaaatttcaggaaacaggagacagcagttgttgttaatgttggaaggcctggtggatgaaagaagcagactgaacgaggccttgcaggccgaacggcagctgtactcttccctggtgaaattccacgctcatccggagagtagcgagcgagatcgtactctacaggtggagctggaaggtgcccaggtactgaggtctaggttggaggaggtgctcgggcgctccttggagcgactcaacagactcgagactttggctgctattgggggagccgcggcaggcgatgacactgaagatacctccaccgagtttaccgattccattgaagaagaagcagctcatcatagccaccagcaactgtag

SEQ ID NO: 199325 - DNA, 2967 bp, synthetic construct
  misc_feature 1..2967: note = Description of Artificial Sequence: Synthetic coding sequence
  source 1..2967: mol_type = other DNA
atgagcaacggctaccggaccctgagccagcacctgaacgacctgaaaaaggagaatttttccttgaagttgaggatttacttcttagaggagcggatgcagcagaaatacgaggcctccagggaagatatttataaaagaaacattgagctgaaagtggaagtagagtcactgaaacgtgaacttcaggacaagaaacaacatctggacaaaacctgggccgatgtggaaaatctgaattcacagaatgaggccgagcttaggaggcagtttgaagagagacagcaagagacagagcacgtttatgagttgttggagaacaagatccagcttctgcaagaggaaagcaggctcgctaagaatgaggctgcccgcatggccgctctcgtggaggcagagaaggagtgcaacctggaactgtctgaaaaacttaaaggagtcacaaagaattgggaagacgtacctggtgatcaagtgaagccagatcaatacacagaagctctggcacagcgggacaagcgcatcgaggaattgaaccagtctcttgccgctcaggagcgcctggtcgagcaactgtctagggagaaacagcagctgctgcatctccttgaagaacccacgagcatggaggtgcagcctatgactgaggaactgctgaaacagcagaaactcaattcgcacgagaccaccattactcagcagtcagtgtccgacagtcacctggccgaacttcaggagaaaattcaacagacagaagccacaaacaaaattctgcaagaaaagttaaatgaaatgtcatatgagctgaagtgcgcacaggagtcttcacagaagcaggatggtaccatccagaatctgaaagagaccctgaaatcaagggaacgcgaaacggaggagctgtaccaggttatcgaaggtcagaatgatacaatggcaaaattgcgcgaaatgctgcatcagagccagctcggccaactgcacagctccgaggggacaagccccgctcagcagcaggtcgccttacttgatcttcagtcagctctgttctgttcacagctggagatacagaagttacaaagagtggtcagacaaaaggagcgccagttggcggatgccaagcagtgcgttcagttcgtcgaagccgcggctcacgaatcggagcagcagaaggaagcatcctggaaacataatcaggagctgcggaaggctctgcagcagctgcaagaagagcttcagaataagtcacagcagctcagagcatgggaggccgagaaatacaacgaaataaggacacaggagcaaaacattcagcatctgaatcactctctctcacacaaagagcagcttctgcaggagttcagagagctgctccaatatcgcgacaactctgacaaaaccttggaggccaacgaaatgctgctagagaagctaagacagcgtatacatgataaggctgtcgcccttgaaagggcaattgacgaaaagttttccgccctggaggaaaaggaaaaagaactaaggcagctacggctggctgttcgggaacgagaccatgacttggagcggctacgggacgtgctgtcttcaaatgaggccaccatgcagagcatggagtccctcctgagggccaagggactggaagtggaacagttatcaacaacttgccaaaatctgcagtggctaaaagaagagatggaaaccaaattctcacgctggcagaaagagcaggaaagtatcattcagcagctccaaacatccctgcatgacaggaataaagaagtggaggacctcagcgctaccctactctgtaaactcggcccagggcagtccgaaattgctgaggaattatgtcaaaggctgcagcggaaggaaaggatgctacaggatctgctgtccgaccgcaataagcaggtgttggagcacgagatggagatccaaggcctacttcagtcagtctctacaagagaacaagagagccaggctgccgcagaaaaactggtgcaggctttgatggagcggaattcagaactccaggctctgaggcagtacctgggggggagagatagtcttatgtcccaggcccctattagcaatcaacaggcagaagtgacccctaccggctgcctaggcaaacagaccgatcagggcagcatgcagattcctagccgggacgactcgaccagccttactgcgaaagaagacgtaagcattccaagatctacactgggggatctggatacggtcgcaggcttggagaaggaactctccaacgcgaaggaggaacttgagcttatggccaaaaaagaacgcgaaagccagatggagctgtctgccctccagtcgatgatggccgtgcaggaggaagaactccaggtccaggccgccgatatggaaagcttaactcgaaacattcagataaaagaggatttgataaaagacttgcagatgcagctggttgacccggaggatatccccgccatggagcgactcacacaggaagtgctgctactgagagagaaagtagcaagtgtggagtctcagggccaggagattagcggaaaccgtcgtcagcaactcctgttaatgctagaggggctggtggatgagcgttctcggctaaacgaagcactccaggctgagaggcagttgtactcctcactggttaagttccatgctcacccagagtcttctgagcgtgataggaccctccaggtggagctggaaggcgcacaggtgctgcgcagccgactagaagaggtgctggggagatccctggaaagactgaacaggctcgaaaccctggcagccataggaggtgccgccgcgggtgacgacacagaggacacctccacggaattcaccgacagcatcgaagaagaggccgctcaccactcacaccagcaggtgtcccagtgccagggactggggctgccgggctggaccgcacattctccgtctgaggtctag

SEQ ID NO: 199326 - DNA, 3396 bp, synthetic construct
  misc_feature 1..3396: note = Description of Artificial Sequence: Synthetic coding sequence
  source 1..3396: mol_type = other DNA
atgaaggagatctgccggatctgcgcccgggagctgtgcggcaaccagcgacgctggatatttcacaccgccagtaaactcaacctacaggtcttgctgagccacgttctcggaaaagatgttccaagagacggtaaggctgaattcgcttgcagcaagtgcgctttcatgctcgatcgaatttatcgctttgatacggttattgcacgcattgaagctttgtcaattgaaagactgcagaaactccttttggaaaaggatcggctgaaattttgcatcgccagcatgtacagaaaaaacaacgatgattctggagccgagattaaagcagggaatggcactgtggacatgagtgtgctcccagacgcgcgatatagtgcgttgcttcaggaagattttgcatattcagggttcgaatgttgggtggagaacgaggatcagatccaagagcctcactcatgtcacggcagcgaaggtcctggtaaccgcccacggaggtgccgagggtgcgcagccttgcgggtggcagattctgactacgaggccatatgcaaggtgccacgcaaagtggctcgctcaattagctgcggcccatcatctcgttggtccaccagcatctgcacagaagagccagctctgtcagaggtcggtcctccagacctggccagcacaaaggtgcctccagacggggaatcaatggaggaggagacgcccggcagctcagtcgagtctctggacgcctctgttcaggcaagcccccctcagcagaaggacgaggaaactgagcgttctgccaaagagctgggaaagtgtgactgctgttccgatgatcaggcgcctcagcacggatgtaatcacaaattagaacttgccctgtcaatgattaagggtctggactacaaacccatccaatctccgcgcggctctcgcctcccgataccggttaagtcctcactacctggagcgaagcccgggccaagcatgaccgacggtgtgtccagtggttttttgaaccggtccctaaagccactctacaagacaccagtctcctatcctctggagctatccgatctgcaagagctgtgggatgacctttgcgaagactacctgcccctacgcgtgcaacccatgacagaggaacttttgaagcagcaaaaactaaacagccacgagaccacaatcacgcaacaaagcgtgagtgacagccacttagcagagctccaggaaaaaatccagcaaaccgaggcaaccaacaaaatcctacaagagaaactgaatgaaatgtcatatgaactgaagtgtgcacaggagtcgtcccagaagcaagacggaaccatacagaaccttaaggagaccctcaaatcccgggagcgggaaaccgaggagctatatcaagttattgaaggtcagaacgatacgatggccaagctaagagaaatgctgcaccagtctcagctggggcaactgcatagtagcgagggaacaagccctgctcaacagcaggtcgctttactggacttgcagtcggcgttgttttgcagccaattggaaatccagaagctgcagcgtgtggtgaggcagaaggagcgacaactggctgatgcaaaacagtgcgtgcagtttgtggaagccgcagcccatgagagcgaacaacagaaagaggctagctggaagcacaaccaggaactaaggaaggctctccagcagcttcaggaagagctccaaaacaagtcacagcagttgcgcgcttgggaagctgagaaatataacgagatacgcacacaggaacagaatatacagcacctgaatcacagcctgtctcacaaggaacagttgttacaggagttcagagaactgctgcagtaccgagacaactcagacaaaacattggaagccaacgagatgctgctagaaaaactccggcaaagaattcatgacaaggcagtcgccctggagcgtgccatcgacgaaaagttctccgcgctcgaggaaaaggaaaaggagcttcggcaactaagactggctgtaagggaacgggatcacgatttggagcgcctgcgggatgtgctatcttcgaacgaggccaccatgcagtctatggaaagtctcttgcgggccaaggggctggaagtagagcagctgtccaccacgtgtcagaaccttcaatggctcaaagaagaaatggagaccaagttctcaagatggcagaaggaacaggaaagcattatccagcagttacagaccagcctccacgacagaaataaagaagttgaagaccttagtgccacactactttgcaaattaggtccaggccaatctgagatcgcggaggaactctgccaacgattacaacgcaaagagcgcatgcttcaagatctgcttagtgatcgcaacaagcaggtgctagagcacgaaatggaaatccagggcctgctccagtccgtctcaacacgcgagcaggaaagtcaagccgccgcggaaaaattagtgcaggccttgatggaaaggaactccgaattacaggctttacgccagtacctgggcggacgcgactccttaatgagccaagccccgatcagcaatcagcaggccgaagtaacccctacaggctgtcttggcaagcaaactgatcaggggagcatgcagattcccagccgcgacgattctacctctttaactgctaaagaggatgtttcaattcctcgatccaccctgggcgatctggacacagttgccggcttagagaaagaactgtctaacgccaaagaggaattggagttgatggctaagaaagagcgtgagagtcagatggagttgtccgcactccaatccatgatggctgttcaggaggaagaactccaagttcaggccgcggatatggagtcactgacaaggaacatacagattaaagaggatctgattaaagatctgcagatgcagcttgtggatccagaagacattcccgccatggaaagactgacccaagaggtcttactgctgagggagaaagtggcatctgtcgagagccagggccaggagattagtggcaatagacgacagcagttgttactgatgctggaaggcctggtcgatgaacgctcaaggctgaacgaggctctccaggccgagcgtcagctctacagttcgctggtgaagtttcatgcccaccctgagtccagtgaacgcgatcgtaccctgcaggtggaactcgaaggagcccaggtacttaggagtaggcttgaagaagtgttggggcggtctctcgaacgcctgaaccgcttagagacgcttgcagcaatcggcggtgcagcggctggagatgacactgaggacaccagcaccgagttcactgatagtatcgaagaagaggccgcacaccactcccatcagcagtag

SEQ ID NO: 199327 - DNA, 7041 bp, synthetic construct
  misc_feature 1..7041: note = Description of Artificial Sequence: Synthetic coding sequence
  source 1..7041: mol_type = other DNA
atgagcaacggctaccggaccctgagccagcacctgaacgacctgaagaaggaaaacttcagtctgaagctgagaatttatttcctggaggagagaatgcagcagaagtacgaagcaagtcgcgaggacatctacaagcggaatatcgagttgaaagtcgaggttgagagcctgaaacgggagttacaggacaaaaagcagcatctggacaagacatgggccgacgtggagaatctgaattcccaaaacgaggcggaactgagacgacaattcgaggaacggcagcaggaaactgagcatgtgtatgagctgcttgagaacaagatccagttactgcaagaggaatctcggcttgcaaaaaacgaggccgctcggatggccgcattagttgaggccgagaaggaatgtaatctagagttatccgaaaagctcaaaggcgtcacgaagaattgggaagacgtgcctggcgatcaagtcaagccggatcagtacactgaggctttagcccagcgggacaagcgaatcgaagagctaaatcagtctcttgctgctcaggaaagactggttgaacagctctcccgcgaaaagcaacagctgctccacttgttggaggagcccacatcgatggaggtacagccgatgaccgaggagctgcttaaacaacagaaactgaactcacatgagacgactatcacacaacagtcagtgtccgactctcatctggctgagctccaggagaagattcaacagacagaggccaccaataagatattgcaggaaaaactgaatgaaatgtcatatgagcttaaatgcgcccaggagtccagccaaaagcaggacggcacaatccagaacctcaaagagacactgaaatcacgcgaaagggaaactgaggagctgtaccaggtcattgagggacagaatgacaccatggccaaactccgcgagatgctgcatcaatctcagctgggacaactgcactcctccgaaggaacatctcctgcacagcagcaggtggccctcctcgacttgcagagcgcactgttttgttcacagctcgagatacagaagttgcagagagtcgtgcgccagaaggagcgccagctggcggatgccaagcagtgcgtgcagtttgtggaagccgccgcccacgagagtgaacagcaaaaggaagcgtcgtggaagcataatcaggaactcagaaaggccctgcaacagctccaggaggaacttcagaacaagagtcagcagctgagggcctgggaagccgagaagtacaatgagatcaggacacaagagcagaatattcagcacctgaatcactcactttcccacaaagaacagcttcttcaggaatttcgagagcttctccagtacagggataattctgataaaacactcgaggctaacgaaatgctgctcgaaaaactaagacaaaggattcacgataaagcggtagctctggaaagggcaatcgatgagaaattttcggcgcttgaggagaaggagaaagaattgcggcagctcaggctggcagtgcgggaacgggatcacgatctcgaaagactcagggacgttttatccagcaatgaggctaccatgcagtctatggaaagtctgctgagagccaaaggtctggaggtggagcagctgagcacaacgtgtcagaatcttcaatggcttaaggaagaaatggagactaaattctcacggtggcaaaaagagcaggagagtatcattcaacaacttcagacttccctgcatgaccgaaacaaggaagtagaggacctcagtgccacattgttatgtaagctaggtccgggtcagtcggaaatagctgaggagttatgccagcggctccaaaggaaggagcggatgctgcaagatctgctgtctgatagaaataagcaggtgctcgaacacgagatggaaatacaaggcctgctgcaatccgtctctaccagggagcaggagagccaggccgcggccgaaaaattggtgcaggctctgatggaacgcaacagtgagcttcaggctctgagacaatatctcggaggtagggatagtcttatgagccaagcccctattagtaatcagcaggcagaggtgacccccaccggatgtctcggaaagcagaccgaccaaggcagcatgcagatcccgtcccgagatgactccacaagcctcactgccaaggaggacgtttcaatacccagatctaccctcggagacctggacaccgtggcagggctggaaaaggagctttcaaacgctaaggaggagctggagctaatggctaaaaaagaaagggagtcccaaatggagttgtccgccttacagagcatgatggccgtacaggaggaggaactgcaagtacaagccgccgatatggagtcattaactcgcaatattcagatcaaggaagatttaattaaagatctgcaaatgcaattggtagaccctgaggatatacccgctatggaaaggctcacacaagaggtgctgctgcttcgcgaaaaagtggcgtctgtggagtcacaggggcaagagatttcaggaaatcgtcggcagcagctcctcttgatgctggaggggctcgttgatgaacgctcccgcttaaacgaagccctgcaagccgaaagacaattgtacagtagcctggtgaagtttcacgctcacccagagagctccgagcgggatagaacccttcaagtcgaactggaaggagctcaagttctacgcagtcggcttgaagaggtgcttggtaggagcttggagcgcctaaatcggcttgaaacgcttgccgccatcgggggcgcagcggccggtgacgatactgaggacacttcaactgagttcactgatagcatcgaggaagaagctgcacaccacagccatcagcagctcgtgaaggtggccctcgaaaagtcccttgctacagttgaaacgcaaaatccttctttctctccgcctagccctatggggggggacagcaatcgctgcttgcaagaggagatgctccacctgcgggccgaattccaccagcatcttgaggagaaacgtaaggccgaagaggaactaaaagaactcaaagcgcagatcgaagaggcaggcttttcttccgtgtctcacattcgtaatacaatgctcagcttgtgtttggaaaatgcagaactgaaagaacagatgggggaggccatgtcggacggatgggagatagaggaagacaaagaaaagggggaggtgatggtggagactgttgtgaccaaggagggcctctccgaatcttccctgcaagccgaattcagaaagctacagggcaagctgaaaaatgcccacaatattatcaacctgctgaaggagcagttagttctttccagtaaggagggtaacagtaagctgacccctgagctgttggtccatctaacctcgaccatagagcgaataaacacggaattggtgggtagcccagggaaacaccagcaccaggaagaagggaacgttactgtgaggccatttccccgcccgcagtccttggacctaggggcaacctttactgtagacgcacaccagctggataaccagtctcagccgcgggacccagggccccagagcgcctttagtctgcctggcagcacccagcacctaagatctcagctgtctcagtgcaaacagcggtaccaggacttgcaggagaagctcctcctgtcggaagcaactgtcttcgcgcaagccaatgagttggagaaataccgagtgatgttgactggggaatccctggtgaaacaggatagtaagcaaattcaggtggatttgcaggatctcggctatgagacttgtggcagaagcgagaatgaagcagaaagggaggagaccacttcccctgagtgcgaagagcataactctctgaaggaaatggtgctgatggagggtctgtgtagcgagcaaggacgaagaggtagcaccttggccagcagctctgaaagaaaacccctagagaaccagctgggaaaacaagaagagttccgtgtttatgggaaatcggagaacattcttgtgctaagaaaagacatcaaagacctaaaggcgcagctccagaacgccaataaagtaatccaaaatttgaagtccagggtgaggagcctgagcgtaacctcagactactcaagctccctggagcggccctggaagttaagagctgtgggaaccctggagggctctagtccacactcagtccccgatgaggatgagggctggctttccgacgggactggcgctttttactcccccgggctacaggcaaagaaagaccttgaatctctgatccagagagtgagtcagctagaagcacaactgcctaagaatggtctggaagaaaagttggctgaagaactaagatctgcttcctggccgggaaagtatgactcactgattcaggaccaggcacgcgaattgagttatctgaggcagaagattcgggagggccgcggcatttgctacctcataacccggcacgcaaaggacacagttaaatcttttgaggatctcttgcggagtaacgacattgactactatctgggacaatccttccgcgaacagcttgctcagggatcccaactgactgaaagactgacttccaagctcagcactaaagatcacaaaagcgaaaaggaccaggccggattggaaccactcgccctcagactgtcccgcgagctccaggaaaaagaaaaggtgattgaagtgctccaagccaaattagacgcaaggtccctcactccttcttcttcccacgcccttagtgactcccaccggtcgccctccagtacctcctttttatccgacgaactggaggcatgctctgacatggatatcgtttcggaatacacccactatgaagaaaagaaagccagcccaagtcacagcgatagcatccaccacagtagccactccgctgttctgtctagtaaacccagttccacatcagcctcccagggggccaaggctgagagtaattctaatccgattagcctgccaacccctcagaacactcctaaggaggcaaatcaggcccattctggcttccactttcatagcatccctaaactcgcaagtctgcctcaagcgcccctgccctctgcaccaagttccttcctcccattttcccccacgggaccccttttgctcggttgctgcgaaacgcccgtagtgagtctggccgaagcccagcaggagctgcagatgctgcaaaagcagctgggggagagcgcgtccactgtgccccccgcatctacagcaaccctgttaagcaacgaccttgaagctgactcatcatactacctgaacagcgcccaacctcattcaccaccacgtggcaccatcgagttgggaagaatccttgagccaggttacctgggatcatctggaaaatgggatgtgatgcgcccccagaaaggaagtgtctctggtgacttgtcctccggctcttccgtgtatcagctcaattcaaagccaaccggagccgatttattggaggaacatctgggagaaatccgcaatctgagacaacggctggaagagtcaatctgtattaacgatcggctccgggaacagctcgagcatagactcacttccacagcccggggacggggctcgacctcaaacttttacagccagggtctggagtcgatcccccagctctgcaacgagaatagggtcctgagagaagataacaggcggttgcaagcccagctctcacacgtctccagggagcatagccaggaaacggagtccctacgagaggcgctgctctccagccgcagccatttgcaagagctcgagaaagaactggaacaccagaaggtcgaacggcagcagctgttagaagatctacgtgagaagcagcaggaggttctgcattttcgggaagagcggctttccctccaggagaatgactcaagactgcagcacaaattagtgttgctccagcagcagtgtgaagagaagcagcagcttttcgaaagcctgcagagcgagctgcaaatctacgaagccctgtatgggaactctaagaaaggcttgaaggcctacagcctggatgcatgtcaccagattcccctctcctctgatctgtctcacctggtggccgaagtaagggccttgcgggggcaactcgagcaatctatacaagggaataactgtttgagactacagctgcagcaacaactggagagcggagctggcaaggcaagcctgtcaccaagtagcattaatcaaaacttccccgcctcaacagacccaggtaataaacaactcttgctccaggatagtgccgtgtcacctcccgtgagggatgtgggcatgaactcacccgctctcgtatttcccagctccgccagctccacccctggctccgagaccccgatcatcaatcgtgcaaacggcctcggcctggatacctcacctgtgatgaagacaccacccaaactcgagggtgatgcgaccgatggctcattcgcaaataaacatggaagacatgtaatcggtcacatcgatgactactcagcattgcggcaacagattgctgaaggcaagctgctggtgaagaaaatcgtctcccttgtgagatctgcttgcagtttccctgggttggaagcacaaggcacagaggtgcttggttctaagggtatccatgagttgaggtccagtacgtctgctctgcaccatgcgcttgaggagagtgcctccttgttgactatgttttggagagccgccctgcccagtacccacatccctgtactgccgggcaaagtcggcgaaagcactgagcgtgaattgttagagctcaggacaaaagtctccaaacaagaacggcttcttcagtccactacggagcatttgaagaacgccaaccagcagaaggagagcatggagcagtttatcgtttcccaactaacccgaactcacgacgtattgaaaaaggcccggacgaatcttgaagtcaaatctctgcgagccctgccgtgtacacccgccctctag

SEQ ID NO: 199328 - DNA, 7089 bp, synthetic construct
  misc_feature 1..7089: note = Description of Artificial Sequence: Synthetic coding sequence
  source 1..7089: mol_type = other DNA
atgagcaacggctaccggaccctgagccagcacctgaacgacctgaagaaagaaaacttcagcctgaaactgcggatctatttcctcgaagagcgaatgcagcagaagtatgaagcctcgcgcgaagatatttataaaaggaatattgaactgaaagttgaggtggaaagccttaaacgcgagctccaggataagaagcagcacctcgacaaaacatgggcagacgtcgaaaacctgaactcacagaatgaagctgagttacgacggcagtttgaggaacgacagcaggagacggaacatgtctacgaactgctggaaaataagatccagctcctgcaggaggaatcccgcctggccaagaacgaggccgcaagaatggccgcattggtcgaagcagagaaagagtgtaatctcgagcttagcgagaagcttaagggcgtgaccaagaactgggaggatgtgcctggagaccaggttaaacccgatcaatacacagaggcgctggctcaaagagataagcgtattgaagagttgaatcagagccttgctgcccaggaaagactcgtggaacaattatcaagggaaaagcagcagctcctgcacttacttgaagagcccaccagcatggaagttcaacctatgacagaagaacttctaaagcagcagaaactgaacagccatgaaaccactattacacagcagtctgtgagtgacagtcatctcgcagagttacaggaaaagatccagcagactgaggccacgaacaagattttgcaagagaaactcaatgaaatgtcatatgagcttaagtgtgcccaggaatcatctcagaaacaggacggtaccatccagaacctgaaagagactctgaagagccgcgagagggagactgaagagctttatcaagtcatagagggacagaacgacacaatggctaaactgagggaaatgctgcaccagagccagctggggcaactgcactcaagcgagggcacctcccctgcccagcagcaggtggccttgctcgacctgcagtcggcactgttttgttctcagctggaaattcagaaactgcagcgcgtcgttcgccagaaggaaaggcagcttgctgacgccaaacagtgtgtgcagtttgtagaagccgctgcgcacgaatccgaacagcaaaaagaggcgtcctggaaacacaatcaggaacttagaaaggctctccagcaattgcaggaagagctgcagaacaaatcccaacagctgcgggcttgggaagccgaaaagtacaatgagatccggacgcaggagcaaaatattcaacatttaaatcatagcctttcccataaggagcagcttctacaagaatttcgggagctcctccagtaccgtgacaactcagataagacactcgaagcaaatgagatgctcttggagaaattgcgacagaggatccatgataaggccgtggcacttgagcgagcaattgacgaaaagttctctgcccttgaagagaaagaaaaggaactccggcagttgcgcctggctgtgcgagaacgtgatcatgacctggagaggcttcgcgacgtcttatcgagcaacgaagctactatgcagtctatggaaagtctgttaagggctaaaggcctggaagttgagcagctgagtacaacatgccagaacctacagtggctcaaggaagaaatggaaacgaagttttcaaggtggcagaaggagcaggagtcaataatccagcagctgcaaacttccctccatgaccgcaacaaagaagtggaggatttaagcgccacacttctctgtaagttgggtcccggtcagagcgagatcgccgaggagctgtgccagcggttgcagagaaaagaacgaatgctgcaagatctgctttctgataggaataagcaggtgctagagcatgagatggaaatccagggcttactacagtccgtgagcacaagagagcaggaaagccaggccgccgccgagaagcttgtgcaggcgctgatggagcggaactcggagctccaggcgctgcgccagtacttaggtgggcgggatagcctgatgtcccaggcacccatctccaaccaacaagcagaagtgaccccaaccgggtgtttgggaaagcagaccgaccaggggtcaatgcagatcccatctcgggacgacagtaccagcctgaccgccaaggaggacgtgtccattccgcgctccaccctgggggatctagacacagtggccggcctagagaaagaactctcaaacgcgaaggaggagctagagcttatggcaaagaaagagagggagtctcaaatggagttgtcggctctccagtctatgatggcagtgcaggaggaagaattgcaagtgcaagccgcggatatggagagcctgacacggaacatacagatcaaggaggacctgataaaagacctgcagatgcaattagtggacccagaagacattcctgctatggagcggctgactcaggaagtcttattactccgcgaaaaagtcgctagcgtggagagccagggacaggagatctctggtaaccggcggcagcagctattgttgatgctagagggtctagttgacgaacggagtagactcaatgaagccttgcaggccgaaaggcagttatactcttcactcgtgaagtttcacgctcaccccgagagcagcgagagagaccgcaccctgcaggtagagcttgagggcgcacaggtgctgcggtcgcgcctagaggaggtgctgggacgctcccttgagaggcttaaccgtctcgaaactttagccgccatcggaggggcagccgcgggcgacgacactgaagatacctccactgagttcacagactccatcgaggaagaagctgctcatcatagccatcagcagctggttaaggtggctcttgaaaagtctttagcgacagttgagactcagaatccttccttcagtccgccctcgccgatggggggcgactcgaaccggtgtttgcaggaggaaatgctacatttgcgcgctgagttccaccagcatctggaagagaagaggaaagccgaggaggaactgaaggaactgaaggctcagatcgaagaagccggattctcatccgtttctcacatccgaaacactatgctgtcactctgtctggaaaacgccgagcttaaagagcagatgggcgaagccatgtccgacgggtgggagattgaggaggataaagaaaaaggcgaggtgatggtggaaaccgtcgtgactaaggaaggcttatcagagtcatcactgcaggcagaattcaggaagctgcagggcaagctaaagaatgctcataatataattaacttactgaaagagcaactggttctcagcagtaaagagggaaattcgaagctgaccccggaactactggtgcaccttacttctaccatagagaggatcaacactgaactcgtggggtccccggggaaacaccagcaccaggaggagggaaatgtgaccgtacgccctttccctcggcctcaatccttagatttgggcgccacatttacagtcgacgcccatcagctggacaaccagagccagcctcgtgaccccgggccacagtctgctttcagcttgcctggaagcacgcagcatcttcgctcacagctctcacaatgtaaacagcgctaccaggatctacaggagaagctgttgttgtctgaggcgaccgtgtttgcgcaggccaatgaattagagaagtacagagtaatgttgaccggggaaagtctcgtgaagcaggattccaagcagattcaggtagatctgcaggacctcggctacgaaacctgcggcaggagtgagaacgaggccgaacgggaggagacgacttccccagaatgtgaggaacataactccctgaaagagatggttctgatggagggactctgctccgagcagggacggcggggatccaccctggcatcctcatcagaaagaaaaccgctggagaaccagctcggcaagcaggaggagtttcgagtgtacggaaagagcgagaacattctggtcctgagaaaagacattaaggaccttaaggcccagctccagaatgccaacaaggtgatccaaaatctgaagagccgcgtaagaagcctgagtgtgacctctgattacagcagttccttggaaagaccatggaagctacgtgcagtaggtacgttggaggggagttctccacattcagttcctgatgaagacgagggctggctcagtgatggcactggagccttttatagcccaggactgcaagccaaaaaagacctggaaagcctgattcagagggtttcacagttggaggcgcagctgcccaagaatgggctcgaagaaaaactggctgaggagctgaggtctgcatcctggcccgggaagtatgactcactcatacaagatcaagcacgagagctgagttacctgcgccagaagattcgcgagggaagaggaatctgttacctcatcactaggcatgccaaagataccgtgaagtccttcgaggatcttctgagatcaaacgacatcgattattacttgggccagtcttttagggagcagctggcacagggttcccagctgacagagaggctcactagtaagctcagtacaaaggatcataagtcggagaaggaccaagccggattagagccactggctctccgtctgtcacgcgagctgcaggaaaaggagaaagtgattgaagtgctgcaggctaaacttgacgcacggtccctaacgcctagttcaagccacgccctgtcagattcacacagatcccctagctcaacatccttcctgtccgacgaactggaggcttgcagtgacatggatatcgtgagcgaatacactcattatgaggagaagaaggcctccccttcgcattcagactcgattcaccactcttcccacagtgcagtgctgtcaagtaagcccagctccacatccgcctcccagggagcaaaggcagaatcaaacagcaatcctatctccttgcctacacctcagaatacacctaaggaggccaatcaagcccactccgggtttcactttcacagcattcctaagctggcaagcttgccccaagcaccattgccttccgccccatcatcgtttctgccttttagcccaactgggccactgctgctcgggtgctgtgaaacaccagtcgtgtctctagccgaggcacaacaggaattgcagatgcttcagaagcaactgggcgaaagtgccagcaccgtgccccccgccagtacagcgacactcctgtcaaacgacctggaggcagactctagttactatctgaattccgcccagcctcacagtccaccacgtggtaccatcgaactagggcggattcttgaaccaggatatcttggttctagtggaaagtgggacgtgatgaggccccaaaaaggtagcgttagtggcgacctttccagtgggtcgagcgtgtaccaactaaatagtaaaccgaccggagcggatctcctggaagaacatctgggcgagattaggaatcttagacaacgactcgaagagagtatctgtattaacgatcggctccgcgagcagctcgaacacagactgacaagcactgctcgtggacggggctccacatccaacttctattcacagggactcgaaagcataccacaactgtgtaacgagaatagggtactgagagaggacaaccgacggctgcaggcacagctcagtcacgtgagcagggaacactcacaggagaccgagagcttgagggaggccctgctgtcttccagatcgcacctgcaggaactcgagaaagaactggagcaccagaaggtcgaaaggcagcagcttttggaagatctgcgcgaaaaacagcaagaggtgttacacttcagagaggagagactatctttgcaggagaacgattctcgtcttcagcacaaactagtgctcctgcaacagcagtgtgaggaaaaacagcagctcttcgagagcttgcagagtgagctgcagatttacgaggccctttatgggaattctaaaaaggggctcaaagcctattccctggatgcctgtcatcagattcccctgagtagtgatctgagccacttagtagccgaagtcagagccctgcggggacagctcgagcagagcattcaggggaataactgtctacggttgcagctacagcagcaactcgagagtggagcaggaaaggcatccttgtctccaagttctatcaatcaaaacttccctgcttcaaccgaccccggcaacaaacaactcctcctgcaagattctgccgtgagcccaccggtcagagacgtaggtatgaacagtcctgccctggtctttccaagcagtgccagctccacccccggaagtgaaacacctataataaatcgtgcgaacggcctcggcctggacacatcaccagtaatgaagacgcctcctaagctggaaggcgatgctaccgatggatccttcgcgaacaagcacggccggcatgtgatcggccacatcgacgattactccgccctgcggcaacagattgcagagggtaagctactggtgaagaagatcgtgtccctggttcggtctgcctgttcgtttccgggcttagaggcccagggcacagaggttttgggctccaagggtatccatgaacttcgaagctccactagcgctctccaccatgcgctggaggaaagcgcgagcctcctgacaatgttttggcgggccgcactgcccagcacacatattccagtactccctggaaaagttggcgagagtacagagagagagctactagagctgcggacaaaagttagcaagcaggagagactactgcaaagtaccactgagcacctgaagaacgccaaccagcagaaggaatcaatggagcaatttatagtgtcccagctgacacgcactcatgatgtgctcaagaaggcaaggaccaacctggaagaaccgtgcaagaaaagatctcaccagaaatcactcaaacaacaggagaggtgggcctgccctccttttgtccagttacccatctgttag

SEQ ID NO: 199329 - DNA, 1557 bp, synthetic construct
  misc_feature 1..1557: note = Description of Artificial Sequence: Synthetic coding sequence
  source 1..1557: mol_type = other DNA
atgcccgaggccaactacctgctgagcgtgagctggggctacatcaaatttaaacgtatgctaaaccgggagttgacacatctctccgagatgtcccgcagcggtaaccaggtgagcgagtttattagcaacaccttcctggataaacagcacgaggttgagatcccatccccaactcagaaggagaaggaaaagaagaaaagacccatgagtcaaatctctggggtcaagaaattgatgcactcctccagtctcaccaattcttcaattccccgatttggcgtgaagactgagcaggaggacgtcctggccaaagaactggaggatgtcaataaatggggcttacatgtattccgaattgctgaactgtctggaaacagaccccttacggtgattatgcataccattttccaggaacgggacctacttaaaacttttaagatacctgtcgacaccctgatcacttacttaatgacactcgaggatcattaccacgccgacgtcgcctatcacaacaacatacacgctgcggatgtggtgcagagcactcatgtgctcttgtccacccctgccctcgaagccgtttttactgatctggagatattggccgctatcttcgcaagcgccatccatgatgtggaccaccccggggtcagcaaccaatttctgataaataccaactctgagctcgcacttatgtataacgactccagcgttcttgagaaccatcatctggcagtgggcttcaagctgctgcaggaagagaattgcgatatcttccaaaacctgaccaaaaagcagaggcagagcctccgcaaaatggtcattgacattgtcttagccacggatatgtcaaagcacatgaatcttttggcggatcttaagaccatggttgagacaaagaaagtaacttcatctggggtgttgctactcgacaactatagtgacaggattcaggtcctgcaaaacatggtgcactgcgcagacctaagtaatcctacaaagcctctgcagctgtatagacaatggacagatcgcattatggaggagttttttagacagggcgacagagaaagagagagggggatggaaatcagcccaatgtgcgacaaacataacgccagcgtcgaaaagagtcaagtgggatttatcgattatatcgtacacccactgtgggaaacctgggccgatctcgttcatcctgacgctcaggatatactggacactctggaggacaaccgggagtggtaccagagtacaattccacagtcccccagccctgcgcccgatgacccagaggagggacgacagggccagaccgaaaagtttcaatttgaactgacgttggaggaggatggcgagagcgataccgagaaggactctggctcacaagtggaagaagacacttcgtgtagcgatagtaaaacgctgtgtacgcaggattcggaatctactgagattccgctagacgaacaggttgaagaggaggccgttggcgaggaagaggaaagtcagcccgaagcctgtgtaattgatgatagatcgcccgacacttag

SEQ ID NO: 199330 - DNA, 2430 bp, synthetic construct
  misc_feature 1..2430: note = Description of Artificial Sequence: Synthetic coding sequence
  source 1..2430: mol_type = other DNA
atggaggccgagggcagcagcgcccccgcccgggccggcagcggcgaaggaagcgattccgccggtggggcgacactcaaagctccaaagcatttatggaggcacgagcagcaccatcagtaccctctacgccagccacaatttaggctgctgcatcctcatcaccatctgccaccccccccaccgcccagtccgcagcctcagccacaatgccccctccagccaccgcccccccctcccttgcccccgcctcctcctcctccaggcgcggctaggggtcgctacgcctcaagtggggccaccgggcgagtgcgtcatagaggttactccgacactgaacgctacctctattgcagagctatggaccgcacatcatatgctgttgagaccggccaccgtccgggactaaaaaaaagtcgcatgagctggcccagcagtttccaaggcctgcgccggtttgatgttgacaatggaactagcgccggacgaagcccgctggatcccatgacttctcccggctcaggtcttatcctccaggccaattttgtgcattcacagcgacgggagtcatttctgtaccggtctgactccgactatgacctgtctcccaagtcgatgagtcgtaacagttccattgcaagcgacatccatggagatgacctgatagtgacccctttcgcacaagttctagcgtctttgcggacagtgaggaacaattttgctgccctgacaaatctccaggacagggctcctagcaagaggtccccgatgtgtaatcagcctagtattaacaaggctaccatcacagaagaggcttaccagaaattggcatctgagacgctcgaagagctggactggtgtctcgaccagctggagacattgcagacgcgccatagtgttagcgagatggctagcaacaagttcaagcggatgttaaacagggagttaactcacctctcagagatgagtagatcaggaaaccaggtgagtgagttcatctccaacacattcctggacaaacaacatgaggtggagatcccgagccccacccaaaaggagaaggaaaagaagaagcgccccatgtcacagataagcggcgtgaaaaaactgatgcatagctcttccctgaccaatagcagcataccacggttcggagtaaaaacggaacaggaggacgtgctggccaaggagctggaggacgttaataagtgggggctgcatgtatttagaatcgctgaactatctgggaaccggcccctgaccgtcataatgcacactatctttcaggagcgcgacctcctaaagacattcaagatcccagtagacacgcttattacatacctgatgacactagaggaccactatcacgccgatgtggcttaccacaataacatacacgcagccgatgtggtccagagcacacacgttctcctctctacacccgccctcgaggccgtgtttaccgaccttgaaattctggccgccatctttgcgtcagccattcacgatgtggatcaccctggggtgtctaatcagtttttgatcaatactaattctgagttggccttaatgtacaacgacagttctgttctggaaaaccaccacctggctgtggggtttaaattgttgcaggaggagaactgcgacattttccagaacctcacaaagaagcaacgccagtccttacgaaagatggtgattgacattgttctagccacggatatgtctaagcatatgaatctgcttgccgacctcaaaactatggtcgagacaaagaaggtgacaagctctggcgtattgctgctggataattacagtgataggatccaggtgctgcagaacatggtgcactgtgccgatttgagcaatccgaccaaacccttgcagctgtatcgacagtggacagacaggattatggaggagttctttcgtcagggcgaccgtgagagagagcgtggtatggagataagccccatgtgcgataagcataatgcttcagtggagaaatcacaggttggctttatcgactacatcgtccacccactttgggaaacatgggcggatttggtgcatcccgatgcacaagacatcttagacaccttggaagacaacagggaatggtatcagtctaccattcctcagagcccctctcccgcccccgacgatcccgaagaagggaggcagggccagacagaaaagtttcagtttgaacttactctggaagaggacggtgaatcggacactgaaaaagattccgggagccaagtggaggaggatacatcttgctcagactctaagactctttgtacacaggattctgaaagcacagagatcccacttgacgagcaggtggaggaagaggccgttggggaagaagaggaatcccagccggaggcttgtgtcatcgatgaccggagcccagacacatag

SEQ ID NO: 199331 - DNA, 2037 bp, synthetic construct
  misc_feature 1..2037: note = Description of Artificial Sequence: Synthetic coding sequence
  source 1..2037: mol_type = other DNA
atgttcatctacagcttcaacaagttcttcttcaagaccacccactgctgggcaataattagttttgacgtggataacggcacatcggccggccgttcgcctcttgaccccatgactagcccgggttccgggttgatcttacaggcaaatttcgtccattcacagcggcgggaatcttttctctacagatcagactccgattacgacctgagccctaaatcaatgtcccgtaacagttccatagcaagtgacattcatggcgatgaccttattgtgactcccttcgctcaagtcttagctagcctgaggaccgttagaaacaattttgccgcgctgacaaaccttcaggaccgcgcaccctcgaagaggagcccaatgtgcaatcagcctagcatcaataaagcgacaattaccgaagaagcctaccagaagctggccagcgaaactctcgaggaattagattggtgcctggatcaactggaaaccctacagacccgccatagcgtgtccgagatggctagcaataaatttaaaagaatgctgaatcgagagctcactcacctatcagagatgagccgctccggaaaccaggtgagcgaattcatctcgaacactttcctagacaaacagcatgaggtcgagatcccaagtccaacacaaaaggaaaaagagaaaaagaaacggccaatgtcacagatctccggggtgaagaagctcatgcattcttctagtttgaccaactcatccatacctcgattcggagtcaaaacagagcaagaagacgtcctggcaaaggaattggaagatgtgaacaaatggggtctgcacgtgtttcgcattgctgagctgtctggcaaccggccccttaccgtcataatgcatacgatttttcaagaaagggacctcttgaaaacattcaagatccccgtggacacgttgatcacctacctgatgactctcgaggaccactaccatgccgatgtggcttaccacaacaacatccacgctgctgacgttgtgcagtccactcacgtgctgctgagcaccccagccctagaagccgtgttcacggatttagagatattagccgccatatttgccagcgccatccatgatgtcgaccacccaggcgtatcaaaccagtttctcattaacacaaatagtgaattagcccttatgtacaacgacagctcggtgctagagaaccaccatcttgctgtcggcttcaagctcttacaggaagagaattgtgatatattccagaatctaaccaaaaagcaacggcagagtctccggaaaatggttattgatattgtcctggctaccgacatgagcaagcatatgaatcttctggccgacctcaagacaatggtagaaacaaagaaggtgacctcatcaggcgtgctcctgctcgacaactacagcgatcggatccaagttctacaaaatatggtccattgcgcagatctgagcaacccaaccaaacccctccagctgtatcggcagtggaccgacaggatcatggaggagttcttccggcaaggggatcgcgagcgggaaaggggcatggagatcagcccaatgtgtgacaaacacaatgcaagcgtcgaaaagagccaggtgggatttatagattacattgtgcatcctctgtgggaaacctgggccgatctggtgcaccccgatgcccaggacatcctggacacactagaggacaaccgggagtggtatcagtccaccattcctcagtccccgtcgccagcccccgacgatcctgaagagggtcgacaggggcagaccgagaagtttcaattcgagttgactcttgaagaagatggagagtcagacaccgaaaaagactccgggtcccaagtggaagaggacacgagttgctcagattcaaagaccctgtgtactcaggacagcgagtcaaccgagatcccactggacgaacaggtggaggaggaggccgtcggcgaggaggaggaaagccaacctgaggcctgtgtgatagacgacaggtctcccgatacctag

SEQ ID NO: 199332 - DNA, 1524 bp, synthetic construct
  misc_feature 1..1524: note = Description of Artificial Sequence: Synthetic coding sequence
  source 1..1524: mol_type = other DNA
atggccagcaacaagttcaagcggatgctgaaccgggagctgacccacctttcagagatgtctcggagcggaaaccaggtctccgagttcatttccaatacgtttctcgataaacagcacgaagtggagatcccatcgccaactcagaaggaaaaggaaaagaaaaagcggccgatgtctcagatttctggagtgaagaagctgatgcactcatcatccctgacaaacagcagcataccccggttcggcgtgaaaaccgagcaggaggacgtgctggccaaggaacttgaagacgtgaacaaatggggcctgcacgtgttcagaattgctgaactcagcgggaaccggccactgaccgtcattatgcacacaatatttcaggaacgggacctcttaaagaccttcaaaatccccgttgacacccttatcacctacctgatgacactcgaagatcattatcatgcagacgtagcctatcacaacaatattcatgctgctgacgtcgtccagtctactcatgtgttgttatctaccccggcactggaagctgtgttcaccgacctggaaattctcgcagctatctttgcctccgctatccatgacgtggaccatcctggagtcagtaaccagttcttgattaacaccaatagtgaacttgctctgatgtacaatgacagttcagtgttagagaaccaccatctggctgttggtttcaagctgcttcaggaagagaattgtgatatatttcaaaatctcactaagaagcagaggcagtccttgcgcaaaatggtcatcgacatcgtgctggccaccgacatgagtaaacacatgaaccttctcgcagatctgaagactatggtggagaccaagaaggtgacttccagtggcgtgctcctgctggacaattactcagacagaatacaggtactccagaatatggtgcactgtgccgatctgtcaaaccctaccaaacctctacaactatatagacaatggactgacagaataatggaggagttcttccggcagggagatcgggaacgcgaacgggggatggaaatttcgcccatgtgtgataagcacaacgcgagtgttgaaaaatcccaggttgggttcatcgactacatcgttcatcccctgtgggaaacctgggcggatctggttcatcctgacgcacaggacattctggatacactggaggataacagggaatggtaccagtcgaccatcccgcagtcacccagcccggcacccgatgatcctgaagaaggccgccagggtcagaccgagaaattccagttcgagttgaccctggaggaagacggcgagtctgataccgaaaaggattcaggctcccaggtggaagaggacacttcatgctcagactctaagactctgtgtacacaggacagtgagtccaccgagattcctctggatgagcaggtcgaagaagaagcagttggcgaggaggaggagagccagccggaagcttgtgtaatagacgacaggtcccctgacacttag

SEQ ID NO: 199333 - DNA, 2022 bp, synthetic construct
  misc_feature 1..2022: note = Description of Artificial Sequence: Synthetic coding sequence
  source 1..2022: mol_type = other DNA
atgatgcacgtgaacaacttccccttccggcggcacagctggatctgcttcgatgtcgacaacgggacctccgcaggacgaagcccacttgaccctatgacttcccccggctctggcctgattctgcaggcaaatttcgtgcacagccagcggcgggaaagctttctgtacaggtctgattctgattacgatctgagtcctaagagcatgtctcgcaactctagtatcgctagcgatatccatggggacgacctaattgttactccattcgcgcaggttttggccagtcttaggaccgtccggaacaattttgcggcccttaccaatctgcaggatcgtgctccttcaaagcgctcacccatgtgtaatcagccatctatcaacaaggccaccattaccgaggaagcttatcagaaactagccagcgagacactcgaagaattggactggtgtctcgaccagctggagactctgcagacaagacacagtgtctctgaaatggcgtctaataagttcaagcggatgctgaaccgggaactcactcacttaagtgagatgagcaggtcgggtaatcaggtcagtgaatttattagtaacacctttctggataagcagcacgaagtggaaatcccctcaccaactcaaaaagaaaaggagaagaagaagcgtccaatgagtcagattagtggcgttaaaaagctaatgcattcatcctccctgacaaattcatcaatcccccggttcggcgtgaagacggaacaggaggacgttttggcgaaagagcttgaagatgtcaacaaatggggcctgcacgtatttagaattgccgaactgagtggcaataggcctctcaccgtcatcatgcacaccatattccaagagcgcgacttattaaagaccttcaagatccctgtggacaccttaatcacctacctaatgacattagaggatcattaccacgccgatgtcgcctaccacaataatatacacgcagctgacgttgtccaatctacccatgtgctcctctcgactcctgctcttgaagcagtgttcaccgacctggaaatccttgctgccatcttcgcttcagccatacacgacgtggaccatccaggtgtctccaatcaatttctgattaacaccaattccgagcttgcgctgatgtataatgatagctccgtgctggaaaaccaccatctggccgtaggctttaaactgctacaggaagagaactgtgacatctttcagaacttaacaaagaagcagagacagagtctgagaaaaatggttatagatatcgtcctagcaaccgacatgagtaaacacatgaacctgctcgcagacctgaagacaatggtggaaaccaaaaaggtaacgagctccggtgtcttactgctcgataattattccgatcgcattcaggtcctgcaaaatatggtccattgcgcagacctgtccaatcccacaaaacctctgcaactatatcgccagtggacagatcgaattatggaagaatttttccgccaaggcgatcgcgagagagagagaggcatggaaatttccccgatgtgcgacaaacacaacgcttccgtggagaaaagccaggtgggattcatcgactacatcgtgcatcctctatgggaaacctgggcagacctggtgcaccctgacgctcaggatattctagacacactggaggataatcgggagtggtaccagagcaccatcccccagtcgccatctcctgccccagacgaccccgaggaaggacggcagggccagaccgagaagttccagttcgaactcaccttggaagaggacggagagtcggataccgagaaggacagcggcagtcaggtcgaggaggatacatcctgtagcgatagcaaaacgttgtgtacacaggattctgaatccacggagatacccctggacgaacaggtcgaagaggaggcagtgggtgaggaagaggaatcacagccggaggcctgcgtgattgatgaccgctctcccgacacctag

SEQ ID NO: 199334 - DNA, 2064 bp, synthetic construct
  misc_feature 1..2064: note = Description of Artificial Sequence: Synthetic coding sequence
  source 1..2064: mol_type = other DNA
atggccttcgtgtgggaccccctgggcgccaccgtgcccggcccctcgacacgcgccaaaagcaggctgagattctccaagagctactcctttgacgtcgacaatggaacctctgccggccgcagccctttggatccaatgacctcaccaggctcagggctgattcttcaggccaacttcgtgcactcacagcgtcgcgaaagcttcctctatcgtagcgattcagactatgacctgtcgcctaagtctatgtcacgcaatagctctattgcatccgatatccatggcgacgaccttatagtgacaccatttgcccaggttctggcctccttacgcaccgtgaggaacaactttgccgctcttactaatttacaggacagggctccgtctaagaggtctcccatgtgcaatcagccttccattaataaagctaccattactgaggaagcttaccaaaagttagcaagtgaaacgttggaagagttggattggtgtctggaccagctggagacgctccagacgagacattccgtctctgagatggccagcaataagttcaagagaatgctaaatcgggaactaacgcatctctctgaaatgtcgagatctgggaatcaggtgagcgagttcatctccaacacgttcttagacaagcagcatgaggttgagattcctagcccaactcaaaaggagaaggagaagaagaaaaggcctatgtctcaaatctccggagtcaagaaactaatgcatagcagttcactcacaaatagttcaatcccccgatttggggtgaagacagagcaagaggatgtgttggccaaagaactcgaggatgtgaacaagtgggggcttcacgttttcagaatcgctgagctgtcgggaaaccggcccctgaccgtcatcatgcacacaattttccaggagcgcgatctgttaaagaccttcaaaatcccagtcgatacactcatcacgtatcttatgaccctcgaagatcactaccacgctgatgtcgcatatcacaacaacatacatgctgctgacgtggtgcagtctacgcatgttctactatcaactcccgctcttgaggctgtctttacagatttggaaattctcgccgcaattttcgcaagcgcgattcatgatgtggaccaccccggtgtgtcgaatcagttccttatcaacacaaactctgaactggctctgatgtataacgactcttctgtacttgagaaccaccacttggctgtgggatttaaactgctgcaagaggagaattgcgatattttccaaaatctcactaaaaagcagcgtcagagtttgaggaaaatggtgattgatattgtgctggcaacagatatgagcaagcatatgaatctgctggcagacctgaagacaatggtggagaccaaaaaagttacatcgagtggtgtcttgcttctggacaactactccgatcgaatccaggtgcttcaaaacatggtccattgcgccgatttaagcaatcccacaaaacccctccaactgtaccgccagtggacagatcggatcatggaggaattctttagacagggggacagggaacgcgaacgtgggatggaaattagcccaatgtgcgacaaacataacgcttctgttgaaaaaagccaagtgggatttatcgattatattgtacacccactgtgggaaacttgggccgatcttgtacatcccgacgctcaggatatcctggatacgctggaagacaatcgtgaatggtaccagagcacgattccacagtctccatcacccgcccccgacgacccagaagaggggagacaggggcaaacagaaaagtttcaattcgaactcactttggaggaagacggtgaaagcgacactgagaaagattctgggtcccaggtggaggaggacactagttgcagcgattctaagactctgtgtacccaagatagtgagtccactgaaattccattggacgagcaggtcgaagaagaggctgtgggggaggaggaggagtctcaacccgaagcctgtgttatcgatgaccgcagtcccgatacctag

SEQ ID NO: 199335 - DNA, 2247 bp, synthetic construct
  misc_feature 1..2247: note = Description of Artificial Sequence: Synthetic coding sequence
  source 1..2247: mol_type = other DNA
atgaagcggaacacctgcgacctgctgagccggagcaagagcgcctcagaggaaactctccactcaagcaacgaggaggaggacccgtttagggggatggagccatacctcgtgaggagactgtcctgtaggaatattcagcttcccccactcgcgtttcgccagctcgagcaggctgatttgaagtctgaatccgaaaacattcaaaggcccaccagtctgccacttaaaatcctccccctcattgcaatcaccagtgctgaaagcagcgggtttgacgtggataatggaacatctgccggacggtcccccctggacccaatgacgagccctggcagcggactcattctgcaagccaatttcgttcactcacagagacgcgaatcctttctttatcggtccgactccgactatgacctgtccccaaagagcatgtcccgcaactcgtccatagcctcagatatacatggtgacgaccttatagtgaccccctttgctcaggtcctggcatccctccgaacggtgcgcaacaattttgctgctctcactaacctgcaggaccgcgcacccagtaaaaggagcccgatgtgcaatcagccgagcattaacaaagcaaccattacggaggaggcctatcaaaaactggcttcagaaactctcgaagagttagattggtgtctcgaccaattggaaaccttgcagacccgccactcggtgagcgaaatggcctctaacaagttcaagcgcatgttaaatcgtgagctaacacacttatcagaaatgtccagatcaggcaaccaggtgtctgagttcatatcaaacacattcctcgacaagcagcatgaggtcgagataccatctcccacacaaaaggagaaggagaaaaagaaacgaccaatgtcgcaaatctccggagtgaaaaagcttatgcacagctcatccctgacaaactcctcaatccctcgctttggtgtgaagactgagcaggaggatgtgctcgccaaggaattggaagacgtcaacaagtgggggctgcacgtcttccggattgcagagctgtctgggaatcgcccacttacagtgattatgcatacaattttccaggagagggacttgctgaaaacattcaaaattcccgttgacacactaatcacatacctgatgacgctggaggatcattaccatgccgatgtggcataccataataatatacacgccgctgatgtcgtccagtctacccatgttctcctgtccacccccgccctcgaggcagtatttaccgacctggaaatcctcgccgctatattcgcttctgctattcatgatgttgaccacccaggagtgtccaaccaattcctaatcaacaccaacagtgagcttgccctgatgtataatgattcaagcgtgttagaaaatcaccacctggctgttgggttcaagctgctacaggaggaaaactgcgacatcttccagaacctcactaagaagcagaggcaatctctgcggaaaatggtgatcgacattgtcctagccacagatatgtcgaaacacatgaacctgctggccgacctaaagaccatggtggaaactaaaaaggtcacgtctagcggagtgctccttctggataattacagcgatcgtatccaagtccttcagaatatggtgcattgtgcagatctgtccaatcccacaaaaccccttcagctgtatcgccaatggacagacaggataatggaagagttctttaggcagggcgatcgggagcgcgagcgcgggatggagatctcccccatgtgcgataaacataacgctagcgtagaaaagagccaggtgggcttcatagattatatcgtgcatcccctgtgggagacctgggcggatctggtgcatcccgatgctcaggacattcttgatacgctagaggacaatagagaatggtatcagagcaccataccgcaatctccatcccctgccccagacgatccagaggagggaaggcagggccagactgaaaaatttcagttcgaactgacgctagaagaggacggagagagcgacacagaaaaggactccggctcccaggtcgaggaggacacatcctgctcagactcaaagaccctgtgcacccaagattctgagagcactgaaatccctctcgacgaacaggtcgaagaagaagccgtgggtgaagaagaggaatcacagcctgaggcctgtgtgattgatgaccggtcacccgacacctag

SEQ ID NO: 199336 - DNA, 660 bp, synthetic construct
  misc_feature 1..660: note = Description of Artificial Sequence: Synthetic coding sequence
  source 1..660: mol_type = other DNA
atggcccagcagaccagccccgacaccctgaccgtgcccgaggtggataaccctcattgcccaaatccttggctcaatgaagaccttgtaaagagcctacgggagaacctactccagcatgagaagtcaaaaaccgccagaaagtccgtttctcccaaactgagccccgtgatttcccccagaaacagcccaagactcctcagacggatgctgcttagttcgaacatccccaaacaaagaaggttcactgtcgctcacacttgcttcgacgtggataacggcaccagtgctggccggagcccgttggaccctatgacaagccccgggtccggactgattctgcaagccaatttcgtgcactctcaacgcagagaaagctttctttacagaagtgacagcgattatgacctctctcccaagagcatgtcccgcaatagttctattgcttctgatatccatggggatgatttgatcgttacaccatttgcacaagtgcttgcatcactccgaactgttcggaacaacttcgcagcactgactaacttacaggaccgggcccccagcaaacgatccccaatgtgcaaccaaccttctattaacaaagccacaataactgggtcatggatggaacttaacccctacaccttgctggatatgtag

SEQ ID NO: 199337 - DNA, 2040 bp, synthetic construct
  misc_feature 1..2040: note = Description of Artificial Sequence: Synthetic coding sequence
  source 1..2040: mol_type = other DNA
atgagcatcatcatgaagccccggagccggagcaccagcagcctgcggacggctgaggccgtgtgctttgatgttgataatgggacaagtgccggtcgtagtccactggacccaatgacctcacctggctccggcctcattctgcaggcaaattttgttcatagccagaggcgagaaagcttcttatacagatccgacagcgattacgacctatccccaaagagcatgtcccgtaactcctcaatcgcttcggatatccacggtgatgacttaatcgttactccctttgcccaggtgctggcatctctgaggaccgttcggaataatttcgcggccctcaccaatttgcaggaccgggccccttccaagagatcccctatgtgcaaccagccctcaataaataaggccactataacagaggaggcctaccaaaaactcgcttccgagaccttggaggagcttgattggtgtttagaccaactcgaaacgctacagacccgtcattctgtgtctgagatggccagtaacaagttcaagaggatgctgaatcgggagctgactcacctgtctgaaatgagcaggtcagggaatcaggtctcagaattcatcagcaacaccttcctcgacaagcagcatgaagtggaaattccttcacctacacagaaggaaaaggagaagaagaaaagaccaatgtcacaaatttccggagtaaaaaagttaatgcactctagttccctgacaaatagtagtattcctaggtttggagttaagactgagcaggaggacgtcttagctaaggaactggaggacgtcaataagtgggggttacacgtgtttaggatcgcggagttgtctggaaataggccactcactgtcattatgcacaccatctttcaagagcgggacctgcttaagacattcaaaattcctgttgacacgctgattacctacctaatgactttagaagaccattaccacgccgatgtcgcataccataataatatccatgccgcagatgtggttcaatcaacgcatgtgctcctgtctacacccgctctggaagcagtgtttaccgacttggagattctggctgcgatatttgcatccgccatacacgacgtggaccatcctggtgtaagcaatcagtttctgattaatactaacagcgagctcgctctcatgtataatgatagtagcgtcttggaaaaccaccatctggcagtcgggtttaagctattgcaggaggaaaactgtgacatcttccagaacttgactaagaagcagcggcagtccttgagaaaaatggtcatcgatattgtgttggcaacagacatgtcgaagcatatgaatctgctggccgacctcaaaaccatggtggagacgaaaaaggtgaccagctccggcgtgttacttttggacaactacagcgatcgcattcaagttctgcaaaatatggtgcactgtgcggacctgagtaacccaaccaaacctctgcagctgtatagacagtggaccgaccgcattatggaagagttctttaggcaaggcgacagagagcgggaaaggggtatggagataagtcctatgtgtgacaaacacaacgcgtccgtggaaaagagtcaagtggggttcatcgattatatcgtccaccctctgtgggagacatgggctgatttggtccatcctgacgcgcaggacatcctcgacacccttgaggataaccgcgagtggtatcagagcaccattccccagtcacctagccccgcccccgacgaccctgaggaagggcgacagggccagactgagaaattccagtttgagcttaccctagaagaggacggtgagtccgacaccgaaaaggacagcggcagccaggtggaggaggatacatcatgcagcgatagtaaaactctgtgtacacaggactctgaatctaccgagatcccgctggatgaacaggtcgaggaggaggccgtgggcgaggaggaagaatcccaaccagaggcctgtgtgatcgacgacaggtcgccagacacttag

SEQ ID NO: 199338 - DNA, 1269 bp, synthetic construct
  misc_feature 1..1269: note = Description of Artificial Sequence: Synthetic coding sequence
  source 1..1269: mol_type = other DNA
atggccagcaacaagttcaagcggatgctgaaccgggagctgacccacctgtccgagatgagccgatctggaaaccaggtgtcagagttcatctccaacacgttcttggacaaacagcatgaggtagaaattccaagccccacccagaaagaaaaagagaaaaaaaagagaccgatgagtcagattagcggcgttaaaaagctcatgcattcctcttcattgacaaattcaagtataccgcgtttcggcgtaaaaacagagcaggaagatgtgctggcaaaagagctggaagatgtcaataagtgggggctacacgtatttagaatagcagagctgtccggaaatcggccactgaccgtcattatgcacacaatctttcaggagagagatcttctcaagaccttcaagatccctgtggatactcttatcacataccttatgaccctggaggatcactaccatgccgacgtagcataccataacaatatccacgcggcggatgtcgtgcagagcacacacgttctgctttccacccctgccttagaagccgtgtttactgacctggagatcttagctgctatcttcgccagcgctatccacgacgtcgaccatcccggcgtttctaaccagttccttattaataccaatagcgagcttgccctcatgtataacgatagctccgtgctggagaatcaccacctggccgttggcttcaaactgttgcaggaggaaaactgcgacatctttcagaacttgacgaaaaaacaacggcagagcctgagaaagatggtgatcgacattgttctcgccaccgatatgagtaagcacatgaacctcctggccgatctcaaaactatggttgagaccaagaaggttacctcctcgggagtgctccttttggacaactattctgatagaatccaggtcctgcagaatatggttcattgcgccgacctgtctaatccaaccaagccccttcaactgtaccgtcagtggaccgaccggatcatggaagaattctttaggcagggtgatcgtgagagagagcgcggtatggaaatttcgccgatgtgcgacaaacacaacgcaagcgtagagaaatcgcaggtcggcttcatcgattacattgtccaccccctgtgggagacttgggcagacctggtgcacccagatgcccaggacattctggacacactggaggacaatagggagtggtatcagtcaaccatcccccagtcccccagcccggctccagacgatccagagtag

SEQ ID NO: 199339 - DNA, 246 bp, synthetic construct
  misc_feature 1..246: note = Description of Artificial Sequence: Synthetic coding sequence
  source 1..246: mol_type = other DNA
atgaagcggaacacctgcgacctgctgagccggagcaagagcgccagcgaggagacactgcattcctccaatgaagaagaagacccgtttcggggtatggagccttatctcgtacgacgcctgagctgcagaaatatccagcttccccctcttgctttccgccagctggagcaagctgacctaaaaagcgagtccgaaaatatccagcgccctacatccctgccgctgaagattctccctctctag

SEQ ID NO: 199340 - DNA, 2238 bp, synthetic construct
  misc_feature 1..2238: note = Description of Artificial Sequence: Synthetic coding sequence
  source 1..2238: mol_type = other DNA
atggcccagcagaccagccccgacaccctgaccgtgcccgaggtggacaaccctcattgccccaacccatggctgaatgaggatctcgtgaaatcgctgagagaaaacctgctgcagcatgaaaagagcaagaccgcacgcaagagcgtgtctcctaagctgtctccagtaatctccccccggaattctccaaggcttctgaggcggatgttgctgagctctaatattcccaaacagcggcgcttcactgttgcccatacatgctttgacgtggacaacggtacaagcgctgggagatcccccctggacccgatgacaagccctggcagcggccttatactgcaggccaacttcgtccatagtcagcggagggagtcatttttgtacagatccgattccgactatgacctcagtcccaaatccatgtcaagaaactccagtatcgcaagcgacattcatggtgacgacctcatcgtgacgcccttcgctcaggtactcgcgtctctgagaacggtgcgcaataacttcgccgccttgacaaatttacaggatagagctccgtcaaaacgctcccccatgtgcaatcagccctctataaataaagccacaattacggaggaagcataccagaagctcgcctccgagacgctcgaagagttagactggtgcttagaccagttggagactctccagacacggcatagtgtgtctgagatggcctctaataagttcaagcgcatgcttaacagagaattaacacacctgtctgaaatgtcccgctctggtaaccaggtgtctgagttcatctccaatacctttctagataagcagcacgaagtggagattccttcaccgacccaaaaggaaaaagaaaagaaaaaacggcccatgtcccaaatcagtggcgtgaaaaaactgatgcacagctctagcttgaccaacagttccatccctcgctttggtgtgaagacagaacaggaggacgtgttggccaaggaattggaggatgtcaacaagtggggtctgcacgtcttcagaattgctgaattatcagggaacaggcccctaaccgttatcatgcacaccatttttcaggaacgggacctgctgaaaacatttaagattcctgtagatactctcatcacatatctgatgacgctggaggatcactaccacgcagatgtcgcttaccacaacaacatccatgctgcagacgtggtgcagagtacacacgttctgctcagcacacccgcgctcgaggccgtgttcaccgatttagaaatcctggccgccatatttgcaagcgccattcacgacgtcgaccacccaggagtaagcaatcagtttctgatcaacacaaactcagagttagctctgatgtacaacgactcctcagtcctggagaatcatcatctcgctgttggcttcaaattactccaggaagaaaactgtgatatcttccagaacctgactaaaaagcagcgccagtccctcaggaagatggttattgacattgtactggctacagacatgagcaagcacatgaacctgctggccgatctaaaaactatggttgagactaagaaagtcaccagttcaggtgtactgctgcttgacaattactctgaccggattcaggtgttacaaaacatggtacactgcgcggatcttagtaatccaaccaaaccactacaactgtaccgccagtggacagatcgtattatggaggaattcttccggcagggggatcgggagagggagaggggtatggagatttcaccaatgtgcgacaagcacaacgcgtccgttgagaaaagccaggtggggtttatcgattatatcgttcatccgttatgggaaacttgggctgatctcgttcatcccgatgcacaggacatcttagataccttagaggataatagggagtggtaccagtcgacgataccccagtctcctagtcctgcaccggatgacccagaagagggcagacagggtcagaccgagaagttccaattcgaattgacgctagaagaagacggcgagtctgataccgaaaaagacagtgggagtcaggtggaagaagacacatcatgctccgactcaaaaactctctgcacacaggatagtgagtctacggaaatccctttagatgagcaggttgaggaagaggccgtgggggaggaggaggagtctcagcccgaggcctgtgtgatcgacgacaggtcccctgacacttag

SEQ ID NO: 199341 - DNA, 228 bp, synthetic construct
  misc_feature 1..228: note = Description of Artificial Sequence: Synthetic coding sequence
  source 1..228: mol_type = other DNA
atgaagcggaacacctgcgacctgctgagccggagcaagagcgcctcagaggagacactccactctagtaacgaggaagaagatcctttcagagggatggagccttatctcgtgaggagactgtcttgcagaaacattcagctccctccgctggccttccgccaactggaacaagcggatctcaagtccgagtctgaaaatatccagcgtcccactagccttccatag

SEQ ID NO: 199342 - DNA, 2247 bp, synthetic construct
  misc_feature 1..2247: note = Description of Artificial Sequence: Synthetic coding sequence
  source 1..2247: mol_type = other DNA
atgaagcggaacacctgcgacctgctgagccggagcaagagcgcctctgaggagactctgcacagttccaacgaggaggaagaccccttccgaggaatggagccgtaccttgttagaagactgtcatgcagaaacatccagctccctccattagcttttagacagttggagcaggcagacctcaagtctgagtcagagaatattcagaggcccacaagcctgcccttaaagatcctgccgttaatcgccatcacctctgcagagtcatccggatttgacgtggacaatggtaccagtgcggggcgatccccactggaccccatgactagccccgggagtggactgatcttgcaagccaatttcgtgcattcgcagcggagggaatcatttttgtaccgtagcgattctgattacgatctgagccccaagagtatgtccaggaactcaagcatcgcatctgatatacatggggatgatcttattgtcaccccattcgcccaggtccttgctagcctcagaacggtacgcaacaacttcgcggcactgaccaacctgcaagaccgcgcccccagcaaaaggtctccaatgtgtaatcagccatctataaacaaggcaacaatcaccgaagaggcttaccaaaagttggcttcagaaacactagaagaactggactggtgtctggaccagctagagacattgcaaaccagacacagcgtaagtgaaatggctagcaacaaattcaagagaatgctcaaccgggagctgacccatctgtctgagatgtctaggtcaggtaaccaggtgagcgaattcatttctaacacattcctggacaaacagcacgaggtcgagattcccagtccaacccagaaagagaaggagaaaaagaaaaggccaatgtcacagattagcggtgttaagaaactgatgcatagctcctccctcacaaactccagtatccccaggttcggggtgaaaaccgagcaagaggacgttttggcaaaagaactggaggatgtgaacaaatggggcttacacgtgttccggattgcagagctctcaggcaacagacccctgactgtaattatgcataccatattccaggagcgcgacctgctgaaaacctttaaaattcccgtcgacacactgattacctatctgatgacgctggaggaccactaccacgccgacgtggcgtaccacaataatattcacgccgctgatgttgttcagagtacgcacgtcctgctgagcacaccggcactggaggccgtatttacagatctcgaaattcttgctgcaatcttcgcttcagccattcacgatgtcgatcatcctggcgtgtccaaccaattcctcatcaacacaaacagcgagctggctcttatgtacaatgattcttctgtcctagagaatcatcacctagctgtaggatttaagcttctacaagaggagaattgcgacatcttccagaacctcacaaaaaagcaacggcagtccctgcgaaaaatggttatcgacatagtgctggctaccgatatgtccaagcatatgaatttgctcgccgacttaaaaactatggttgaaactaagaaagtaacgtcttcaggagtgctgctccttgataattacagcgaccgcattcaggtgttgcaaaatatggtgcattgcgctgacctttccaacccaacaaagcccctacagctgtacaggcagtggacagacagaatcatggaagaattcttcaggcagggggacagggaaagggaacgggggatggaaatttcgccaatgtgtgataaacacaacgcctcagtcgaaaaaagccaagttggatttatagattacatcgtgcaccccttgtgggaaacttgggctgacttagtgcacccagatgctcaggacatcctggatacactcgaagacaatcgggagtggtaccagtccacaatccctcagtctccctccccagcacctgacgacccagaggagggtagacaaggccagacggaaaagttccagtttgagcttacgctggaagaggatggagagagcgacacagaaaaggacagcggctcccaggtggaagaggatacttcttgctctgattccaaaactctctgtacccaggactctgagagcaccgagattcctctggatgagcaggttgaggaagaagctgtcggggaggaagaggagtctcagcccgaagcatgtgttatagacgacaggagccctgacacttag

SEQ ID NO: 199343 - DNA, 2502 bp, synthetic construct
  misc_feature 1..2502: note = Description of Artificial Sequence: Synthetic coding sequence
  source 1..2502: mol_type = other DNA
atgctgcccttcggcgacaagacccgggagatggtgaacgcctggtttgccgagagggtacacactatcccagtttgtaaggaggggatacgcgggcacaccgaatcctgttcttgtcccttacagcagtctcctcgagccgataattccgcgcccggtacgccgacacgtaaaatttccgcttctgagtttgatagaccccttcgacctatcgtcgtgaaggattcagaaggcacggtgtcctttttgtccgattccgagaaaaaagaacagatgccactgaccccccctagatttgatcatgacgaaggagatcagtgctctagactgctggagctagtgaaggatattagttcacacctagacgtgacagccctgtgccacaaaatcttcctacacatacacggactcatcagcgcagacagatatagcctgtttttggtttgtgaggattcctcaaacgataagttccttataagccgcctgttcgacgtcgccgaggggtccaccctcgaagaagtcagcaacaattgtattagactggagtggaacaaggggattgtgggtcatgtcgccgccctcggtgaacctctgaatatcaaggacgcctatgaagatccacggttcaacgcagaggtggaccaaataacgggctataaaacgcaatcaatactttgcatgcccatcaaaaaccacagggaagaggtggtgggcgtggcacaggccataaataagaaatctggtaatgggggcacctttaccgagaaagacgagaaagacttcgcagcctatctcgcattctgcggcatcgtgcttcacaacgctcagttatatgagacgagtctcctggagaacaaaaggaaccaggttctgctcgatttggcgagcctgatctttgaagaacagcaatcactggaggttatcctcaagaagatcgcagcgaccatcatcagcttcatgcaggttcagaaatgcacaatctttattgttgacgaggattgctctgattcattcagtagcgtgtttcacatggagtgcgaagaactcgaaaaatctagcgataccctcactcgtgaacacgatgctaacaaaataaactatatgtacgctcagtatgttaagaacacgatggagccactcaacatcccagatgtgtctaaagacaaaaggtttccatggacaaccgagaataccgggaatgtgaatcagcagtgcatccgctcgctgctttgcactcctataaaaaatggtaagaagaacaaggtcatcggcgtttgccaactggtaaataagatggaggagaatactggcaaagtcaagccgttcaataggaatgacgagcagttcctcgaggcctttgtgatcttctgcggcctggggattcagaacacccagatgtacgaggccgtggagagggcaatggcaaagcagatggtgactttggaggttcttagctatcacgcctctgctgcagaagaagaaaccagggaactacagtctcttgcggcagctgtggtcccttctgcccagacacttaaaatcacggatttctccttcagcgatttcgagttgagcgatttggagactgccctgtgcacaatcaggatgtttaccgacctcaaccttgtgcagaactttcaaatgaagcatgaagttctatgccggtggattctgtccgtcaagaagaattacagaaaaaatgtggcttatcataattggaggcacgcatttaacaccgcccaatgtatgttcgctgcgctgaaggctggaaagatccagaacaagttgaccgatctagagattctggctcttcttatcgcggcacttagccacgacttagatcacaggggcgtaaataatagttatatccagagaagtgagcatcctcttgcccagctgtactgccacagcattatggagcatcatcacttcgatcagtgccttatgatattgaactcccctggcaatcagatcctttccggactgtcaatagaggagtataaaaccacactcaagatcataaaacaggcaatactggccacagacctggccctctacatcaagcggaggggggaattctttgaactgatacggaagaaccagttcaatctggaggacccccaccagaaggagctcttcctcgcgatgctgatgaccgcctgcgacctgtccgccatcacaaagccttggcctatccagcagcgaatagctgagctggtggccacggaattcttcgaccagggagaccgtgaacggaaagagctcaacatcgagccaactgatctgatgaaccgggagaaaaaaaacaagattcccagcatgcaggttggctttatagatgcgatctgtttgcagctctacgaagccttgacccacgtgtctgaggactgcttcccgcttctcgacgggtgccgaaaaaataggcagaagtggcaggccctggccgagcagcaggaaaagatgctcattaacggtgagtcaggacaagccaaaagaaactag

SEQ ID NO: 199344 - DNA, 2628 bp, synthetic construct
  misc_feature 1..2628: note = Description of Artificial Sequence: Synthetic coding sequence
  source 1..2628: mol_type = other DNA
atggagcgggccggccccagcttcggccagcagcggcagcagcagcagcctcaacaacagaagcaacagcaacgtgatcaagattccgtggaggcctggttagacgatcattgggattttactttttcatattttgtgcgaaaggcgacgagagagatggttaatgcatggtttgcggaacgtgtccacaccatccctgtttgtaaagaggggattagagggcataccgaatcctgtagttgccctctccagcagtcccctagagcggataactccgcccccggaacacctaccaggaagatctcggcatctgagttcgatagaccattgcgccctattgtggtgaaagactcagagggaaccgtgtcctttctctctgactctgaaaaaaaggagcagatgccccttactcctccacgctttgaccacgacgagggggaccagtgctctcggctcctggagctggttaaggatataagtagccacttggacgtgactgccctttgccacaagatctttcttcacattcacgggctgatatccgcggatcgctatagtctgtttttagtgtgtgaagattcctctaacgacaagtttctaattagtcgccttttcgacgtagcagaaggctccacactcgaagaggtgtctaacaactgtatccgcctggagtggaataaaggcatcgtcggccacgtcgccgctctcggagaacctctgaacatcaaagatgcctacgaggacccccgttttaatgcagaggtggaccaaatcacagggtataagacacagtccattctctgcatgccgattaagaaccaccgtgaagaggtggtcggggtggctcaagccatcaataaaaaatctggaaacggaggtactttcacagaaaaagatgagaaagatttcgcagcctacctggcattttgtggaatagtgcttcacaacgctcaactctacgagacaagtctcctggaaaataagcgcaaccaagttctgttggatctggcatctctaatttttgaagagcagcaatctctggaagtgattctgaagaaaatcgcagccacgattatctcttttatgcaggttcagaaatgtaccatcttcattgtcgatgaggactgcagcgacagtttctcgtccgtgttccatatggaatgtgaggagttggagaagagtagtgatacactgacgcgcgagcacgacgccaacaagatcaattacatgtacgcccagtacgtaaagaacacaatggagcccctgaatattcctgacgtctcaaaggacaagcggttcccatggaccactgagaataccggcaatgtgaatcagcaatgtattaggagcctgctgtgtaccccgataaaaaatggaaaaaagaataaagtgataggggtatgccagttggtgaataagatggaggaaaataccggaaaggttaagccttttaatagaaacgatgagcaattcctcgaagctttcgtgatcttttgcgggctgggcatacagaacacacaaatgtatgaagctgtggaacgagctatggctaagcagatggtgactctcgaagtccttagttaccacgcttccgctgcagaggaagaaacaagggaacttcagagcctggcagcggctgtggtgcccagcgcgcagacccttaagatcacagacttttccttttctgattttgagctgagcgatcttgaaactgcactatgtacaattcgaatgtttacagatctgaatcttgtccagaatttccagatgaagcatgaagtgctgtgtaggtggattctgtccgtcaaaaagaactatagaaagaacgtcgcttaccacaactggcggcacgccttcaacacggcgcagtgtatgttcgcggctctgaaggccggaaagatccagaacaagctcactgatctggaaatcctcgctctcctgatcgcggcccttagccatgatctggatcataggggcgtcaataactcttacattcagagaagcgagcatccattagctcagctttattgtcatagcatcatggaacatcaccacttcgaccaatgtttgatgattctgaacagtccgggtaatcagatcctgagcggtctgagtatcgaggaatataagaccacactgaaaatcattaagcaagcgattctggctacagatctcgctctgtatataaaacgacgcggtgaattcttcgagttaatccgcaaaaaccagttcaatctggaggacccgcaccaaaaagagctctttctggcaatgctcatgactgcatgcgatctgagtgctattacaaagccctggcccatccagcagagaattgcagagctcgtcgccaccgagtttttcgaccaaggtgaccgggagcgaaaggaactcaacatcgagcctacagacctgatgaaccgggaaaagaaaaataagatacctagcatgcaggtggggtttatagacgcaatatgtcttcagttgtacgaggcattgactcatgtgtctgaggactgctttcctttgctggacgggtgccgtaaaaatcgccagaagtggcaagctcttgctgagcagcaggagaaaatgctgatcaacggcgagagcgggcaggctaaacggaactag

SEQ ID NO: 199345 - DNA, 2472 bp, synthetic construct
  misc_feature 1..2472: note = Description of Artificial Sequence: Synthetic coding sequence
  source 1..2472: mol_type = other DNA
atggtgaacgcctggttcgccgagcgggtgcacaccatccccgtgtgtaaagaagggatacgaggccacacagagagctgctcttgtccactgcagcagagccctagagcagacaactcggctccaggtacccccactcgaaagatatctgcctctgagtttgaccgtcccctccgcccgattgttgtgaaagactccgagggaactgtgtcattcttatcagacagtgagaagaaagagcagatgcctctgacgcctccacgctttgaccatgacgaaggtgatcagtgcagccgcctactggagcttgtaaaagacattagttctcatttggacgtgactgcactctgtcacaaaattttccttcacatacatgggctgatttctgccgacaggtatagcttgtttttagtgtgcgaagactcctctaatgacaaattcctgatttccaggctgtttgacgtagctgagggaagtactctcgaggaagtcagcaacaattgtatacgtctggagtggaacaagggaatcgtggggcatgtggctgccctcggggagcccctgaacataaaagatgcctacgaagaccctagatttaatgctgaggttgaccaaattacaggctacaagacccagagcatcctgtgtatgcctattaaaaaccaccgcgaagaagtggtgggcgtggcacaggccattaataagaagagcgggaatggaggcaccttcacagaaaaagacgagaaggactttgctgcatacctggcattctgtgggatcgttctgcacaacgcccagttatacgagacaagcttattagaaaataaaagaaatcaagtgcttctggacctcgcctctttgattttcgaagaacagcagtctctcgaggttatcctgaaaaagattgccgccacaatcatttcattcatgcaagtacagaagtgtaccatcttcatcgttgacgaggattgctctgactcattctcgtccgtgtttcacatggagtgcgaagagctggagaaaagctcagacactctaacacgggagcacgacgcaaacaagataaattacatgtacgcgcaatatgtcaaaaatacgatggaaccactgaatatccccgatgtgagtaaggacaagagattcccctggacgactgagaacacaggcaatgtgaatcaacagtgcatacgcagtctgttgtgtacccccatcaaaaacgggaaaaagaataaggtgatcggagtgtgccagctggttaacaagatggaagaaaacaccggaaaagtgaaacccttcaatcgtaacgatgagcagtttctggaggcctttgtgattttctgtggactcgggattcagaacactcagatgtacgaggcagtagagagagccatggccaagcagatggtgacgctggaagtcttgagctaccacgccagtgctgctgaagaggaaacacgagaattgcagagtctggccgccgcagtggtgccatccgctcagaccctgaagattacagatttctcgttctcagacttcgagctaagcgacctcgaaaccgctctgtgcacaattaggatgttcacagacctcaacctcgtccagaatttccagatgaagcatgaagtcctgtgcaggtggattctcagcgtgaagaagaactaccggaaaaacgttgcatatcacaactggaggcatgcattcaataccgcccagtgtatgttcgcggcgctaaaagccgggaagattcagaataaactgactgatttggagattctggcattgttaatcgccgccctctcccacgacttggatcaccggggtgtcaacaacagttacatccagcgtagtgaacatcctcttgcccagctttactgtcacagcattatggaacaccatcacttcgaccagtgcctcatgatcctgaactcacccggaaaccaaatcctgtccggactttccattgaggagtacaaaacaacactgaagataatcaagcaagctattcttgccaccgacttggccctgtatatcaaaagaaggggagagttcttcgagttgatccggaagaaccagtttaacttggaggacccccaccagaaggaactcttcctcgccatgctgatgacagcttgtgatctctcggccatcactaagccctggcccatccagcagcgcatcgccgagcttgtggccacagaattttttgatcagggagatagggaacggaaagagctaaacatcgagccgaccgatttaatgaacagagaaaaaaaaaataagattccgagtatgcaggtggggttcatagacgccatatgcttgcagctctatgaagcccttacccatgtttcagaagactgtttccccctcttggatggatgtcgcaaaaaccggcagaagtggcaggccctggccgagcagcaggagaagatgctgatcaatggagaaagcgggcaggccaaacggaattag

SEQ ID NO: 199346 - DNA, 2583 bp, synthetic construct
  misc_feature 1..2583: note = Description of Artificial Sequence: Synthetic coding sequence
  source 1..2583: mol_type = other DNA
atgggcgaggtgaccgccgaggaggtggagaagttcctggacagcaatattgggtttgccaaacagtactacaacctccattaccgtgccaagctgatctcagacctgttaggcgcgaaggaggctgccgtggacttttctaactaccactcaccatcctctatggaggaaagtgaaatcatttttgatctcctgcgcgacttccaggagaacctacaaaccgaaaaatgcatttttaatgtgatgaagaaactttgttttcttctccaggctgaccggatgagcctgtttatgtatcgaacccggaacggtattgctgagctggcaacgaggctgtttaacgtgcataaagacgctgtactggaggactgtctggtgatgccggaccaggaaattgtcttccccctcgatatgggcatcgtcggccacgtcgctcatagcaaaaaaatagcaaacgtacctaataccgaggaagacgaacacttctgtgacttcgtggacatactcaccgaatataaaactaagaacatcctggcaagccccattatgaatggaaaggacgtggtggccataatcatggccgtgaacaaagtagacggttcacactttactaagagggatgaagaaattctcctgaagtatctgaacttcgctaatttgatcatgaaagtttaccacctgtcctatctacacaattgtgaaactagaagaggccagatcctcctctggagtggcagtaaagtgtttgaggaattgaccgatatcgaacgtcaatttcacaaagctctttatactgtgcgggcatttctgaactgcgaccggtacagtgttgggttgctcgacatgacaaaacagaaggagttttttgatgtatggcctgtgctaatgggtgaggtcccaccatatagcggtccccgtacacccgatggacgggaaattaatttttataaagtgattgactacatactccacggtaaagaagatattaaggtaatacccaaccctccacctgatcactgggctctggtcagtgggttgcccgcttacgtggcacagaacggactgatctgtaacataatgaacgccccagcggaggactttttcgccttccagaaagaaccactggatgaatcaggttggatgatcaagaatgtgctctcaatgcccatcgtcaacaaaaaagaagagatagtgggtgtagccacattctataataggaaggacgggaaaccttttgatgagatggatgagactttgatggagtcactcacgcagtttctcggttggtcagtgctcaaccctgatacctatgagtcgatgaacaagctggaaaatagaaaggacatcttccaagatatagtgaaatatcacgtgaaatgtgacaatgaagagatccaaaaaatcttgaagacgcgggaggtttacgggaaagagccctgggagtgcgaggaggaagagcttgccgagatccttcaggctgaattacctgacgcagacaagtacgaaattaataagtttcatttctccgatctcccactgactgagctcgaactggtgaaatgcggaattcagatgtactacgagctcaaggtagtggacaaattccacataccccaggaagcgcttgtgagatttatgtactccctgagcaaaggatatcgcaagattacataccacaattggcgccatggttttaatgttggacagactatgttcagcctcctggtcacaggaaagcttaaaaggtacttcactgacctcgaggccctcgccatggtgacggccgccttctgccacgacattgaccacagggggacaaacaatctgtaccagatgaaatcacaaaatccactagcaaagctgcacggtagctctattctggagcggcatcacctggaatttgggaaaaccctcctccgcgatgaatccctcaacattttccagaacctcaacagacgccagcatgaacacgccatacacatgatggatattgcaataattgctaccgatctagcgctgtacttcaagaagcgaaccatgttccagaaaattgttgaccagtcaaagacatacgaatccgagcaggaatggacccagtatatgatgctggagcaaacccgcaaggagatcgtgatggctatgatgatgactgcctgcgatctctctgcgatcaccaaaccgtgggaggtccagagtcaggttgccctgctggtggccgccgagttctgggagcagggagatctggagaggaccgtgctccagcagaacccgatcccgatgatggatagaaataaagccgatgagctccccaaattgcaggtcggatttattgacttcgtgtgtacgtttgtttataaggagttcagtagattccatgaagagatcacccctatgctggacggtattacaaataaccgaaaggagtggaaagctctggccgacgaatacgacgccaagatgaaggttcaggaggagaaaaaacagaagcaacaatccgccaagagtgccgctgcaggaaaccagccaggcgggaatcccagccccggcggcgccactacctccaaaagctgctgtattcagtag

SEQ ID NO: 199347 - DNA, 1728 bp, synthetic construct
  misc_feature 1..1728: note = Description of Artificial Sequence: Synthetic coding sequence
  source 1..1728: mol_type = other DNA
atgaccaaggagaaggagttcttcgacgtgtggagcgtgctgatgggtgagtcccaaccatatagcggcccacgcacaccggatggccgcgaaatagttttctacaaggtcattgattatgtgttacacggtaaggaagagatcaaggtgatcccaacccctagcgccgaccattgggctctcgcctcaggcctccccagctatgttgccgaaagcggattcatctgtaatatcatgaacgctagcgcggatgaaatgttcaaatttcaagagggcgctctggatgattccggctggctgattaagaatgttctgtccatgccaatcgtgaacaagaaagaagaaattgtgggcgtggctaccttctataaccgaaaagatgggaaaccctttgacgagcaggatgaagtattgatggagagcctcacccagttcctcggctggagtgtgatgaatactgacacttacgacaagatgaataagttagagaataggaaggatatcgcccaagacatggttctataccacgttaagtgtgatcgcgatgaaatccagctaatactccctaccagggctcgtttaggcaaggagcctgcggactgcgacgaagacgaactaggtgagatcctcaaagaggagttaccaggaccaaccacattcgacatctacgagttccacttttctgacttggagtgcacggagcttgacttggtgaaatgcggcatccagatgtactatgagctcggtgtggtcagaaaatttcaaatcccccaggaggtcctggttcggttcctgttctccatcagcaagggctataggcggatcacatatcacaactggaggcatggatttaatgtggctcaaaccatgttcactctgttaatgaccggcaaactgaaatcctattataccgatctggaggcttttgccatggtgaccgccggtctttgtcacgacattgaccacagagggacaaataacctttatcagatgaagagccagaatcccctggccaaactgcatggttccagcattctcgagcgccatcatcttgaattcggtaagttcttgctctctgaagaaaccctcaatatttaccagaatttaaacagacggcaacatgaacatgtcatccacctgatggacatcgccatcatcgcgaccgatctggcactttatttcaagaaacgcgcaatgtttcagaaaattgtggatgagtcgaaaaactaccaggataagaaatcatgggttgagtacctgtcactcgagaccactagaaaggaaatcgtgatggctatgatgatgaccgcttgcgacttgagcgctatcacgaaaccatgggaagtgcagagcaaggtggcgctgctggtagcagccgagttttgggagcagggagacctggagcgcacagtactcgatcaacaacctatcccaatgatggaccggaacaaggccgccgaattgcctaagctacaggttggatttatcgattttgtctgtactttcgtctacaaagagtttagccgattccacgaggaaattctgccaatgtttgataggcttcagaataacaggaaggagtggaaagccctagcggatgaatacgaagctaaggtcaaagctctagaggaaaaagaagaagaagagcgtgttgcagcaaagaaagtgggtactgaaatttgcaatggtggtcctgcaccaaagagcagcacttgctgcatcctgtag

SEQ ID NO: 199348 - DNA, 2562 bp, synthetic construct
  misc_feature 1..2562: note = Description of Artificial Sequence: Synthetic coding sequence
  source 1..2562: mol_type = other DNA
atgagcctgagcgaggagcaggcccggagcttcctggaccagaaccctgatttcgccagacagtacttcggaaagaagctttctcctgagaatgtagcagcggcctgcgaggatgggtgtcctcctgactgtgattcccttcgagatttatgccaggtggaagagtcaactgctctcttggaactcgtgcaggacatgcaggagtctattaacatggaacgtgttgtgtttaaggtgcttaggcgactttgcaccctacttcaggcagatcgatgcagcctgtttatgtacagacagcgtaatggcgtggccgagctggccacacgcctctttagcgtgcagccagattccgtcttggaagactgtttggtgcccccagactctgagatcgtgttccctttggacatcggggtggttggccatgtggctcagacaaagaagatggtgaatgtggaagatgttgcggagtgcccacactttagctccttcgccgacgaactgactgactacaagacaaagaatatgttggctacccccatcatgaacggtaaagacgtggtcgccgtgattatggctgtgaacaagctgaacggccccttctttacaagtgaagatgaggatgtgtttctcaagtatctcaatttcgctaccctttacttgaagatctatcacctgagctatctccacaactgcgaaacccggcgcggccaggtattgctgtggagtgctaataaagtctttgaagaactgactgacattgagcggcagttccacaaggcattctacactgtgcgtgcatatttgaactgtgagagatattcagtgggcctgttggacatgaccaaagagaaggagttcttcgacgtgtggtcggttctaatgggtgagagtcagccttattccggcccccgtactccagatggacgtgagatcgttttctataaagtgatcgactatgtgctccacggcaaggaggagataaaagtgatccctacaccatctgccgatcactgggcactggccagcggactcccttcctacgtggccgagtccggttttatttgcaacatcatgaatgcatcagcagatgaaatgtttaagtttcaggagggagctctggatgacagcggatggctgattaaaaatgtcctctccatgccaattgtcaacaaaaaagaggagatcgtcggagttgctactttctacaaccggaaggatggtaagcctttcgacgagcaggatgaggttctgatggaatccctcacccagttcttgggttggtctgtgatgaataccgacacctatgacaaaatgaataagttggaaaatcggaaagacattgctcaggacatggttttgtatcacgtgaaatgcgatcgcgatgaaatccagctgatcctgcccactcgagcacggctcggcaaagagcctgcagattgcgatgaggacgaacttggggagatcttgaaggaggagctccccggccctactacatttgatatttatgaattccactttagcgatttggagtgtacagagctcgatttagtgaagtgcggcatccagatgtactatgaattgggtgtggtgcgtaaattccagatcccccaagaggtgctagtaaggttcctgttttcgatttccaagggctacaggaggatcacgtatcacaattggcgccacggcttcaatgttgctcaaactatgttcactctgcttatgacagggaagctgaagtcatactataccgatctggaagcctttgcaatggtgacagcgggcctctgtcatgacattgatcaccgaggaacaaacaatctataccagatgaaaagtcaaaaccctcttgcaaagctacacgggtccagcattctagagcgccaccatctggagttcggaaagttcttactcagcgaagagactctgaatatataccagaatttaaatagaagacagcatgagcacgtgattcatttaatggatatcgcaatcatcgctaccgacctcgccctttacttcaagaaacgcgcgatgtttcaaaagatagttgatgagtccaagaactatcaggataaaaaatcatgggtcgagtacttatctctggagacgacacgaaaggagattgttatggccatgatgatgaccgcttgcgatctatcggctatcaccaaaccttgggaagtccagtctaaggtggctttacttgtggctgctgaattctgggagcagggggacctcgaacgtactgtgctggatcagcagccaatccctatgatggaccggaacaaggctgcagagctgcccaaactgcaagtcggctttatcgattttgtatgcacattcgtgtataaggaattcagccgattccatgaggagatcctgcctatgttcgatcgattacaaaataacagaaaagaatggaaggccctggccgatgagtacgaagcaaaagtgaaagctctagaagagaaagaagaagaagagagagtggcggcgaaaaaaggaaccgaaatctgcaatggcggtcctgcaccaaagagttctacttgctgtatcctttag

SEQ ID NO: 199349 - DNA, 2565 bp, synthetic construct
  misc_feature 1..2565: note = Description of Artificial Sequence: Synthetic coding sequence
  source 1..2565: mol_type = other DNA
atgagcctgagcgaggagcaggcccggagcttcctggaccagaaccccgatttcgcccgccagtattttggcaagaaactttctccagagaatgtagcagctgcctgtgaagacggttgcccccctgattgcgactccctgcgcgacctgtgtcaagtcgaggagagtaccgccctgcttgagctggtgcaggacatgcaagagtccatcaatatggaaagagtggtctttaaggtactgcgccgcttatgtaccttactgcaggcagacaggtgctccctgttcatgtaccgtcaaaggaacggggtagccgaactcgcgactcgtctgttttcagtccagccggacagcgtgctcgaagactgtctcgtacccccggactctgagattgtgtttccactggacatcggagtcgttggccatgtagcgcaaacaaaaaagatggttaatgtagaagacgtcgcggagtgcccacatttctcctcattcgcggatgagttaactgattacaagacgaaaaacatgttagctacccccatcatgaacggtaaagacgtagtggctgtcattatggccgtaaataaactaaatgggcctttcttcacgagtgaggacgaggacgtcttcctgaaatacctgaatttcgccaccctgtaccttaagatctaccatctgtcatacttacacaattgtgagacaagaaggggacaagtcctgctttggtctgctaacaaggtctttgaggagctgactgacatcgagagacaatttcacaaggccttctataccgtgagagcttatttaaattgtgagcggtattcagtaggccttctggatatgacaaaagaaaaggagttcttcgatgtttggagcgtccttatgggagaaagtcagccctactcagggccccgcaccccagacgggcgggaaatagtgttttacaaggttatcgactacgtgctccatgggaaggaagagattaaagtgatcccaacaccaagcgcagatcactgggctttggccagtggcttgccaagctatgttgcggagtccggcttcatctgcaacatcatgaacgcatctgccgatgagatgttcaagtttcaagagggagcactggacgactcaggttggctgataaagaacgtactatccatgccaattgtgaataagaaagaagagatagtgggcgtggccaccttctataatcgcaaggacggcaaaccttttgacgagcaggacgaggtgctgatggagtccctgacacagtttcttggttggtctgtcatgaatacagacacctacgataaaatgaacaagctggagaatcgtaaggacatagcccaggacatggttttgtaccacgttaagtgcgatcgcgatgagatccagcttatccttcccaccagggccagactgggcaaggagccagccgattgtgatgaggatgaactcggagagatcctgaaagaggagctccctggcccgaccactttcgacatctacgaattccactttagtgatctcgagtgtacggagctagacctggttaagtgcggaatccagatgtactatgagctgggggtggtgcgcaaattccaaattcctcaggaagtgctggttcggtttctgttttctataagcaaggggtatagacgaattacctatcataactggaggcacggtttcaatgtcgctcagaccatgttcactctactgatgacgggcaaactgaagtcatactacaccgacctcgaggcattcgctatggtgacagcgggcctgtgccatgatatcgatcataggggtacaaataatctgtaccaaatgaaaagccagaatcctctcgctaaactgcacgggtctagcatactggaacgccatcaccttgaattcggtaaatttcttctctccgaagagacactgaacatatatcaaaaccttaacaggcgtcaacacgagcacgttattcacctgatggatattgccattatcgcaactgatttggccctgtattttaagaagcgtgctatgttccagaaaatcgtggatgagagcaaaaactaccaggataagaaatcatgggtcgaatatctgtctctagagaccacacgaaaggagattgtgatggccatgatgatgacagcttgtgacctttcagctatcaccaaaccctgggaggtacagagcaaggtggccttgctggtcgccgcggaattctgggagcagggggaccttgagaggactgtgctcgatcagcaacctattccaatgatggatagaaataaagccgctgagttgccaaagctgcaggtgggcttcattgactttgtgtgtacattcgtatacaaagagttcagtaggttccatgaggaaatactgccaatgttcgatcgcctgcagaacaataggaaggagtggaaggccctcgccgatgaatatgaggcaaaagtgaaagcccttgaagaaaaggaagaggaagagcgggtggccgcaaagaaggtcggaaccgagatatgcaatggaggaccggccccaaagagcagcacttgttgcatcctttag

SEQ ID NO: 199350 - DNA, 2577 bp, synthetic construct
  misc_feature 1..2577: note = Description of Artificial Sequence: Synthetic coding sequence
  source 1..2577: mol_type = other DNA
atgggcgagatcaaccaggtggccgtggagaagtacctggaggagaacccgcagtttgcgaaggagtactttgatcgcaagttgcgtgtagaggtgctaggggaaatcttcaaaaacagccaggtgccagtgcaaagcagcatgagtttcagcgagctcacgcaggtcgaggagtccgcactgtgccttgagctcctttggacagtgcaggaggaaggaggtaccccggagcagggagtgcacagggctctccagcggttggctcacctccttcaagcggatcgctgcagcatgttcctctgcagatcccgcaatggtatccccgaggtggcaagcagactgctcgatgtgacgcccacctcaaagttcgaggataatcttgtaggccctgacaaagaggtggtgttcccccttgacataggcatcgttggctgggccgcgcacacaaagaagactcataacgtgcccgatgtgaagaaaaacagtcattttagcgactttatggacaagcagacaggatatgtaaccaagaaccttttggctacgccaatcgtagttggaaaagaggttttagctgtgatcatggccgttaacaaagtgaacgcttctgagtttagcaaacaggatgaagaagtcttttctaagtaccttaatttcgtgagcattattttaaggctacaccacaccagctatatgtataatatagagtcaaggcgctctcagatcttgatgtggtcagcgaacaaagtcttcgaggaactcaccgatgtagaacggcagtttcataaagctctatatacagtgcgcagttatctgaactgtgagcggtatagcattggccttctggatatgaccaaagagaaagagttttatgacgagtggcctatcaagctcggagaggttgaaccttacaagggcccgaagactcccgacggccgagaagttaacttttacaagatcatagattatattctgcacgggaaagaggagatcaaggtgattcctacgcccccagcggaccactggacacttatttctgggctccctacctatgtggcagaaaatggctttatctgtaatatgatgaacgcccccgccgatgaatacttcaccttccagaagggacccgtggatgaaaccggttgggttataaaaaacgtactgtcgcttcctattgttaataaaaaagaagatatagtgggtgtcgcaaccttctacaatcggaaggatggcaaacctttcgatgagcatgacgagtatatcaccgagactttaacacagtttttggggtggagcctcctgaacaccgatacttatgacaaaatgaacaagctcgagaaccgtaaggacatagctcaggaaatgctgatgaatcagacgaaagcgacccccgaagagatcaagtctatcctgaaatttcaggaaaagttgaatgtcgacgtgatcgatgactgcgaagaaaagcaactggttgccattctgaaggaagatctccccgatccgaggagcgctgagttgtatgaattcaggttcagcgacttcccactcaccgaacacggcctaattaagtgcgggatcagactgttctttgaaataaacgtcgtcgagaagtttaaggtgccagtggaggtccttacaagatggatgtatacggtccgaaagggttacagggcagttacctatcacaattggcggcatgggtttaatgtggggcagacaatgttcaccctcctgatgactggtcgcctaaaaaaatattatacagatttagaggcgtttgcgatgctggccgctgcattttgtcatgacatcgaccatagaggcacaaataatctgtatcagatgaagtctacttctccactggctaggctgcacggctccagcattcttgaaaggcatcatctggaatactctaagacattgttgcaggacgagagcctcaacatcttccagaacctgaataagagacagtttgagacagtaatccacctgttcgaagtggccataatcgccacagacctggccttgtattttaagaagaggacaatgtttcagaaaatagtcgacgcatgtgaacaaatgcaaacagaggaagaggctatcaaatacgtcaccgtggaccccactaaaaaggagattatcatggccatgatgatgaccgcctgcgatctgtccgcaatcaccaagccgtgggaggtccaaagtcaggtggctctgatggtggcaaacgaattttgggaacagggcgatctggagcgcactgtgctacaacaacagccaattcctatgatggaccgcaataaaagagacgaactgccgaagctgcaggtgggattcatcgatttcgtttgcactttcgtctataaggagtttagtcgctttcacaaggagataacccccatgctgtcgggacttcagaacaacagggtggagtggaaatcccttgccgacgaatacgatgcaaaaatgaaagtcatcgaagaggaagctaaaaagcaggaagggggggccgagaaagcagctgaggactccggcggaggcgatgacaagaaaagtaagacgtgcctgatgctttag

SEQ ID NO: 199351 - DNA, 453 bp, synthetic construct
  misc_feature 1..453: note = Description of Artificial Sequence: Synthetic coding sequence
  source 1..453: mol_type = other DNA
atgagcgccaaggacgagcgggcccgggagatcctgcggggcttcaagttgaattggatgaatctgcgtgacgccgagaccgggaagatactatggcaggggaccgaggatttatccgtccccggggttgaacacgaagctagagtcccaaagaagattctaaagtgtaaggccgtgtctagggagcttaacttctcatccaccgaacagatggagaagtttcggttggagcagaaggtgtactttaaagggcaatgcctcgaggagtggtttttcgagttcgggtttgtcattccgaactctaccaatacctggcagtccctgattgaagccgcccctgagtcccaaatgatgccagcttctgtgttgaccggaaacgtgataattgagaccaagtttttcgacgacgatctgttagtttccactagccgggttagacttttctacgtgtag

SEQ ID NO: 199352 - DNA, 414 bp, synthetic construct
  misc_feature 1..414: note = Description of Artificial Sequence: Synthetic coding sequence
  source 1..414: mol_type = other DNA
atgaagcagcgggacaagggccggggctggcaccccgccgagggcggccctgccctgactgcacagccccctgagacacgccccgccctggacaggagccggcgggaatccaggagtcagggctgtagaggcgtgtctgtcagcctcactatgaatctggagccccccaaagcagaatttcgatccgccacccgtgtagcgggcggaccagtgactcctaggaaggggcctccaaaattcaaacaaaggcaaactcgccagtttaagtctaagccaccgaaaaaaggggtgcaggggtttggcgacgacattcctggcatggagggtctcggcacagatatcactgttatttgtccatgggaggcttttaaccacctggaattgcacgaattggcacaatacggaatcatctag

SEQ ID NO: 199353 - DNA, 264 bp, synthetic construct
  misc_feature 1..264: note = Description of Artificial Sequence: Synthetic coding sequence
  source 1..264: mol_type = other DNA
atgaacctggagccccccaaggccgagttccggagcgccacccgggtggccggaggacccgttacaccccgcaaggggccgcctaagttcaaacagagacagacaagacagttcaagtcaaagccacctaaaaagggcgtgcaggggtttggcgacgatatccccggcatggaaggactaggaacagacatcacagtcatctgcccatgggaggccttcaatcatctcgaactgcatgagctggcccagtatggaattatatag

SEQ ID NO: 199354 - DNA, 252 bp, synthetic construct
  misc_feature 1..252: note = Description of Artificial Sequence: Synthetic coding sequence
  source 1..252: mol_type = other DNA
atgagcgacaacaccaccctgcccgcccccgccagcaaccagggccctacaacccctaggaaaggccccccgaagtttaaacagcggcagactcgccagtttaagagtaaaccacctaagaaaggtgtcaaaggatttggggatgatatccctgggatggagggactcggtaccgacatcactgtcatttgtccatgggaggccttttcccacctcgaattacacgagctcgcgcaattcggcatcatttag

SEQ ID NO: 199355 - DNA, 1371 bp, synthetic construct
  misc_feature 1..1371: note = Description of Artificial Sequence: Synthetic coding sequence
  source 1..1371: mol_type = other DNA
atgggcatcaccctgatctggtgcctggccctggtgctgatcaagtggattacctctaagcgacgcggagccatatcctacgacagcagcgatcaaactgccctgtatattagaatgcttggagacgtgagggtccggagcagagcgggatttgagtccgagcggagaggctcacatccttacattgactttcgaatctttcattctcagagtgagatcgaggtgagtgtatcagcgagaaacatccggagattgttgtcttttcagcgctatttacggagttctcgcttttttaggggaaccgctgtgtccaacagcctgaacatcttggatgacgactataatggacaggccaagtgcatgctggagaaagttggcaactggaacttcgatatctttctattcgataggctgacgaatggaaattcactggtcagcctgacattccacctctttagcctccacgggcttattgagtacttccatttggacatgatgaagctcagaaggttcctggttatgatacaagaggattatcacagccagaacccataccataatgccgtgcatgccgcggatgtgacccaggccatgcactgttatctgaaggaacctaaacttgctaatagtgtaactccctgggacatactgctgtccctcattgcagcagctacccacgacctcgatcatcccggagtaaatcagccatttttgatcaaaactaatcactatctggccacactatataagaatacatctgtgcttgagaatcaccattggagaagcgctgtcggtctcctccgggagagtgggctcttcagccacctaccgctggagtcccggcagcagatggaaactcagatcggcgcattgatcctagccaccgacatttcccgacagaatgaatatctcagcttattccggtctcatctggacagaggcgacctttgtctagaggacacccgccaccgacatctggtgttacagatggctctcaaatgcgccgacatctgtaatccctgccgtacgtgggagctctcaaagcagtggtccgagaaggttaccgaggagttttttcaccagggagacattgagaaaaaataccacctgggggtttcccctctctgtgatcgtcacaccgagagcattgctaatatccagattggttttatgacctacctggtcgagcccttgttcacagaatgggcccgtttctctaacacgcggttgagccagacaatgttgggtcacgtcggcttaaacaaggcttcttggaagggcctccagcgagaacagagctccagtgaggatactgacgccgcctttgagctcaatagccaacttctgccccaagagaaccggctgtcctag

SEQ ID NO: 199356 - DNA, 1275 bp, synthetic construct
  misc_feature 1..1275: note = Description of Artificial Sequence: Synthetic coding sequence
  source 1..1275: mol_type = other DNA
atggaggtgtgctaccagctgcccgtgctgcccctggaccggcccgtccctcagcatgttttgtcgcggaggggcgccatatcttttagttcctcctccgcattattcgggtgcccaaaccctcggcagttatctcaacgtcgcggcgccatctcctacgacagctctgaccaaacagccctctacattcgaatgctgggagatgtcagggtacgaagcagagctggatttgaatccgagagaagaggatctcacccatacatagactttaggatctttcactcccaatctgaaatcgaagttagcgtgagcgctagaaatatccgcaggctcctctcgtttcagagatatctcaggtcttctagattcttcagaggaacagccgtttcaaactcgctcaatatcctggatgatgactataacggtcaggcgaagtgcatgctggaaaaagtcgggaattggaatttcgatatctttcttttcgacaggctgactaacggcaattccttagtttctctaacattccacctgttcagcctacacggactcatagagtattttcatttggatatgatgaagctgaggcggtttcttgtgatgattcaggaggactatcatagccaaaacccataccataatgcagtccacgccgctgacgtcacacaagctatgcactgctatctgaaagagccaaagttggcgaatagcgtcacaccctgggatatcctcctgtccctcatcgcagctgccacacacgatctcgaccatcctggagtgaaccaacctttcctgatcaaaactaatcactatctggctacactatacaagaatacgtctgtcctggagaaccatcattggcgaagtgctgtcggcctcctgagggagtctggtctgttttcccacctccccctggagagtcgccagcaaatggagacacaaatcggcgcgctcatactggctaccgatatcagccgccagaatgagtacctgagcctgtttagaagccatctggatagaggagacctgtgcctagaggacacacgccatcgtcacctcgttcttcagatggcgttgaagtgcgccgacatttgtaatccctgtaggacatgggaactgagtaaacagtggtcagaaaaggtgaccgaggagttttttcatcagggggatattgagaaaaaataccatctcggagtgtctccactttgtgaccgccatactgaatccattgctaatatccagattggcaattatacgtacctggatatcgccggctag

SEQ ID NO: 199357 - DNA, 1449 bp, synthetic construct
  misc_feature 1..1449: note = Description of Artificial Sequence: Synthetic coding sequence
  source 1..1449: mol_type = other DNA
atggaggtgtgctaccagctgcccgtgctgcccctggaccggcccgtgcctcaacacgtccttagtaggagaggtgctatttccttcagttcctcctccgccctatttggctgtccaaatcccagacagttatctcagcgtcgcggtgcaatcagctatgacagcagcgaccagacggcgctgtacatcagaatgctgggagacgtcagggtgcggtcccgggcaggattcgaatctgaaagacgcggctcccacccttacatcgatttccgaatttttcactcccagtctgagattgaagttagtgtgagcgcccggaacatccgccgcctgctcagcttccagcgatatttaaggtcatccagattcttccgtggtactgctgtctctaattccctgaacatattggatgacgattacaatggacaggctaaatgcatgctggagaaggtgggcaactggaactttgacatcttcttattcgatagacttaccaatggtaatagtttagtgtccctgaccttccacctgttctctctccatggcctcatagagtactttcatttggacatgatgaaacttcggcgtttcctcgtgatgatccaggaggactatcattcacagaacccctatcacaacgccgtgcatgctgctgatgtcacccaagctatgcactgctacctcaaagaacctaagctggcgaatagcgtgactccttgggatatattactgtccctgattgctgccgcaacccacgatttagaccatcccggggtgaaccagcctttcctgataaagaccaaccactatcttgccaccctttacaagaatacgagcgtgttggagaaccatcattggagatcagccgtgggcctcctgcgagagagtggcttgttctcgcatcttcctctggagtcaaggcagcagatggagactcaaattggcgcactaatactggctactgatatctcacggcagaatgaatacctctcactgttccgctcgcatcttgacagaggtgacctgtgcctggaggacaccaggcatcgtcatctggtactgcagatggcattaaagtgtgccgacatttgtaatccttgtagaacctgggagctctcaaaacagtggtccgaaaaggtgaccgaggaatttttccaccagggggacatagagaagaagtaccacctcggagtgagcccgctgtgtgacaggcataccgagtccattgccaacattcaaataggcttcatgacatacctcgtcgagccattgtttactgagtgggcaagattcagcaatactcggttgagccagaccatgctgggtcacgttggcctgaataaggcatcgtggaaggggctccaaagggaacaaagtagctccgaggacacggacgcagccttcgaattgaactcacagctcttaccacaagaaaaccgattatcatag

SEQ ID NO: 199358 - DNA, 2490 bp, synthetic construct
  misc_feature 1..2490: note = Description of Artificial Sequence: Synthetic coding sequence
  source 1..2490: mol_type = other DNA
atgggctgcgcccccagcatccacatcagcgagcggctggtggccgaggacgcaccctcacctgcggctcctccgttatcctccggcggacctagactgccacaggggcagaagaccgcggctctgccacggactcggggagccggattgctggaatcagaacttcgcgatgggtccggaaagaaggtcgctgttgcagacgtgcagtttggccctatgagatttcaccaggatcagctacaagttcttctcgtgtttaccaaggaggataaccagtgcaacggcttctgtagagcctgtgaaaaagcaggattcaaatgcactgtgacaaaggaagcacaggccgtgctagcttgttttctggacaaacatcacgatataatcattatcgaccatagaaaccccaggcagttggacgcagaggccttgtgtcggtctattaggtcctccaaactgagcgagaacaccgtcatcgtcggggtcgtccgccgagtggatagagaagagctttccgtaatgccctttattagcgcaggctttacccggcgctatgtggagaatcccaatatcatggcttgctataatgaattgctccagctggaatttggagaggtgaggtcacagctcaagctcagagcctgtaattccgtctttaccgccttagagaactcagaagacgcgatcgaaatcacatcggaggacaggtttatccagtatgctaatcccgcattcgaaaccaccatggggtaccagagcggagaacttataggcaaagagttaggggaggtgccaatcaacgagaagaaggcagatctgctggacacaattaattcctgcatacgaatcgggaaggagtggcagggtatttactatgccaagaagaaaaacggagacaatattcagcagaacgtgaagattataccagttattggccagggcggcaaaatccggcactacgtctctattatcagagtttgcaatgggaacaataaagcagagaaaattagtgaatgtgtgcagagcgacacccatacagataatcaaaccgggaaacacaaggaccgacgcaaaggcagcttggacgtgaaggcagtcgcttcgcgagctactgaggtatcgtcacaacgtcggcacagctcaatggcgcgtatccactctatgacaatcgaggcacctattacaaaggttataaatatcatcaacgccgcacaggagagttcacccatgccagtgacagaagcgctcgaccgcgtcctcgagatcttgaggaccacagagctttatagccctcagtttggggccaaggacgacgatccacatgctaatgacttggtggggggattaatgagcgatggattaagaagactgtctggaaacgaatatgtcctgtcgaccaaaaatacgcagatggtgagctctaacattattacacctatctcgctggatgacgtgccgccgcggatagctcgggcgatggaaaatgaggaatactgggatttcgatatcttcgaacttgaagcagcaactcacaatagaccgctcatatatttaggactcaaaatgttcgctcggtttggaatttgtgagttcctccattgttcggagtccaccctaaggagctggttgcagatcattgaagccaactatcactctagcaatccttatcacaactctacccatagtgccgacgtgctgcatgctacggcatacttcctgagtaaagagaggattaaggaaacactcgatcccatcgatgaggtcgcggccctcatcgcggccacgatccacgacgtagatcaccctggaaggaccaacagcttcctttgtaatgcaggaagcgagctggctattctttataacgataccgccgtcctcgaatcacatcacgctgcgcttgcctttcagctgacaactggagacgacaaatgtaacatttttaagaatatggaacgcaatgattaccggaccttgcgtcagggcatcattgacatggtattggcgacagagatgactaagcactttgaacatgtgaataaatttgtgaattcaatcaataaaccactcgctaccttggaagaaaatggggagactgataagaatcaggaggttatcaacaccatgcttagaacacctgaaaaccggactttgataaagcggatgctcatcaaatgtgctgacgtatctaatccatgtcgcccacttcagtattgcattgaatgggctgcccgcataagcgaggagtatttttcccagaccgacgaggagaaacaacaaggattacctgtggtgatgcctgtgtttgataggaatacttgcagtattccaaaaagccagatttctttcatcgactatttcataaccgacatgtttgatgcctgggatgcgtttgttgatctgccagatctcatgcagcacctcgacaataatttcaaatattggaaggggctggacgagatgaaactgcgcaatttacgtcccccacctgaatag

SEQ ID NO: 199359 - DNA, 2352 bp, synthetic construct
  misc_feature 1..2352: note = Description of Artificial Sequence: Synthetic coding sequence
  source 1..2352: mol_type = other DNA
atgggctgcgcccccagcatccacatcagcgagcggctggtggccgaagacgcgccaagcccagccgcccccccactgtcaagcgggggaccaaggctaccacagggacagaaaactgctgctctgcctcgcactcgaggcgcgggcctcctggaatcagagctccgcgatggctccggcaaaaaagttgctgtcgctgatgtacagttcgggcccatgagattccaccaggatcagctacaggttctgctcgtgttcaccaaggaggataatcagtgcaacgggttttgtagggcttgcgagaaggctgggtttaagtgtacagtcacaaaagaggcacaagcagtgctggcctgttttcttgacaagcaccacgatattattatcatcgaccaccggaatcctaggcagttggacgccgaggcactgtgccgaagcatacgcagtagcaagctcagtgaaaataccgtgatcgtgggtgtggtaagacgagttgatagagaggaactttccgtaatgccttttatctcggccggcttcactagaagatatgtggaaaaccccaacattatggcttgctataatgaactactgcagttagaattcggcgaggtgcggagtcagttgaaattgcgagcatgcaactctgtgtttacggcactagagaacagcgaggacgcaattgaaataacctccgaagatagatttatacaggaatggcaaggcatctactatgccaagaagaagaatggggataatatccagcagaacgttaagatcataccagtgatcggtcaggggggcaagatccgccactatgtgtctatcatccgggtgtgcaacggcaataacaaggccgagaaaatttcagagtgcgttcagtccgacacccacaccgacaaccagacagggaaacacaaggatcgccgcaaggggtccctggatgtgaaagcagtagctagcagggcaaccgaagtatcttcccagcgacgtcactccagtatggccagaatccactccatgaccatcgaagcaccgatcaccaaggttatcaatattatcaacgccgctcaggaatcttcgcctatgcctgtgacggaggccctggatcgggtgctggagatcctgagaacaaccgagctgtacagcccacagttcggagcgaaggacgatgatcctcacgcgaatgacttagtgggtggcctgatgagtgacggactccggcgtctgtctggaaatgagtatgtgctctccaccaaaaacactcagatggtcagtagcaacattatcacgcccatctctctagacgacgtgcctcctcggattgcaagggccatggagaatgaagaatattgggatttcgacattttcgagctcgaggccgcgacccacaaccggccactgatttacctggggttaaagatgtttgcacggttcggcatctgcgagtttttgcactgctctgagtcgacactcaggtcatggctgcagattatcgaggccaactatcacagtagcaacccttatcataactccacgcattcagcagatgtgctgcacgctacagcttattttcttagtaaagagagaataaaagagaccttggacccaatcgatgaagtggctgctctgattgcggctaccatccacgatgtggaccacccaggacgcaccaacagcttcctttgtaatgccgggtccgaactagccatcctgtacaacgataccgcggtgctggagtcacaccacgctgctttagcatttcagttgacaaccggagacgataagtgtaatatctttaaaaacatggaacgcaatgactacagaactctgcgccagggcattattgacatggttctggcaacggagatgacaaagcattttgagcacgtgaacaaattcgttaatagtatcaacaagccactggctacgctcgaggagaacggagagacagacaaaaatcaggaggttattaacacaatgctgaggactccagagaatcgcacacttatcaaacggatgcttattaagtgcgccgatgtttcaaacccttgtcgtcctctgcaatactgcattgagtgggcagccaggatttcggaggagtacttcagccaaacagacgaagagaagcaacaagggctgccagtcgtcatgcctgtattcgatcggaatacatgcagtatacctaagtctcaaatcagtttcatcgactattttatcaccgacatgtttgacgcctgggacgctttcgtggacttgcccgacctgatgcaacacctggataataacttcaagtactggaaggggctggacgaaatgaaacttcgaaacttacgcccccctcccgagtag

SEQ ID NO: 199360 - DNA, 2490 bp, synthetic construct
  misc_feature 1..2490: note = Description of Artificial Sequence: Synthetic coding sequence
  source 1..2490: mol_type = other DNA
atgggctgcgcccccagcatccacatcagcgagcggctggtggccgaggacgctcctagcccagccgccccgcctttaagcagcggcggccctcgtcttccacagggtcagaagaccgccgccctgccgcgcaccagaggcgccgggctcctcgagagcgaattgcgtgacggcagtgggaaaaaggtagctgtggcagacgtccagtttgggccaatgcgcttccaccaggatcaactgcaggtgttactggtgtttactaaagaggataaccaatgcaacggcttctgccgggcctgcgagaaagcgggtttcaaatgcacagtgactaaagaagctcaagccgtgctggcctgctttctggacaagcaccatgacatcattattatagatcacagaaacccacgacagctggacgcagaagcactctgtagatccatacggagctctaagttgtccgaaaatactgttatcgtaggggtcgtgaggcgcgtggatagagaggagctgtcagtgatgccattcatttcggccggatttactaggagatatgtcgagaaccctaacatcatggcttgttacaatgagctgttgcaacttgaatttggcgaggtgcgcagccaactcaagctgagggcatgcaatagcgtttttactgcattagagaattctgaggatgccatcgaaattacctccgaagaccggtttatccaatacgcaaatcccgctttcgaaacgaccatgggctaccagtcaggagagcttattggtaaggagctcggggaggtccctatcaatgaaaaaaaggcggacttgttagatacaatcaactcttgtattagaattgggaaggagtggcagggcatttactatgcgaaaaaaaaaaatggtgacaacatccagcagaatgttaagattatccctgtaatcggacaaggaggcaagatacgacactatgtgtctataatccgagtgtgcaatggcaacaataaggcggaaaaaatctcagaatgtgtgcagtccgacacccatacggacaatcagaccgggaaacataaggatcgccgtaagggcagtcttgacgttaaggcagtagcaagtagagctacagaggtgagcagccagaggaggcactcatcaatggcaaggatacacagtatgacgattgaagcgcctatcaccaaagtgatcaatatcattaacgctgcccaggagtcatcccccatgcctgtcacagaagccctggaccgcgtcttggaaattctgaggacgaccgaattgtattcacctcagttcggagccaaagatgacgatccgcatgctaatgacctcgtgggagggcttatgtctgatggacttcggaggttgagtggtaacgaatatgtgctttctaccaagaatacccagatggtgagctcgaatattattacacctatcagtctggacgatgtgcccccaaggatagccagggcgatggagaacgaggagtactgggattttgacatttttgagctggaggccgctacacataacaggccactgatttatcttggactgaagatgtttgctagatttggaatctgtgagttcctacactgtagcgaatccaccttgagatcctggcttcagatcatcgaagccaactaccactccagcaatccctatcacaacagtactcactccgctgatgttctgcacgctaccgcttattttctaagcaaagagcgtatcaaagagacacttgatcccattgatgaggtcgcagccctcatagctgccaccattcatgatgtcgaccatccgggaaggaccaacagtttcttatgtaacgcaggttccgagctggcaatactctataacgataccgcggtactcgagtcgcaccatgcagcccttgccttccagctgaccacaggggacgataaatgcaatatcttcaagaatatggaacgcaacgactatcgaactctcaggcaggggattatcgacatggtgctggccactgagatgacaaaacacttcgagcatgtcaataaattcgtgaacagcatcaataagcccctggctacactcgaagagaacggtgagaccgacaagaatcaggaagtgattaacacaatgctgcgcacccccgaaaaccggacgctcatcaaaaggatgttaatcaagtgtgcagacgtctcaaacccctgtcggccattacagtattgtattgagtgggccgcccgcatctctgaagagtatttcagtcagaccgacgaggagaagcaacagggcttgcccgtggtgatgcccgtgttcgaccggaacacatgctctattcctaagtcccagatttccttcattgactatttcatcaccgatatgtttgatgcgtgggacgcctttgtcgatctgccagacctgatgcagcatctggacaataactttaagtattggaaaggtttggacgaaatgaaactacgcaacttgcgccccccgcccgaatag

SEQ ID NO: 199361 - DNA, 2274 bp, synthetic construct
  misc_feature 1..2274: note = Description of Artificial Sequence: Synthetic coding sequence
  source 1..2274: mol_type = other DNA
atgcggttccaccaggaccagctgcaggtgctgctggtgttcaccaaggaagacaaccaatgcaacggcttttgccgagcttgtgagaaggctggctttaaatgtacagtgactaaggaggcccaagctgtgttggcctgcttcttggataaacaccatgacattattatcattgatcacagaaatccaaggcagttagatgctgaagccctatgtcgatcaataagaagctcaaaactgtccgaaaacaccgtgatcgtgggggttgtcaggagggtagatagggaggagctgtccgtaatgccgttcatcagcgctggcttcacaagaaggtatgtagagaatcctaacatcatggcgtgctataacgagctgctgcagttggaatttggagaagtgcggagccagctaaaactccgggcgtgcaactcagtatttaccgctctcgagaactcagaggacgccatcgaaattacatccgaggataggttcattcagtatgcaaaccccgcgttcgagaccacaatgggatatcaaagcggagagctgatcggcaaggagttgggggaggtgcctatcaacgagaagaaagccgatcttttggacactatcaattcgtgcattcggattggcaaagaatggcaaggcatatactatgcaaagaagaagaacggggacaatatccagcaaaatgtcaagatcatacccgtgatcgggcaggggggaaagattcggcactacgtctccattatcagggtatgcaatggaaataacaaggctgagaagatcagcgagtgtgttcagagcgacacccatactgataatcagaccggaaagcacaaagacagacgtaaggggtccctcgacgtgaaggcggtggcatccagggccacagaagtgtcctctcagaggcgccactcctctatggcccgcatccactcaatgaccatagaggcacccatcaccaaggtaattaacattatcaacgcggcccaagagagttccccgatgcccgtgactgaagccctggatcgcgtgctagagattttaagaacgaccgagctctattctcctcagttcggtgcgaaggacgatgaccctcatgccaacgacctcgtcggaggactgatgtcagacggccttcggaggttgtccggcaacgaatatgtcctgtccacaaagaacactcaaatggtcagttctaatataatcacaccaatttcgcttgatgacgtgcccccaaggattgctcgggccatggagaacgaggagtactgggactttgatatcttcgaacttgaggctgcaacccacaatagacctctaatatacctggggctgaagatgttcgcaagattcggaatctgcgaatttttgcactgtagcgagtctaccttaagaagttggttgcaaattattgaggcaaactaccattccagtaatccttaccacaattctactcattccgcagacgttctccacgccactgcctacttcctctccaaggagaggattaaagagaccctcgaccctatcgacgaggtcgcggcactcattgccgcaaccatacacgacgttgatcatcctggccgcaccaacagctttctatgcaatgcggggtcagaattagccatcttatataatgacacggcggtactcgagagccaccatgccgcattggctttccagctcacaaccggagatgataaatgcaatatctttaagaacatggaaagaaacgactaccggacactcaggcaggggattattgatatggtcctcgccactgagatgaccaagcatttcgagcacgtcaacaagttcgtaaacagtatcaataagccactggccacactcgaggaaaacggagaaacagataaaaatcaggaagtgataaacacaatgttgaggactcccgagaaccgcacactgataaagcgaatgcttataaagtgcgcagacgtgtctaatccgtgcagacccctgcagtattgcatcgaatgggcagcgcgaatctcagaagaatacttttcccagactgacgaggaaaagcagcaggggctgcccgttgtgatgcccgtttttgataggaacacatgcagcatacctaagagccagatctccttcatcgactacttcattactgacatgttcgatgcttgggacgcattcgtggacctcccagacctgatgcagcacttagataataacttcaagtattggaagggccttgacgaaatgaagctgcggaatctacgcccacctcctgaatag

SEQ ID NO: 199362 - DNA, 2658 bp, synthetic construct
  misc_feature 1..2658: note = Description of Artificial Sequence: Synthetic coding sequence
  source 1..2658: mol_type = other DNA
atgggctgcgcccccagcatccacgtgagccagagcggcgtgatctactgtagggacagcgatgaaagttcaagccctcggcagactacaagcgtaagtcagggccctgcagcccccttacccggactgtttgtgcagaccgatgctgcagatgctatcccaccgagtcgagctagtggccccccgagtgttgcgagagttcggcgggcaagaactgagttggggtcgggttcaagcgccggctctgccgcccccgcagcaactacgagccgtggccgcaggcgccactgctgctctagcgcggaggctgagacccagacctgttatacaagcgtgaaacaggtttcctcagctgaggtgcggattggccccatgagactgacccaggatccaattcaggtacttctgatttttgctaaggaggattctcagtccgacgggttttggtgggcttgcgatcgggcgggctataggtgtaatattgctcggacccctgagtccgctctggaatgtttcctggacaaacaccacgaaattatcgtcatcgaccatagacagactcagaacttcgacgccgaagccgtgtgtaggtctattcgggctaccaatccttccgaacacacggtcattttagccgtggttagtcgcgtgtctgacgaccacgaagaggcgtccgtgttacccttgctgcatgccggctttaatcggcgatttatggaaaacagttccataattgcatgctacaatgaactaattcagattgaacatggagaggtgagaagccaatttaagttaagagcctgtaattcagtgtttaccgcgctggaccactgtcacgaggccatagagatcacatctgacgatcacgtaattcagtacgtcaacccagcattcgagcggatgatgggttaccacaagggcgagctcctcgggaaggaactcgccgaccttcctaagtcagacaagaacagagccgatctcctagacactatcaatacatgcatcaaaaagggtaaagagtggcaaggagtttattacgctcggaggaaaagcggggattctatacagcagcacgtcaagataaccccagttattggccaaggcggaaagatccgccatttcgtgtctctgaaaaagctgtgttgtactaccgacaataacaagcagatccacaagattcaccgcgactcaggggataatagtcagacagaaccccattcattccgctataaaaaccgacggaaggagtcaatagatgtgaaaagcatcagttctagagggagcgacgcgccttcattacagaatcgtcgatacccgagtatggctaggatccatagcatgaccatagaggccccaattactaaagtgatcaatatcattaatgctgcacaggagaacagtcctgtgacggtagccgaggccctggaccgggtgctggagatccttcgcaccacagaactgtattcaccacagctggggacgaaggatgaggacccgcatacttcagacctggtgggtggactgatgacagacgggttacgcagactgtcaggcaatgagtatgtgttcaccaagaatgtgcaccagagccacagccatttggcaatgcctattaccattaacgatgtgccgccctgcatttcacagctgctggataatgaggaaagttgggatttcaatatctttgagctggaagccattacacataaaagaccattagtgtatctggggctgaaagttttctctagattcggggtttgcgaattcctgaactgctctgaaaccaccttgagggcatggtttcaagtgattgaggcaaactatcatagtagcaacgcataccacaattctactcacgccgctgacgtgctccatgcgaccgcattctttctggggaaagaaagagtaaaaggctcactggatcaattagatgaggtggcggctctgatcgcagctaccgtccatgacgtcgatcatccaggcagaacaaactcatttctgtgtaacgcaggtagcgaattggctgttctgtacaacgacactgctgtcctcgagagccaccacacagccctcgcatttcaactcacagtaaaggatactaagtgcaatatctttaagaatattgaccgaaaccactaccgaactctgcggcaggcgattattgacatggtgttggccacagagatgaccaagcatttcgagcacgtaaacaaattcgttaattcaattaacaagcctatggccgccgagattgagggcagtgactgcgaatgtaatcctgccggcaagaacttccccgagaatcaaatcctgatcaagaggatgatgattaagtgcgccgacgtggctaatccatgcagacctctggatctgtgtatcgaatgggcaggaagaatcagcgaagaatactttgcacagacagatgaagaaaaacggcagggactccccgtagtcatgccagtgttcgatcgcaacacatgtagtatcccaaagagtcagatcagcttcatcgactacttcatcacagacatgtttgacgcctgggacgccttcgctcatctgccagcactgatgcagcacctagcagataactacaagcactggaagacgctggacgatcttaagtgtaagtccctcaggctgccaagcgactcgtag

SEQ ID NO: 199363 - DNA, 2493 bp, synthetic construct
  misc_feature 1..2493: note = Description of Artificial Sequence: Synthetic coding sequence
  source 1..2493: mol_type = other DNA
atgggctgcgcccccagcatccacgtgagccagagcggcgtgatctactgccgcgactcagacgagtcctcgagcccaagacaaactacctctgtcagccagggtcctgccgccccattaccgggcttgtttgtgcagaccgacgctgccgatgcgataccaccctctcgcgcctccgggcccccttccgtcgccagagtcaggcgtgctcggacagagctcggaagcgggagcagtgccggaagtgccgctcccgccgcaaccacatctcggggccggcggcgccattgctgcagctctgccgaagcagaaacacagacatgttacacctctgtaaagcaagtatcctctgccgaggtgcgaatcggacccatgagactgacacaagaccccatacaggttctcctgatcttcgcaaaggaagactctcaaagcgatggattctggtgggcttgcgaccgagccggctaccgttgcaatatcgcacgcactcccgaatccgccttagagtgtttcttggataagcaccatgagattatcgtgatcgatcaccggcaaactcaaaacttcgacgccgaggctgtctgtcggtccatcagggctacaaatccttccgaacatacagtcatcctggccgtcgtaagccgggtgagtgacgaccacgaagaagcatcagtgttacccctgctgcatgcggggtttaatcgtcgcttcatggagaattcctctataatcgcatgctataacgagctaatccagattgaacacggcgaggttcgttcccagttcaagctacgcgcctgcaattcagtgttcactgcattagatcactgccacgaagctatcgagatcacatccgatgaccatgtgattcagtatgtgaatcctgcatttgaacggatgatgggttatcacaagggagaactgctaggcaaagagttggcggaccttccgaagtcggacaagaaccgcgccgacttactggacaccattaatacctgcattaaaaaaggaaaggaatggcagggggtgtattacgccagaagaaagtccggggatagcatccaacagcatgttaaaattacgccagttatcgggcaaggtggcaagatacgacattttgtctctttaaaaaaactgtgttgcacaactgataataataaacaaatccataagattcacagagattccggagataattcacagacagaaccccacagctttcggtacaaaaaccggaggaaggaatccatcgacgttaaaagtatctcaagcagagggagcgatgccccatctctgcagaacaggaggtacccatccatggcacgcatacacagcatgaccatagaggccccaataacgaaagacggattgaggagacttagcgggaacgagtacgtcttcactaagaacgttcatcagtctcactctcatctcgcaatgcctataaccattaatgacgttccgccctgcatctctcagctcttggataacgaagagagttgggattttaatattttcgaattggaagctatcacccacaagaggccattggtttatctcggtctcaaggtgttcagtcggttcggggtatgcgagtttctgaactgcagcgaaaccacgctccgtgcctggtttcaggttattgaggctaattaccactcaagcaacgcataccacaattccactcatgccgcagacgtgcttcatgcaaccgcttttttcttgggcaaggaaagagtaaagggaagtctggaccagcttgatgaagtcgccgcgctgatcgccgccactgtgcacgacgtggaccatcctggccgaacaaattcattcctgtgcaatgcagggagtgagttggccgtcctgtataacgataccgctgtactcgagtcccaccacactgcacttgcattccagctaaccgtaaaagacacaaaatgtaatattttcaagaatatagatcgcaaccactaccgtaccttgcgtcaggccatcattgacatggtattggcgaccgagatgactaagcactttgaacacgtcaacaagtttgtgaacagcattaataagccaatggccgctgagatcgaaggcagcgactgtgaatgcaatccagcgggaaaaaactttcctgaaaaccagattttgatcaaacgaatgatgatcaaatgcgccgatgtcgccaatccctgcagacctctggatctgtgcatagagtgggccgggcgcatctcagaagagtacttcgcacaaaccgacgaggaaaagcgtcagggtctacccgtcgtgatgccagtgttcgaccgtaacacctgcagcatcccaaagtctcagatttcatttatcgactatttcataaccgatatgttcgatgcttgggacgccttcgctcatcttccagccctgatgcagcatttagcagacaattacaagcattggaaaaccctggacgacttgaagtgcaagtcactcagactgcctagcgacagttag

SEQ ID NO: 199364 - DNA, 2517 bp, synthetic construct
  misc_feature 1..2517: note = Description of Artificial Sequence: Synthetic coding sequence
  source 1..2517: mol_type = other DNA
atgggctgcgcccccagcatccacgtgagccagagcggcgtgatctattgtagagattccgatgagagcagttcaccaagacagaccaccagcgtttctcaagggccagctgcacccctaccaggactcttcgtgcagaccgatgccgccgacgctattcctccctcaagggcctcaggcccgccaagtgtggcaagggtacgaagagctcggactgagctgggcagcggtagctccgcaggctcagccgccccggccgcaacaaccagccgtggccgtcgccgacattgctgctcatcagccgaagccgaaactcagacctgctatacttctgtcaaacaggtttcttccgcagaagttcggattggacctatgaggttgactcaggacccaattcaggtacttttgattttcgccaaggaggatagtcagagcgatggattctggtgggcgtgtgatcgggcaggctatagatgtaacatcgcacgtacgccagagtctgccttagaatgtttcctggacaaacaccacgagatcattgtgattgatcaccgtcaaacccaaaatttcgacgcagaagccgtgtgcaggtctattcgagctaccaatccatccgaacacaccgtgatactcgccgtagtaagtagggtcagcgacgatcatgaagaagccagtgttctacctcttctgcatgccggcttcaataggcggttcatggaaaacagtagcattatcgcttgctacaatgagctgatacaaatagagcatggggaagtcaggtcacagtttaagctccgagcgtgtaacagtgtattcactgctctggaccactgccacgaagccatcgaaatcacctccgatgaccacgtgatacaagaatggcagggtgtgtactacgcgcgccgcaagtccggtgactcgatccagcagcacgtcaagattacacccgtgattgggcaaggaggtaagatcaggcacttcgtcagcctgaaaaagctgtgctgcactacagataacaacaagcagatccacaaaatacaccgcgacagtggagacaattcccagactgagccgcactccttccggtataaaaaccgacggaaggagtcgatcgacgtaaaaagtatttcgagtcgtggcagcgacgcacccagtctccaaaatcggcggtatccatcgatggccaggatacattctatgaccatcgaggctccaattaccaaagtgattaacattattaatgccgctcaggagaactcgcctgtaactgtggcggaggctcttgatagagtgctggagattcttcgtacaacagagctttattccccccagctcggaaccaaagacgaagacccccatacaagcgacctcgtcggaggtctgatgacagacggcctgagacggctgagcgggaatgagtatgtgtttactaagaacgtgcatcaatcgcattctcatttagccatgccaatcactatcaatgacgtgcccccctgcatctcacagctgctggataacgaagagagctgggacttcaacattttcgaactggaggccatcacacataagcgcccccttgtgtatttggggctgaaggtctttagccgcttcggcgtttgcgaatttctgaattgctctgagactaccctgagagcttggttccaggtaattgaagcaaactatcactcctccaacgcttaccacaactctacgcacgcagctgatgtgttgcacgcaaccgcctttttcctcggcaaggagcgagtcaagggctctctggatcagctcgatgaagtggctgccttgatcgccgcaacagtgcatgatgtcgaccatcctggaagaacaaactcctttttatgcaatgcagggtctgagttggctgtcttgtataatgatacagccgtgctcgaatctcaccacaccgccttggcctttcagctgacagttaaggataccaaatgcaacattttcaagaacatcgataggaaccattaccgcacactaaggcaggccataattgacatggttctggcaactgaaatgacaaagcattttgagcacgtgaataagttcgtgaactctatcaataagcctatggctgctgaaatcgaagggagcgattgcgaatgtaatcctgcaggaaaaaatttccctgaaaaccagatattgatcaaacgcatgatgattaagtgcgctgacgtggctaatccttgccggcctttagacctgtgcatcgaatgggcgggtcgcattagcgaggaatatttcgcacagacagatgaggagaagcggcagggtctccctgtagtgatgccagtgttcgacaggaacacatgctctatacctaagtcgcagatatcttttatcgattactttatcaccgacatgttcgacgcatgggacgccttcgcccacttacccgcccttatgcagcacttggcagacaattataagcactggaagactttggacgacctgaaatgcaaaagtctgagactgccgtcagattcttag

SEQ ID NO: 199365 - DNA, 2598 bp, synthetic construct
  misc_feature 1..2598: note = Description of Artificial Sequence: Synthetic coding sequence
  source 1..2598: mol_type = other DNA
atgggctgcgcccccagcatccacgtgagccagagcggcgtgatctattgtcgcgattccgacgagtcttcatctcctcgacaaacaactagcgtgtctcaaggacctgccgcacctttgcccgggcttttcgttcaaaccgacgccgctgacgctataccaccatctagagcctctgggccccctagcgtagccagagtgcggcgagcccgtaccgagcttggatctggctcaagcgcagggagcgcggctcccgccgctacaacctccagaggaaggagacgccattgctgctccagcgcggaagcagaaactcagacctgctacacctcggtgaaggttctgctgatattcgcaaaggaggattctcaatccgacggtttctggtgggcttgcgatcgagccgggtatcgttgtaacatcgcacggaccccagaaagcgccttggaatgcttcttggacaagcatcatgagattatcgtgattgaccacagacaaacccaaaatttcgatgcggaggccgtctgccggtctattagggcaaccaatccctccgaacacactgtcatattagcggtggtcagccgtgtttctgatgatcacgaagaagcctctgtgctccccctactccacgctggctttaacaggcggttcatggaaaatagtagtattatcgcctgttataatgagctcattcagattgaacacggagaggtacgcagccagttcaagctcagggcatgtaacagtgttttcacagccctcgaccattgccacgaggctatcgagatcacttccgatgaccacgtgatccagtacgtgaaccctgcatttgaacgtatgatgggatatcataaaggtgaactgctgggtaaagaactggccgacctacccaagagcgataagaaccgtgcagatcttctcgataccataaacacatgtatcaagaaaggaaaagagtggcaaggggtttattatgctcggaggaaatctggtgactcaattcagcagcacgtgaaaataactcctgtgattggccagggcgggaagattcggcactttgtgtctttgaaaaagttatgttgtactactgataataacaagcagatccataagatacaccgcgactcaggagacaattctcagacagaaccacactcatttcgctataagaataggcgcaaagagagcatagacgttaaaagtatttcttcccggggtagtgatgctccaagcctgcagaacagacggtacccctccatggcccgaatccacagcatgacaatcgaggccccgatcaccaaggtgattaatatcatcaacgcagcccaggagaactcccctgtgaccgtcgctgaagccttggatagggttctcgaaatcctccgcacaactgagctttactccccgcagctggggactaaagacgaagatccacataccagcgacctggtgggagggttgatgactgacggcttacgcagactgtcgggaaatgaatatgtcttcacgaagaacgtgcaccagtcccattcacatctcgccatgccaatcaccattaatgacgttccaccgtgcatatcccaactgctggacaatgaggaaagctgggatttcaacatcttcgagctagaagccattacgcacaagaggcccctggtgtatctcgggcttaaggtgttttcacgtttcggcgtctgtgaatttctgaactgtagtgaaacaaccctccgcgcctggtttcaagtcatagaagctaactatcatagcagcaacgcctaccacaactcaacccacgccgccgacgtgctccatgctactgccttcttcctggggaaggaaagggtaaaaggaagcctggatcagctggatgaggtggccgccctaattgccgccacggtgcacgatgtggatcaccccggacgaactaattccttcctgtgcaatgctggctcagaactggctgtgctgtacaatgataccgccgtgctggaatcccaccacacggccctcgcatttcagttgactgtgaaagacacaaagtgtaacattttcaagaatatagatcgaaaccattacaggacactcagacaggccattattgacatggtgctcgccactgaaatgacaaaacactttgaacatgtgaataaatttgtcaactccatcaacaagcccatggcggctgagattgagggcagcgactgcgaatgtaaccccgctggcaagaactttcctgagaaccagatcctcattaaacgtatgatgataaagtgtgctgacgttgccaatccctgtcgcccattagacttgtgcatcgaatgggctggccggattagtgaggaatacttcgctcagaccgacgaggagaagaggcagggtttgcctgtggtgatgcctgttttcgacaggaatacctgtagcatcccaaaatcacagataagtttcatcgactacttcatcaccgacatgttcgatgcatgggatgccttcgcccacctaccagcactcatgcagcacctcgccgacaattacaagcattggaaaacactggacgacctaaagtgcaagtctttacgcctgccttcagacagctag

SEQ ID NO: 199366 - DNA, 2367 bp, synthetic construct
  misc_feature 1..2367: note = Description of Artificial Sequence: Synthetic coding sequence
  source 1..2367: mol_type = other DNA
atgggctgcgcccccagcatccacgtgagccagagcggcgtgatctactgcagggatagtgacgagtccagctcacctaggcaaaccaccagtgtttcacaaggacctgcagcccctctgcccggattgttcgtccagactgatgcagctgacgctatccccccttctcgtgcatccggccctcctagtgtggcccgcgtgaggcgggccaggaccgaactgggcagtggcagctccgccggatcggctgcacccgcggccacaacaagcagaggacggcggagacactgttgtagctccgccgaagccgaaacacagacatgctacacctccgtgaaacaagtgtcaagcgctgaggtgcgcatcggcccaatgaggctcacacaggatcccattcaggtcttgctgatttttgcaaaggaagattcccagtccgatggcttctggtgggcctgcgacagggccggctatagatgcaatatcgctagaactcccgagtccgctctggaatgctttctggacaagcatcacgaaattattgtaatcgatcacaggcaaacacaaaactttgacgctgaagccgtgtgccgttctatacgagcaactaaccctagtgagcacactgtaattctggcagtagtgagccgcgtgagtgatgaccacgaggaagcaagcgtgctgcctctgctgcacgctggttttaatcggcggtttatggagaactcatctatcatcgcctgctataatgaacttatacagattgaacacggcgaagtgcggagtcagtttaagctgagggcttgcaatagtgttttcaccgccctggaccactgtcatgaggcaatcgaaattacaagcgatgaccacgtcatacagatccataaaatacatcgagactcaggagataacagccagaccgagccacactcctttcgatacaagaatagaagaaaggaatcaatcgatgtgaagtcaataagcagtcgcgggagcgatgctccttccctccagaaccgtcgctacccgagtatggcaaggattcattctatgaccatcgaggctccgatcaccaaggtgatcaacatcattaacgccgcacaggaaaatagcccagtcaccgtggcagaagcgttggaccgcgtgctcgagattttgagaactactgagctctactctccccagctggggactaaggatgaagatccccatacaagcgatctggtgggagggcttatgacagacgggcttcggcgcctgtccgggaatgaatacgtgtttaccaaaaacgtccaccagtctcactcccatctggccatgccaatcacaatcaacgatgtgcctccctgtattagccagttacttgacaatgaagaaagctgggatttcaatatattcgagctcgaagctatcactcataagaggcctctcgtatacctaggtctcaaagtcttcagccgctttggtgtgtgtgagtttttgaactgctcggaaacgacactaagggcctggttccaggttatagaggccaattaccacagtagcaatgcctaccacaacagtacacacgcagcggacgttctgcacgccactgcatttttcttggggaaagagcgcgtgaaaggtagcttagaccagttggacgaagttgcggcactgattgctgccacagtgcatgatgtggaccacccagggagaactaacagcttcctgtgtaatgccggatcggaactcgctgttttatataatgatacagctgtgctcgagtcacaccacacggcccttgctttccagctgacagtcaaggacacgaagtgtaacatcttcaagaatattgaccgcaaccactaccgcactctccggcaggcgatcatcgacatggttttagccacagagatgacaaagcatttcgagcacgtcaataagttcgtgaattcaatcaacaagccaatggccgctgaaattgaagggtccgattgcgaatgtaatcccgctggaaaaaatttccccgagaaccaaatcttgattaagcgcatgatgatcaagtgcgccgacgtggcaaacccttgtaggcctctggacctctgtattgagtgggccgggcgcatcagtgaagagtactttgcccaaaccgatgaagaaaaacgccagggactgcctgtagtaatgcctgtgtttgatcgcaacacatgcagcatcccaaagagccagataagttttatcgattactttatcaccgatatgtttgacgcttgggacgcattcgcccacttgcctgctctgatgcagcacttggctgacaactacaaacattggaagacactggacgatttgaaatgcaaatctctgcgcctgccatccgactcttag

SEQ ID NO: 199367 - DNA, 1053 bp, synthetic construct
  misc_feature 1..1053: note = Description of Artificial Sequence: Synthetic coding sequence
  source 1..1053: mol_type = other DNA
atgcccatcaccatcaacgacgtgcccccctgcatcagccagctgctggacaacgaggagtcttgggatttcaatatatttgagttggaagccatcactcacaagcgcccactagtctacttaggattaaaggtgttctcacggtttggcgtgtgcgaatttctcaactgttccgaaacaacacttcgcgcctggtttcaggttattgaggccaattatcacagttccaatgcctaccacaacagcacccacgccgccgacgtactccacgcgacagccttcttcctcggaaaggagcgcgtaaagggaagcctggaccaactggacgaagtggctgctttgattgccgcgactgtccacgatgttgatcacccaggaagaactaattcttttctgtgtaacgcgggttccgaactggctgtcttgtataatgacacagccgtgttagaatcccaccatacagcactcgcgtttcagctaactgttaaagatactaagtgcaatatttttaagaatattgacaggaatcactacaggaccctgcgacaggctattattgacatggtgctggctaccgaaatgacgaagcactttgagcacgtaaataagttcgtgaactccattaataaaccgatggctgcagaaatagagggatcggactgtgaatgtaacccagcggggaagaactttcctgagaaccagatactgattaaacggatgatgattaagtgcgcagacgtggccaatccttgcagacctctggacctgtgcatcgagtgggctggtcggatctctgaggaatatttcgcccaaacagacgaggagaagcgacaaggccttcctgtggtgatgcccgtattcgacagaaacacatgtagcatccccaaaagtcagattagcttcatagattacttcataaccgacatgtttgacgcttgggacgctttcgcccacctcccagccctgatgcagcatctggcagataactacaagcactggaaaacccttgatgacctgaaatgcaagtctctgcggcttcctagcgactcctag

SEQ ID NO: 199368 - DNA, 1782 bp, synthetic construct
  misc_feature 1..1782: note = Description of Artificial Sequence: Synthetic coding sequence
  source 1..1782: mol_type = other DNA
atgggcagcggcagcagcagctaccggcccaaggccatctacctggacattgatggtcgtatccagaaagttattttttccaagtactgcaattcgtccgatataatggacctcttttgtatcgcaaccggattgcctcggaatactactatttccctgttgacaactgacgatgccatggtaagcatcgacccaacaatgcccgccaactctgagagaacaccctacaaggtgaggccagtggcaattaagcagctgtccgcaggcgtggaggacaaaagaaccacatcaagagggcagtccgcagagcgtccactgcgcgaccgcagggttgtggggctggagcagccccgcagggagggggccttcgagagcggacaggtggagcctagacccagagaaccccagggatgctatcaagaaggccagcgcatacctccagagcgggaagaactcatccaaagcgttttagcacaggttgccgaacagttctccagagcttttaagatcaatgaattgaaggccgaagtggccaatcatctagccgtgctcgaaaagcgcgtggagctggagggactcaaggtggtcgagatcgagaaatgcaaaagcgacattaaaaagatgagagaagagctagcagccagatcttctcggacaaactgtccatgcaaatacagtttccttgataatcataaaaagctaaccccccgccgcgacgtgccgacttatcctaaatatctgctcagtcccgaaaccattgaagctctgaggaagcccacattcgacgtatggttgtgggagcctaatgaaatgctttcttgtcttgagcatatgtaccatgacttggggcttgtgcgtgatttttcaattaaccccgtgaccctgaggaggtggctgttctgtgtccacgataactacaggaacaaccccttccacaattttaggcattgtttctgcgtggcgcagatgatgtatagcatggtatggctgtgttctctacaggaaaaattttctcagaccgatattctcattttaatgacagcggccatctgtcacgacttggatcatccagggtacaacaatacctatcagatcaatgccaggacagagctggctgtcaggtataatgacatatcacctcttgagaatcaccactgcgcagtggcctttcagattttggctgagcccgagtgcaacattttttctaacattccccctgacggctttaagcagatccggcagggcatgatcaccctgattcttgcgacagacatggcccgtcatgcagagattatggactcgttcaaagagaagatggaaaacttcgactacagcaatgaggagcacatgaccctgctaaaaatgatcctcattaaatgctgtgacatttcaaacgaggtgcgtcctatggaggtggcagagccttgggtggattgtcttttggaggaatatttcatgcagtctgatcgggagaagtctgaggggctacctgtggctccttttatggaccgagacaaggtgacaaaggccactgctcagattggcttcattaaattcgtactgatcccaatgttcgagactgtcacaaagctttttcccatggtagaagaaattatgctccagcctctgtgggaaagccgggatcgctacgaggagttgaagaggatcgatgacgccatgaaggagctacagaaaaaaacagattctctcacctccggagccacggagaagagccgcgagagaagtagagatgtgaaaaactcagaaggagactgcgcgtag

SEQ ID NO: 199369 - DNA, 1704 bp, synthetic construct
  misc_feature 1..1704: note = Description of Artificial Sequence: Synthetic coding sequence
  source 1..1704: mol_type = other DNA
atgggcagcggcagcagcagctaccggcccaaggccatctacctggacatcgacggcagaattcagaaggtcattttctccaaatactgcaactcctcggatattatggatctgttttgcatcgctaccggcttgccccgaacgccttataaggtgcggcccgttgccattaaacagttatctgcaggggttgaggacaaaaggacaacctctcgcggacagtctgctgaacgccccctgagagatcggagagttgtgggcctggaacagccaagacgagagggtgcatttgagtctggacaggttgaaccacgcccgagggagccacagggctgttaccaggagggccagagaatcccacccgagcgcgaagagctgatccaaagcgtcctcgcacaggtcgcggaacaattctctagggcctttaagattaatgagctgaaggcagaagtagcaaaccatctggcagtgctggaaaagcgcgtggagttggaggggctgaaggttgtggagatagagaagtgtaagtccgacataaaaaagatgcgagaagagttagctgcacgttctagcaggaccaactgcccctgtaagtatagtttcctggacaatcataagaagttgaccccccgccgggacgtaccgacgtacccaaaatacctcctatcaccagagacaatcgaagcactgagaaagcccactttcgacgtctggttgtgggaaccaaacgagatgctgtcctgcctggagcacatgtatcacgatcttggcctcgttagggactttagcatcaatcctgttacgctgcgccggtggcttttttgcgtgcatgataattaccgaaataaccctttccataactttcgccactgcttctgcgttgcccagatgatgtacagcatggtttggctgtgctcgttgcaggaaaagttctcccagacggatatcctcattcttatgactgctgctatctgccacgatctcgatcatcccgggtacaataacacataccaaataaatgccaggacagagctggccgtcaggtataacgatatatccccattggagaaccaccattgtgccgtcgcattccagatcctcgccgaacccgaatgcaacatttttagcaacatcccacccgatggcttcaagcagatcaggcagggtatgattaccctcattctggctactgacatggcaagacacgccgagatcatggactcgttcaaagagaagatggagaattttgattattccaatgaagagcatatgaccctcctaaagatgatcctgatcaaatgttgtgacatttctaatgaagtgcggcccatggaggttgccgaaccctgggttgactgcctcctggaggaatattttatgcaaagcgatagggagaagtctgaaggcctgcctgtggctccattcatggaccgggacaaggtgaccaaggcaaccgctcaaattggtttcattaaattcgtgctgattccaatgttcgagaccgtcacaaaactctttcccatggttgaagaaatcatgctccagcccctctgggaatcccgcgatcgatatgaggaactgaaaaggattgatgacgctatgaaggagttgcaaaaaaagaccgactcccttacttctggggcaaccgaaaaatctagagagcgttcgagggacgtgaaaaacagtgagggggattgcgcctag

SEQ ID NO: 199370 - DNA, 1476 bp, synthetic construct
  misc_feature 1..1476: note = Description of Artificial Sequence: Synthetic coding sequence
  source 1..1476: mol_type = other DNA
atgggcagcggcagcagcagctaccggcccaaggccatctacctggacattgacggcagaattcaaaaggagcacgaccatctcccagccgatcatcgcaggcgccatgggcttcataggccgcatcatgctcgagagttcagaacccacagcgtacagagcgaaacctgcggtcaccaagccaccctccgggcattcaagattaacgaattgaaggccgaggtcgccaatcacctggctgtccttgagaagcgtgtggagctagaggggctcaaagtggtggagatcgagaaatgtaaaagcgatattaagaagatgcgtgaggagctggccgcccggagctctcgaaccaactgtccctgcaaatacagttttctggacaatcacaaaaaattgacccccaggcgagacgtgcccacatatccgaagtatcttttatctcctgagaccatcgaggccctgagaaagccaacatttgatgtctggctctgggagcctaacgaaatgctcagttgtctcgaacatatgtatcatgacttgggccttgtgagggacttctctatcaaccctgtcaccctgcggagatggcttttctgtgtgcacgataattacagaaataacccctttcataactttcgtcattgcttctgtgtcgctcagatgatgtactccatggtctggctgtgtagtttgcaggagaagtttagccagactgacatactgatactgatgaccgcagcaatctgtcatgacctcgatcatccaggctacaataacacataccagattaatgcacgcaccgaattagccgttcggtataatgatatctcaccactggaaaatcatcattgcgctgtcgccttccaaatcctagctgaacccgagtgtaacattttctccaacattccccccgacggattcaaacagattagacaaggcatgatcacacttattcttgctacagacatggcccggcacgctgagatcatggacagcttcaaggagaagatggaaaattttgattattctaatgaagaacacatgactctgctgaaaatgatcttaataaagtgttgcgacatttctaatgaggtcaggcctatggaagtcgccgagccgtgggttgactgcctgctggaggagtactttatgcaatccgaccgtgagaaatctgagggactgcccgtggcccccttcatggaccgggacaaggtgaccaaggccaccgcacagataggtttcatcaagttcgtattgattccaatgttcgagaccgttacaaaattgttcccgatggtcgaggaaatcatgctgcagccgttgtgggagagtcgagaccgatatgaggaactgaagaggatcgacgacgcgatgaaagaactgcaaaagaaaaccgactcgctcacctctggtgcaactgagaagtcccgagaaagatcaagggacgtaaaaaacagcgaaggcgactgcgcttag

SEQ ID NO: 199371 - DNA, 1602 bp, synthetic construct
  misc_feature 1..1602: note = Description of Artificial Sequence: Synthetic coding sequence
  source 1..1602: mol_type = other DNA
atgggcagcggcagcagcagctaccggcccaaggccatctacctggacatcgacggtagaatacagaaagtgattttttcaaaatattgcaactccagcgatatcatggatctgttctgtatcgctaccgggctgccccgcaatacaaccatttctcttctaacaactgatgacgccatggtgagtatcgatcccactatgcctgccaattcagagcggacgccctataaggtgcgccccgtcgctataaaacagttgtcggagcgagaagaactgattcagtccgtgctggcccaggtggcagagcaatttagcagagcatttaaaatcaatgaattgaaggctgaggtcgccaaccacctcgccgtcctggaaaaacgggtggagctagagggactgaaagtcgtcgagatcgagaaatgtaagtctgatatcaagaagatgagggaagagcttgccgcccgcagtagccgaaccaattgtccatgcaaatatagctttctggataaccacaagaagcttaccccgagacgggacgtaccaacttatcctaaatacctgctgtcccccgaaaccatcgaagcccttcggaagccgactttcgatgtttggctgtgggagcccaatgagatgttatcttgcctagagcatatgtaccacgatcttggcctggtgcgggattttagcattaatccagtgacacttagaagatggttattctgcgtacacgacaactaccgaaataatccattccacaactttcggcattgtttttgtgtggcacagatgatgtattccatggtttggctgtgctctctgcaggagaagttctcccagacagatattctgatcctgatgaccgctgctatctgccacgaccttgaccacccaggttataataacacataccaaattaatgccaggaccgagctggctgtacgctacaatgacatcagccccctggaaaaccatcattgtgctgtggcctttcagatcctggccgagcccgagtgtaatatcttttccaacatcccccctgatggctttaagcagatcaggcagggcatgattacactgattttggccactgacatggcccgacacgccgagattatggattcgttcaaagagaagatggagaatttcgactactccaatgaggagcatatgactctgctcaaaatgattctgatcaagtgttgtgatattagcaacgaagttcgaccaatggaggtcgccgagccctgggttgactgcttactggaggaatatttcatgcaaagcgatcgggaaaagagcgaggggctgcctgtggccccgttcatggaccgagataaagttactaaggcgacagcgcagattggattcattaagttcgtgctgatcccaatgttcgagaccgtgactaaacttttccccatggtggaagaaattatgctacagcccctttgggagagccgggataggtatgaggaactgaagcggattgatgatgccatgaaagaactgcagaaaaaaacagattctttaacgagcggcgctacagaaaagtctcgcgaaagaagtcgggacgtgaagaactcagaaggagactgtgcttag

SEQ ID NO: 199372 - DNA, 1398 bp, synthetic construct
  misc_feature 1..1398: note = Description of Artificial Sequence: Synthetic coding sequence
  source 1..1398: mol_type = other DNA
atgggcagcggcagcagcagctaccggcccaaggccatctacctggatatcgacggaaggattcagaaacatagtgtccagagtgagacctgcggccaccaagccactttgcgcgctttcaagattaatgaacttaaggccgaggtggcgaatcacctggctgtgctcgaaaagagagtggaactggagggcttgaaagtggtcgagattgaaaagtgcaaaagcgatattaagaagatgcgggaagagctagccgcgcggagcagccgaacgaactgtccttgtaaatacagtttcctggacaatcacaaaaagttgaccccgcggagagatgttccaacctacccaaaatacctactgtcacctgaaacaattgaggccctgcggaagcctacatttgatgtctggttatgggaacccaatgagatgcttagctgcctggagcacatgtaccacgacctggggctagtacgcgacttttcaatcaatcccgtgaccttaagaagatggctgttctgcgtgcatgacaattacaggaacaatccgttccacaactttagacattgcttctgcgtggcccagatgatgtactctatggtgtggctgtgctccttgcaggaaaagttctcccaaaccgacatcctgatcctaatgactgccgctatctgtcacgacctggaccaccccggctataacaatacgtaccagataaacgctcgtacagaacttgccgtgcgctataacgacatcagcccacttgaaaatcaccattgcgctgtggcgtttcagatcctggcagaaccagaatgtaatattttttccaatattccccccgatggatttaagcagatcaggcagggaatgattacactcattctcgcaactgatatggcaaggcacgccgagatcatggattctttcaaggagaagatggaaaatttcgactactcaaacgaggagcacatgacactcctcaagatgattttaatcaagtgctgtgatatctctaacgaagtccgtccgatggaagtcgcagaaccttgggtcgattgtctacttgaggagtatttcatgcagagcgaccgagaaaaaagcgagggacttccggttgcccccttcatggatagggacaaggtgacaaaagccacagcccaaattggattcattaaattcgtacttattccgatgttcgaaactgtcacgaaattgttccccatggtcgaagagattatgcttcagcccttgtgggaatcacgtgaccgatacgaagagctgaagcggattgacgacgcgatgaaggagctccaaaaaaagactgatagcctcacatcaggggcgactgagaaatctagagaaaggtcccgcgatgttaagaatagcgaaggggactgtgcatag

SEQ ID NO: 199373 - DNA, 1623 bp, synthetic construct
  misc_feature 1..1623: note = Description of Artificial Sequence: Synthetic coding sequence
  source 1..1623: mol_type = other DNA
atgggcagcggcagcagcagctaccggcccaaggccatctacctggacatcgacggccgtatacagaaagtgattttttcaaagtactgcaattcatctgacatcatggatcttttttgtattgctactggtttgccacgtaatacaactattagcctgttgacaactgacgatgccatggtgtccattgaccctactatgccagccaactccgaacggaacgagctcatcttatatacatctttacgaaacctcttgttcctgccaagtaaggagtcatgggcctcccaccagcacagcgttcagagcgaaacgtgtgggcaccaagctactctgcgcgccttcaaaataaacgagctaaaagccgaggtcgccaaccaccttgcggtgctcgagaagcgcgtggaattggagggactgaaagtggtggaaatcgagaaatgtaaatcagacatcaaaaaaatgcgcgaagaactggctgcaaggtcctcaagaacaaactgcccatgcaagtatagctttctggacaaccacaagaagcttacgcctcgaagggatgtgcctacgtatccaaaatacttactttctcctgaaactattgaggctcttcggaaaccgacgttcgacgtatggttatgggagcctaacgagatgctgtcgtgcttggaacacatgtaccacgacctggggttggtgcgcgacttttctataaatccagtgactttacgtcggtggcttttctgcgttcacgataactaccgaaacaatccttttcacaactttaggcactgcttttgcgtggcccagatgatgtacagcatggtgtggttgtgctccctgcaggagaaattttcccagaccgatattttaatccttatgactgccgccatctgccacgatcttgatcacccaggatacaataatacttaccagataaacgcgcgaacagagctggcagtgaggtataacgacatatctccacttgaaaaccatcattgcgctgttgcctttcagattctggctgagcccgaatgcaacatattttctaatatcccccctgacggattcaaacagatacgtcagggcatgattacgttgattttggccacagacatggccaggcatgccgagattatggactccttcaaagaaaagatggagaatttcgattactcaaatgaggaacatatgaccctcctgaagatgatcctaatcaagtgctgcgacattagcaacgaagtcagaccaatggaggtagccgaaccgtgggtcgactgcctcctcgaagagtacttcatgcagtcggaccgcgagaagtcagaaggcttacctgttgcccccttcatggacagagataaggtgacaaaagctaccgcgcagatcggcttcattaaatttgtgctgattcccatgttcgagacagtgactaagctgttccctatggtggaggagataatgctgcagcccctgtgggagtctagggacaggtatgaggaactgaagcgaattgacgatgcgatgaaggagctgcagaaaaagactgatagcctcacaagcggcgcaaccgagaagagtagggagcgctcccgcgatgtgaaaaactccgaaggcgactgcgcttag

SEQ ID NO: 199374 - DNA, 1401 bp, synthetic construct
  misc_feature 1..1401: note = Description of Artificial Sequence: Synthetic coding sequence
  source 1..1401: mol_type = other DNA
atggacgccttccggagcaccccctacaaggtgcggcccgtggccatcaaacaattgagcgagagggaggagcttatccaatcagtgttagcccaagtcgccgaacagttcagccgggcattcaaaatcaatgagctcaaagctgaggtcgccaaccatctcgccgtgctggaaaaacgggtggagctggaggggctcaaggtagtggagattgaaaagtgcaagagcgatattaagaaaatgcgagaggaattggcagcaaggagttctcggaccaactgtccctgcaagtacagtttccttgacaaccacaagaagctgacgccacgaagagacgttcctacttaccccaagtacctcctgtcccccgaaacaattgaagctcttcgcaagcccactttcgacgtctggctgtgggaacccaatgagatgttaagctgcctcgagcatatgtatcatgacttaggtttggttcgcgatttcagtataaacccagtgacacttcggcgttggctgttctgcgtacacgacaactatcgaaataaccccttccataactttagacattgtttttgtgtagcacaaatgatgtacagcatggtctggctctgttccctccaagaaaagtttagtcagacagacattttgattttgatgaccgctgctatttgccacgacctagatcatcctggctacaataatacatatcagatcaacgcaaggaccgaactcgcggtccgatacaatgatatctcacctctcgaaaaccaccactgcgccgtggcgtttcagattttagccgaacctgaatgtaatatcttcagcaatatcccccctgatggattcaagcagatccgacagggcatgataacgctcatcctggccaccgacatggctagacatgctgagattatggacagttttaaggaaaaaatggagaacttcgattactcaaacgaggaacacatgactctgctgaagatgatccttatcaagtgttgtgacatctccaatgaggtcagaccaatggaagtggcagaaccctgggtggattgtcttctggaggaatacttcatgcaatccgaccgggagaagtctgaaggcttgcccgtagcccccttcatggatcgggacaaagtaacaaaggctacagcccagatcggcttcataaaattcgtcctcattccaatgtttgagactgtcaccaaacttttcccaatggtggaagagatcatgttacagccactctgggaatcacgggatagatatgaggagttgaagaggatcgacgacgccatgaaggaacttcagaagaagaccgacagcctgacttcaggggctactgaaaagagtcgcgaaagatcgcgggatgttaaaaatagcgagggggattgcgcctag

SEQ ID NO: 199375 - DNA, 1659 bp, synthetic construct
  misc_feature 1..1659: note = Description of Artificial Sequence: Synthetic coding sequence
  source 1..1659: mol_type = other DNA
atggacgccttccggcggaacaccaccatcagcctgctgaccaccgacgatgcaatggtttctatagatccgacgatgcccgcaaacagcgaaagaactccatacaaagtgagaccggttgcgatcaagcagctcagcgcaggggtagaggataaaagaacaacaagtcggggacagagcgccgaacgccccctgagggacagacgcgtcgtgggtcttgagcagcctcgcagggagggcgcctttgagtcaggtcaggtcgaaccccgcccccgtgagccacaggggtgttaccaagaggggcagcgaatcccccctgaacgggaagagctgattcagagcgtgctggcacaggttgcagaacaattcagccgtgccttcaagatcaacgaacttaaagcagaagtggctaatcatttggccgtcctagaaaagagggtcgaactggaaggcttgaaggtggtggaaatcgagaagtgcaagagcgatatcaagaagatgcgggaagagctggccgctcggtcctcaaggacgaattgcccttgtaagtactcgttcttggacaaccacaagaagctcacacctagacgcgatgtgcctacgtatccaaagtacttgttaagccccgagactatcgaagccctgcgaaaacctacctttgacgtgtggctgtgggagcccaatgagatgctcagctgtctggagcacatgtatcatgacctcggactagtccgagacttttctataaacccagtaactttaaggcgctggctgttctgtgttcacgacaattacagaaacaatccctttcataacttcaggcattgcttctgtgtagcccagatgatgtactctatggtgtggctctgcagtctgcaagagaaattctcccagacagatatactgatcctgatgaccgctgccatttgtcacgatctagatcaccccggatataataacacatatcaaataaatgccaggacggaattagctgtccgctacaacgacatatccccattggagaatcatcactgtgctgtggctttccagatcctggctgaaccagagtgcaatattttctccaacatccctccagacgggtttaagcagataagacagggtatgatcacactgatcctcgccaccgatatggcaagacacgctgaaataatggatagcttcaaagaaaagatggaaaacttcgattattctaacgaggagcatatgactttacttaagatgatcttaatcaaatgctgcgacatatccaacgaggtacgccccatggaagttgccgagccttgggtcgactgtttgttagaagaatacttcatgcaatcggaccgggagaaaagtgagggcctgccggttgcaccctttatggaccgcgataaggtgacaaaggccacagctcagatcggcttcattaaattcgtattgatcccaatgttcgagacagttacaaaattgttccctatggtggaggagattatgctgcagcccctgtgggaatcccgggatcgctatgaggaactgaagcgaattgacgatgccatgaaggaactgcagaaaaagactgatagtctgaccagtggggcaaccgagaagtcccgagagagatctagggatgtgaaaaattctgaaggcgattgcgcatag

SEQ ID NO: 199376 - DNA, 1302 bp, synthetic construct
  misc_feature 1..1302: note = Description of Artificial Sequence: Synthetic coding sequence
  source 1..1302: mol_type = other DNA
atggacgccttccggcgggccttcaagatcaacgagctgaaggccgaggtggcgaatcacctggccgtgttggagaagagagtggaactcgaaggacttaaggtggtggagatcgagaaatgcaagtctgacataaaaaagatgcgagaggaactggctgctcgctctagcagaacgaattgcccctgtaagtattctttcttagataatcacaaaaagctaacacccagaagagacgtccctacatatcccaagtaccttctttctccagagaccatcgaggctctgcgtaagccaacttttgatgtgtggctgtgggaacccaacgaaatgctgtcatgtctggagcacatgtaccacgacttagggctggtgagggatttctcgatcaatccagtcaccttacgacggtggctgttctgtgtgcatgacaactaccggaataacccctttcacaacttccgccactgcttctgtgtcgctcagatgatgtattctatggtgtggctttgttccttgcaggagaagttttctcagaccgatatcctgattcttatgactgccgcaatctgtcacgatcttgaccatcctggatacaacaatacctatcagattaacgcaaggaccgaactggcagtgaggtataatgatatctcacccctggagaaccatcactgcgcggttgcctttcaaattctcgccgagccagaatgtaacattttttccaacattccaccggacgggtttaagcagattcgacaagggatgataactcttatactcgccaccgacatggcaagacacgcagagataatggacagcttcaaagaaaagatggagaattttgactacagtaatgaggaacatatgaccctcctgaaaatgatactgatcaagtgttgtgacatttctaacgaggttagacccatggaggttgctgaaccttgggtggattgtctgctggaagagtattttatgcagtctgatcgagaaaagagcgagggtttacccgttgcgccctttatggatcgcgataaagtaaccaaagcaaccgcgcaaattggatttatcaaatttgtgcttatcccaatgttcgagactgtgactaagctcttccctatggtggaggagatcatgctgcagcctctgtgggagtcccgcgatcgttatgaagaattgaaacgcattgatgatgccatgaaggagctgcaaaagaagactgattctctcacctccggtgcgaccgaaaagagccgggagaggtcgcgggatgtcaaaaactccgagggagattgcgcctag

SEQ ID NO: 199377 - DNA, 1380 bp, synthetic construct
  misc_feature 1..1380: note = Description of Artificial Sequence: Synthetic coding sequence
  source 1..1380: mol_type = other DNA
atggacgccttccggcggaacaccaccatcagcctgctgaccaccgatgacgctatggtctcaatagaccctacaatgcccgctaattctgagcgcgcattcaaaattaatgagttgaaagccgaagtggctaaccacctggctgtgctcgaaaagagagtggagctggagggcctgaaggtggtggaaatcgaaaagtgtaagagtgatatcaagaaaatgcgagaagaacttgccgccagatcatccaggactaattgcccctgtaaatactctttccttgataaccacaagaaactgacacctcgccgggatgtaccaacctatcctaaatatttgctctcccctgagaccattgaggcactgagaaaaccaacattcgacgtctggctgtgggaacctaatgaaatgctgtcctgtctcgagcatatgtaccacgacttgggtctcgtgcgcgatttctcaatcaacccggtgacccttcgtcgctggctattctgtgttcacgacaactatcgtaataacccgttccataatttccggcattgcttctgtgttgctcagatgatgtacagtatggtttggctatgtagcttacaagaaaagttcagtcagaccgacatccttatcctgatgaccgcggcaatatgccacgacttagatcatccgggctataacaatacttatcagattaacgcccgaacggaactagccgtgcgctacaatgacataagtcctctcgaaaaccatcactgtgcagtggccttccagatattggctgagcccgaatgtaacatcttctctaatattccacccgacggattcaagcagattcgtcaagggatgataaccttgatcctggccactgacatggcaaggcacgccgaaatcatggacagtttcaaagagaaaatggaaaattttgactatagtaatgaagagcatatgacgctactgaaaatgatcttgataaaatgttgtgacattagtaacgaagtgaggcccatggaggtcgctgaaccctgggtcgattgcttacttgaagagtactttatgcagagcgatcgtgagaaatcggaggggctcccagtggccccctttatggatcgagacaaggtaactaaggccaccgctcaaattggattcatcaagtttgtcttaatcccgatgtttgaaaccgttacaaaactgtttccaatggtggaggagatcatgctgcagccgttatgggagtccagagatcgctacgaagagctgaagcgcatcgatgatgcaatgaaagaattacagaagaaaactgactctttaaccagtggcgctacagagaagagtcgagagcgttccagggacgtaaaaaattccgaaggggactgcgcatag

SEQ ID NO: 199378 - DNA, 1581 bp, synthetic construct
  misc_feature 1..1581: note = Description of Artificial Sequence: Synthetic coding sequence
  source 1..1581: mol_type = other DNA
atggacgccttccggagcaccccctacaaggtgcggcccgtggccataaagcagctctccgccggggttgaagacaagagaaccacctctcgggggcagtcggctgagaggcctttgcgagataggcgtgtggtgggcctggaacaaccaagacgcgagggagcattcgagtctgggcaggtggaacctcggccccgtgaaccacagggctgctatcaggaagggcagagaattccccctgagcgcgaagagctgattcagagtgtcttggcccaggtcgccgagcagttctctcgcgcattcaagatcaacgaattgaaagccgaggtggctaatcacctggctgtgctcgagaagcgagtggaattggaaggcctcaaagtggtcgagattgaaaaatgtaaaagtgacatcaaaaagatgagggaggaacttgccgctcgatcaagccggaccaactgtccctgtaagtacagttttctcgataaccacaagaaactgacgccccggagggacgtgcccacctaccctaaatacttgctgtctccagaaactattgaggctctccggaagcccactttcgacgtgtggttgtgggagccaaatgaaatgctatcatgcctcgaacatatgtatcatgatctgggacttgtgagggacttctccatcaatccggttacattgagaaggtggttgttttgtgtccatgacaactaccggaacaacccttttcataattttaggcattgcttctgcgtcgcacagatgatgtacagcatggtgtggctgtgcagtctccaagaaaaattttctcagaccgacattctgattctaatgacagcagccatttgccacgatctggatcatcctgggtataacaatacatatcaaataaacgcacggacagagctggccgtccggtataacgacatcagccctttggagaaccaccactgcgcggtcgctttccaaatccttgcagaaccagaatgtaacatcttcagtaatatcccaccagacggtttcaagcagatcaggcagggcatgattacactgatcctcgccactgatatggccaggcatgcggagatcatggattcattcaaagagaagatggaaaatttcgattattccaatgaagaacatatgaccctcctcaaaatgatactaattaagtgttgcgacatttcaaatgaagtaaggccgatggaagtggcagagccgtgggtggactgtcttctcgaagaatactttatgcaaagcgaccgagaaaagtctgagggcttgccagtggctcccttcatggatagggataaggttaccaaggccaccgcccagatcggcttcatcaaatttgtgctcatccctatgttcgagacagttactaaactgtttccaatggtggaggagatcatgctgcagccactgtgggagagtcgagatcggtacgaggaattaaagcgcatcgacgatgcgatgaaggaactgcaaaagaagacagattcattgactagcggcgcaacagaaaagagtcgagaacgctccagggatgtgaagaacagcgagggcgactgcgcttag

SEQ ID NO: 199379 - DNA, 1479 bp, synthetic construct
  misc_feature 1..1479: note = Description of Artificial Sequence: Synthetic coding sequence
  source 1..1479: mol_type = other DNA
atggacgccttccggcggaacaccaccatcagcctgctgaccaccgacgacgccatggtgagtattgaccccactatgcccgccaattctgagaggactccttacaaagttagacctgtggccattaaacaactttcggaaagagaagagctgattcagtcggttctcgcacaggtggctgagcagttcagtagagcttttaagataaacgaactgaaagctgaggtcgctaaccacctcgccgttcttgaaaagcgagtggagctggaaggtctgaaagtagtggaaattgagaagtgcaaatctgatattaagaaaatgcgggaggaactggcagcacgcagttccaggaccaattgcccatgcaaatatagtttcttggataatcacaaaaaattgacccccagaagggatgtccccacgtacccaaagtatctcctgagcccggaaaccatcgaggcccttcggaagccaacatttgatgtgtggctgtgggagccaaatgagatgctttcctgtctggagcacatgtaccatgatctcgggcttgtccgggacttctctatcaaccctgtcactctgcggcggtggcttttctgcgttcatgataactatagaaataatcccttccacaattttaggcactgtttttgcgtcgcccagatgatgtactccatggtgtggctctgtagtctccaggaaaagttcagccagacagatatcctgattctgatgactgccgctatctgtcatgacctggatcacccaggctacaacaatacctatcagattaatgctcgcaccgagctggccgttcgatataatgacatttcacccctggaaaaccatcattgcgctgtcgccttccagatcctggctgagcccgagtgtaacattttcagcaacatacctcctgatggcttcaagcaaatcagacaaggcatgatcacgctaattttggcaacggacatggcacgccacgcagagattatggattcttttaaggagaagatggaaaactttgattatagtaacgaggaacacatgaccctgctcaagatgattctcatcaaatgctgtgacatcagtaacgaagtacggccaatggaggttgccgaaccctgggtggattgccttctcgaggaatacttcatgcagagtgaccgagagaaaagcgaaggccttccggtggcgcctttcatggacagggacaaagtgacgaaggccactgcacagattggattcattaaattcgtactcattccaatgtttgaaacagtgaccaagttgtttcctatggtggaagagataatgttgcagcccctttgggagtcccgggatcgatacgaggagctgaaaaggatcgatgacgcaatgaaggagctgcagaaaaaaacggatagtttgacctctggcgccaccgagaagagccgggaacgctcgagagacgtgaagaattctgaaggtgactgcgcatag

SEQ ID NO: 199380 - DNA, 1524 bp, synthetic construct
  misc_feature 1..1524: note = Description of Artificial Sequence: Synthetic coding sequence
  source 1..1524: mol_type = other DNA
atgggcagcggcagcagcagctaccggcccaaggccatctacctggacatagatggccgcatccagaaagtcatttttagcaaatactgtaattctagtgacatcatggacctcttttgtattgcaacagggctccctcggactccctacaaggtccggcctgtggcaatcaagcagctcagcgaacgggaagaactcatacagagcgtcctggcacaagtggcagaacagttttctcgcgctttcaaaatcaatgaacttaaagcagaggtagcgaatcatctggctgtactggagaaacgggtcgagctggaaggccttaaggtggtggagatcgaaaaatgtaaaagcgacatcaaaaaaatgcgagaggagctggcggcgcggagctctcgcactaactgcccttgcaagtattccttcctcgacaatcataaaaaattaactccccgccgcgatgtgcctacataccctaaatatctcctgtctccggagacaatcgaggccctgcggaaaccgacctttgatgtttggctttgggaaccgaacgagatgttaagctgcctggagcacatgtaccacgaccttgggcttgtaagggatttctctataaaccccgtcaccctgagacgttggctattctgtgtgcatgacaactacagaaacaacccctttcacaattttcgtcactgtttctgcgtcgcgcagatgatgtattcaatggtctggctctgctccctgcaggagaagttctcccagacagacattctgattctgatgacggctgctatctgccacgacctggatcaccccggctataacaacacataccaaattaatgcccgaactgaattggccgtacggtataacgacatttcccccttggagaatcaccactgtgccgtggccttccagatcctcgccgagcccgaatgcaacatcttctctaatatccctcctgacgggttcaagcagatacgtcaagggatgattacgttgatcctggcgactgacatggcaaggcacgctgagattatggactccttcaaagaaaagatggagaattttgattattccaacgaagaacatatgacattattgaaaatgattctgatcaagtgttgcgacataagcaatgaggtgagacccatggaagttgctgagccctgggtggattgtctgttggaggagtatttcatgcagtcagaccgcgaaaaaagcgaggggctccctgtggcgccattcatggatagagacaaggtgaccaaagccacagcacagatcggcttcattaaatttgtgctgatccctatgttcgaaaccgttaccaaactgttccctatggtagaagagatcatgctgcagccgctgtgggagtctcgagacaggtacgaagagctcaagaggattgacgatgccatgaaggagctgcaaaagaagactgacagcctcacaagcggtgcaaccgaaaaatcacgtgaacgctctagagacgtcaagaattccgaaggcgattgcgcgtag

SEQ ID NO: 199381 - DNA, 1398 bp, synthetic construct
  misc_feature 1..1398: note = Description of Artificial Sequence: Synthetic coding sequence
  source 1..1398: mol_type = other DNA
atggacctgttctgcatcgccaccggcctgccccggaacaccaccatcagtttactgacgacagacgatgctatggtgagcatagaccccacaatgcccgcgaattccgagagagctttcaaaatcaacgagttgaaagcggaggtggctaaccatttagctgtgttggagaaaagggtcgagctggaggggcttaaagttgtcgagatagaaaaatgtaagtctgatattaagaaaatgcgcgaggaactagccgcaaggagctctcggactaactgcccctgcaaatacagcttcctggataatcacaagaagctgacacctagacgcgatgtgcccacctaccccaaataccttctgagtcccgagaccattgaggcactgcgcaagccaacctttgacgtctggctatgggagcccaatgaaatgttgtcgtgtctggagcacatgtatcacgatcttggtcttgtgcgagacttcagcataaacccagtaacactccggcggtggctgttttgtgttcacgacaattaccggaacaatcctttccacaattttaggcactgcttttgcgtggctcagatgatgtattctatggtgtggctttgcagcttgcaggaaaagttctcacagaccgacatcctcattttgatgaccgctgccatctgccatgacttggatcacccaggctacaacaatacctatcagatcaatgctagaaccgagctggctgtccgctacaatgatatttctcctctggaaaaccatcactgtgccgtcgccttccaaatcctggccgagcctgaatgtaatatttttagtaatatccccccggatggtttcaaacagattagacagggtatgatcactctgatactggccactgatatggcgcggcacgcggagattatggactccttcaaagaaaagatggagaacttcgactactctaatgaggagcatatgaccctattaaagatgatactaataaagtgttgtgatatcagcaacgaggtcagacctatggaggtcgctgagccatgggtagactgtttactggaagagtatttcatgcagagtgaccgtgagaagtccgaaggactacccgtcgcaccctttatggaccgagataaagtgacgaaggcgaccgcgcaaatcggtttcattaaattcgttctcattccgatgtttgaaactgtgaccaaactgttcccaatggtggaagaaatcatgctccagcccctatgggagtcccgtgataggtatgaagaattgaaaaggatcgacgatgccatgaaggagttgcagaaaaagaccgacagcttgacctctggggccactgaaaagtctcgagaacgatctcgcgatgttaaaaattctgagggggactgtgcgtag

SEQ ID NO: 199382 - DNA, 1869 bp, synthetic construct
  misc_feature 1..1869: note = Description of Artificial Sequence: Synthetic coding sequence
  source 1..1869: mol_type = other DNA
atgcccccccagctgcagaacggcctgaacctgagcgccaaggtggtccagggctcactcgactctcttccccaggcagtgcgggagtttctggaaaacaacgctgagctgtgtcagccagaccacattcacatctgcgacgggagcgaagaggagaacgggcggctactgggacaaatggaagaagagggcatattgcggcggctcaaaaaatatgacaactgctggttagccctcaccgacccccgagacgtagcccgtatcgagagcaaaacagttatcgtgacacaggagcagcgagatacagtcccaattcctaagacagggctttcccaattgggccgatggatgtccgaggaggattttgaaaaggcttttaacgcacggtttcccggctgcatgaaagggcgcacgatgtacgtgatcccgttcagtatgggcccactgggctcacccctgtctaaaattgggattgaattaaccgactctccctacgtcgtcgcctccatgaggatcatgacccggatgggaactcctgtgctggaagctgttggcgacggcgagttcgtcaagtgcctgcacagtgttggctgtcccctccctcttcagaagccactcgttaacaactggccatgcaacccagaacttactcttatcgcccacctccctgatcgtagagagataatctccttcgggtccggttatggcggcaactccttacttggaaaaaagtgttttgcacttcgtatggcctcccgcctcgccaaggaggaaggttggctggctgaacacatgcttatcctggggattactaatccagaaggggagaaaaaatatctggctgcagccttccccagtgcgtgtggtaaaaccaatctggccatgatgaatccctcacttcctggctggaaagtggagtgcgttggggacgatattgcctggatgaagtttgacgctcaaggccacctgcgcgccataaatcccgaaaacggctttttcggagttgcacccggaacgtcagtgaagactaatcctaatgctatcaagactattcagaaaaacacaattttcaccaacgttgccgaaacttctgacggtggagtttactgggaggggatcgacgagcctctggcttctggcgtgaccatcacctcttggaaaaacaaggaatggagctcagaggacggggagccatgtgcacatcccaactctaggttttgtacaccagcctcccagtgtccaattatagacgcagcttgggagtctccagaaggggtacccatcgagggtattatatttggcggccgccggccggccggtgttcccctcgtgtacgaagcactgagttggcagcacggagtcttcgttggtgccgctatgcggagcgaagcgacagcagccgccgagcataaaggtaaaatcatcatgcatgatccattcgccatgcggcccttttttggctacaacttcggaaaatacctagctcattggctgtcaatggcacagcaccccgccgccaagctccctaagattttccacgttaattggttccggaaagataaagagggcaaatttctgtggccgggttttggggagaattctcgggtcctagagtggatgttcaaccgcattgatggaaaggcctctaccaagctgacacctattggctatatcccaaaagaagacgccctcaacctgaagggactaggccacatcaacatgatggaactgttctccatttcaaaggaattttgggaaaaggaggtggaggatatcgaaaagtaccttgaagatcaagttaatgccgaccttccatgcgaaatcgaacgtgaaattcttgccctaaagcagcgcatttcccagatgtag

SEQ ID NO: 199383 - DNA, 942 bp, synthetic construct
  misc_feature 1..942: note = Description of Artificial Sequence: Synthetic coding sequence
  source 1..942: mol_type = other DNA
atgaccaccggccggaccatgtacgtgatccccttcagcatgggcccccttggttcccccctgagcaaaatagggattgaactgaccgattcaccctatgttgtggcctctatgcgcatcatgacacgaatgggtacacctgtgttggaagcagtgggcgacggcgaattcgtgaagtgcctgcacagtgttggctgtcccctacccctgcagaagcctttggttaataactggccatgcaaccctgagctgacccttatagctcatctgccggatcgcagggagataatttcattcggaagcgggtacggaggtaactcactgctgggtaaaaaatgttttgcactgcgcatggctagtcgcctcgccaaagaggagggctggctggcagagcacatgctcattcttggcattactaaccctgagggcgaaaagaaatatcttgcagccgccttcccaagcgcctgtgggaaaactaacctggctatgatgaaccccagcctcccaggctggaaagtagagtgtgtcggcgacgacatcgcctggatgaagtttgacgcccaagggcaccttcgcgcgataaatcctgaaaacggattcttcggtgtggcgccgggcacaagtgtgaagactaaccctaacgccatcaagaccatacaaaagaacacaatttttaccaatgtggccgagacttctgacggcggcgtctactgggaaggtatcgacgagccactcgcctctggcgttaccattacttcgtggaagaataaagagtggtcctctgaggacggggtaagtctgccagaagccttggtgtgtagggcggccggaactgcttgcttaagccaggccctcacttctctgtcactgtcatatcgaggtacactctgcccaccccagctcgaagtgctacatccgtgccagccagtcccccaccactag

SEQ ID NO: 199384 - DNA, 915 bp, synthetic construct
  misc_feature 1..915: note = Description of Artificial Sequence: Synthetic coding sequence
  source 1..915: mol_type = other DNA
accaccggccacctgcgggccatcaaccccgagaacggcttcttcggtgttgcacccggcactagtgtaaagactaacccgaatgcaattaagactatacagaagaacaccatatttacgaacgtggcagagacttcagatggaggcgtgtactgggagggaatcgatgagcctctagccagtggtgtcacaattacttcatggaaaaataaggagtggtcatccgaagatggggaaccatgtgcccaccccaacagccgcttctgtacacctgcaagccagtgtccaatcattgatgcggcgtgggaatcaccagagggggttcccattgagggaattatatttgggggtaggcggcccgctggcgtaccactcgtgtatgaggcgctttcttggcagcacggggtattcgtgggtgctgcaatgaggtcagaggcgacagctgcagcagagcacaaaggtaagatcattatgcacgatccatttgctatgaggccttttttcgggtataacttcggcaagtaccttgcgcactggctgtccatggcccagcaccccgcggctaagctgcccaagatttttcatgttaactggtttaggaaggataaagaagggaagtttctttggccagggttcggagaaaatagtagagttctggagtggatgttcaatcggatcgatgggaaggcctccacaaagctgacccctattgggtacattcctaaggaggacgccctcaacctgaagggattgggacatattaatatgatggaattgttctccatttccaaggagttttgggagaaggaggtcgaggacattgagaagtatctcgaagaccaggtgaatgccgatttaccctgtgaaattgagcgggagatcctggctctcaagcaaaggattagccaaatgtag

SEQ ID NO: 199385 - DNA, 918 bp, synthetic construct
  misc_feature 1..918: note = Description of Artificial Sequence: Synthetic coding sequence
  source 1..918: mol_type = other DNA
atgaccaccggccacctgcgggccatcaaccccgagaacggcttctttggcgtagcccccggcactagcgtgaagacgaatccaaatgccattaaaaccatccaaaaaaacacaatatttacaaatgtcgctgaaacttcagacggcggggtgtactgggagggcattgacgagccgctggcatcaggtgttaccatcaccagctggaagaataaagaatggagctctgaagacggagagccctgtgcccatccaaatagccggttttgcaccccagcatcacaatgccctattattgatgcagcctgggagagtcccgagggagtgccgatagagggcattatcttcggcgggagacgcccggcaggagtgcccttggtgtatgaagctttatcctggcagcacggcgtgtttgtgggagccgcaatgcgaagtgaggcaacagcagctgcagaacacaagggcaagataatcatgcatgatccgtttgccatgcgtccattcttcggatacaatttcggaaaatacctagcacattggctctcaatggcccaacatccagcagctaaactgcctaagatcttccacgtaaactggttcaggaaagacaaagagggcaaatttttatggccaggtttcggcgagaattcacgagtgcttgaatggatgtttaataggatcgacggcaaagcctctaccaagctgactccgatcgggtacatccccaaggaggatgccctgaacttgaagggcctggggcacattaatatgatggaattgttctccattagcaaggagttctgggagaaggaagtcgaggacatagaaaaatacctggaggatcaagtgaacgccgatctaccctgcgaaatcgaacgcgagattttagcgttgaagcagcggatatctcagatgtag

SEQ ID NO: 199386 - DNA, 1674 bp, synthetic construct
  misc_feature 1..1674: note = Description of Artificial Sequence: Synthetic coding sequence
  source 1..1674: mol_type = other DNA
atgagcgaccccgagatgggctgggtgcccgagccccccaccatgaccctaggcgcgtctcgtgttgagctacgggtttcttgccacggcctactggatcgtgacacattaacaaaaccacacccgtgtgtcctgttgaagctgtacagcgacgaacaatgggtcgaagtagagcggacagaggttctgcgcagttgttcttccccggtcttctcacgggtcttagctctggagtattttttcgaggagaagcagcccctacagttccacgtattcgatgccgaggacggggccaccagcccccgcaatgacacatttctgggctccactgagtgtaccctgggtcaaatcgtctcccagaccaaagtgaccaagcctctcctgctgaagaatggaaagaccgcaggcaagtcgaccatcaccatagtagctgaagaagtctctggcactaatgactacgtccagttgacctttagggcctataagctcgataataaagacctgtttagtaaatccgacccctttatggagatctacaaaaccaacgaagatcagtcagaccaactggtatggcggacagaggtggtgaagaataacctgaacccctcttgggaaccatttcggttgtcactgcacagcctgtgctcctgcgatgtgcacaggcccctaaagttcctagtctacgattacgattcgagtggaaagcacgactttataggagagttcacaagcaccttccaggagatgcaggaaggcactgctaatcctggacaggaaatgcaatgggattgcatcaatcctaagtaccgagataaaaagaagaattataagtcctccggcaccgtagtcttagcccagtgtaccgtcgagaaggtccatactttcttagactacattatggggggatgccagatcagttttaccgtcgcaattgactttacggctagcaatggtgaccccagatcctctcagagcttgcactgtctgtccccaagacagcctaaccactacttgcaggctctcagagcagtgggaggaatatgccaggactacgactctgacaagcgattccctgcattcggtttcggtgcacggatcccccctaatttcgaggtgtcccatgacttcgccatcaactttgacccagagaatcctgagtgcgaagaaatcagtggggtgatcgcaagttaccggcgctgtctgccccagatccagctttacggtcccacaaacgtggcccctatcatcaatcgcgtggccgagccagcccagagggagcaaagcactgggcaggccacaaagtactctgtcttgcttgttctgacagacggagtcgttagcgatatggcggagacccgaacagctatcgtcagagcaagccggctccctatgagtatcatcattgtgggagtcgggaatgccgacttttccgacatgagactgctggacggggatgacggacctcttaggtgccctaggggcgtgcccgccgcacgagacattgtgcagtttgtgcccttccgggactttaaagatgccgcaccgagcgcactggccaaatgcgtgctggcagaggtgccaagacaggttgtcgagtattatgcctcccaaggcattagccctggtgctccaagaccttgcaccctggctacaacacctagccctagcccatag

SEQ ID NO: 199387 - DNA, 1326 bp, synthetic construct
  misc_feature 1..1326: note = Description of Artificial Sequence: Synthetic coding sequence
  source 1..1326: mol_type = other DNA
atggccgccctgtaccggcccggcctgcggctgaactggcacggcctaagccctttgggctggccaagctgtcggagcatccagacacttcgcgtactgtctggcgacttgggacagctcccaacaggcatcagggatttcgtcgaacatagcgcccgtctctgtcagcctgaaggaattcacatatgcgatgggacagaagcggaaaataccgctactctgaccctgctggagcagcaaggacttatccggaagctgcccaagtataataactgctggctcgccaggactgaccctaaggatgtagcccgcgtggagagcaagacggtgattgtgacgccatctcagcgggataccgtccagttaccaccgggaggcgcacgggggcagctcggcaactggatgagccctgccgacttccagcgtgctgttgatgagcgcttccctggctgcatgcaagggagaaccatgtacgtgcttcctttttctatgggcccagtcggctccccactgagcagaatcggagtccagctgacagattcggcatacgttgtggctagtatgaggatcatgacacgactgggaacacccgtgctgcaggcattgggcgacggggattttgtcaaatgcctgcattccgtgggccagccactgactggacaaggcgaaccagtgtcccagtggccttgcaatcccgaaaaaacgctgattggtcatgtgcctgatcaaagagagatcatatcatttggatccgggtacggcggaaactcgctgctcggcaaaaaatgttttgccttgcggatcgccagtcggctagcacgagacgaaggctggttggccgaacacatgctgatattgggaatcacgagtccagctggcaagaagcgctatgtggcagcagcctttccctccgcatgtggtaagactaacctcgcaatgatgagacccgcacttccgggctggaaggtggaatgtgtaggtgatgacatcgcctggatgaggttcgactccgagggccggctgagggcgattaatccggagaacggattcttcggtgtggcgcccggcacaagtgccacaaccaatcctaacgccatggccacaatacagtcaaacacaattttcaccaatgtggccgagaccagcgatggcggagtgtactgggaggggatagaccagccattgccgccaggagtgaccgtgacttcatggcttggtaaaccttggaagcctggcatgtgtgggggagaaggggtggcacagccaccaggactgagcacccttatggttgagaagttgtccccccagccacctaccatcttttag

SEQ ID NO: 199388 - DNA, 1521 bp, synthetic construct
  misc_feature 1..1521: note = Description of Artificial Sequence: Synthetic coding sequence
  source 1..1521: mol_type = other DNA
atgagccccgccgacttccagcgggccgtggacgagcggttccccgggtgtatgcagggccggaccatgtacgtgctgccattttcaatgggccccgtcggctcacctctgagtagaattggggtgcagctgactgacagtgcttatgtcgtggcgagcatgcgtattatgaccagactgggcacacctgtgctgcaggccctcggggatggtgatttcgttaaatgccttcactctgttggccagcccctgactggccagggtgagcctgtgtcacagtggccatgcaatcccgagaagaccctcatcggccacgtacctgaccaacgcgaaatcataagtttcggatcagggtatggtggcaacagtctgctgggcaaaaaatgctttgctttaagaatcgccagtcgacttgccagagatgaaggctggctcgccgagcacatgctgattctcggcataaccagcccagccgggaaaaagcgatatgtagctgccgcatttcccagcgcctgtgggaaaactaatctggctatgatgcggcctgccctgcccggctggaaggttgaatgcgtcggcgacgatattgcctggatgcgttttgattcggaggggcgcctgagagccattaatccagagaatggattcttcggggtggcgcccggcacctctgcaaccactaatcccaacgctatggctaccatccagagtaacaccatctttacaaatgtggctgaaactagcgatggcggtgtgtattgggaaggcatcgaccagcccctcccccccggagtcactgtaactagctggctaggtaagccgtggaagccaggggataaagagccctgcgctcatccaaactctcggttttgcgctcccgcccgccagtgtccaatcatggaccctgcctgggaggccccagagggtgtccccatcgacgcgattattttcggcggacgacggcctaagggcgtcccactagtgtacgaggccttcaattggaggcatggtgtatttgtcggaagcgcaatgcgaagcgagagtaccgcagctgctgagcacaaggggaagattattatgcatgacccttttgctatgcggcctttcttcggctataattttggacactacctcgaacattggctgtctatggaaggccgaaagggagcgcaactgccacgaatcttccacgttaattggttcaggagagatgaagcaggtcactttctttggcctggctttggcgagaatgcgcgcgtcctggactggatttgtagaagactggagggcgaagatagcgctagagagacccctataggtctggtgccaaaggagggcgctctcgatctgtcaggcctcagggcaattgacacaacccagctgttcagccttccaaaagacttctgggagcaggaggtcagagacatccgatcctacctgaccgagcaggtcaaccaggatctcccgaaagaagttctggcggagctggaggccctggaaaggcgggtccacaagatgtag

SEQ ID NO: 199389 - DNA, 1521 bp, synthetic construct
  misc_feature 1..1521: note = Description of Artificial Sequence: Synthetic coding sequence
  source 1..1521: mol_type = other DNA
atgagccccgccgacttccagcgggccgtggacgagcggttccccggatgcatgcaaggtcggacaatgtacgtactgccgttcagtatggggccagtcggaagtccactgtcacgtatcggggttcagctgaccgattctgcctatgtagtcgccagcatgaggattatgacccgtctgggaacccccgtccttcaggctctgggagacggggatttcgtcaaatgcctgcactccgtcggacagcctcttacaggtcagggagagccggtgagtcaatggccctgtaaccccgaaaagacattgatcggccacgtgcctgaccagcgcgagattatttccttcggcagcggctacggcgggaacagcctgctgggcaaaaaatgttttgctttgaggattgcctcgaggctggcaagggatgagggctggctggctgaacacatgttaatacttggtataacatccccagctgggaaaaaaagatacgtggccgccgcattcccgtccgcttgcggcaagactaacctagctatgatgcggcctgccttgcctggctggaaggttgagtgtgtgggtgacgacatcgcttggatgaggtttgatagtgaaggtcggctgcgggcaatcaatcccgaaaatggattcttcggggttgcgccgggaactagtgccaccacaaatcctaatgccatggcaaccatacagagcaataccatatttaccaacgtcgctgagacaagcgacggcggcgtgtactgggagggtatcgatcagccgctgcctcctggggtcactgtcactagttggttaggtaagccatggaagccgggagataaagagccctgcgcccatccaaacagtcggttctgcgctccagcaagacagtgcccaataatggaccccgcctgggaagcgcctgaaggcgtgccaatagacgctattatctttgggggaaggagaccaaagggtgtgccgctagtgtatgaggccttcaactggcgccatggcgtgttcgtggggagtgctatgcgctctgaatccacagctgccgcagagcacaagggaaagatcataatgcatgatccgttcgcgatgcgaccctttttcggttacaatttcggtcattacttagagcattggctgtctatggaagggcgaaaaggtgcccagttgcccaggatcttccatgtcaactggtttagacgcgacgaagctggccatttcctttggccaggattcggagaaaacgccagggtcctagattggatttgccgtcgccttgagggggaagattcagcccgcgaaacgccaattggcctagtgcctaaagaaggtgcactcgacctgagtgggctcagggccatcgataccacccaactgtttagccttccgaaggatttttgggagcaggaagtaagagacatccggtcctacctgaccgagcaggtcaaccaggatttaccaaaagaagtgctggcggagctggaggccctggagagaagagttcataagatgtag

SEQ ID NO: 199390 - DNA, 2343 bp, synthetic construct
  misc_feature 1..2343: note = Description of Artificial Sequence: Synthetic coding sequence
  source 1..2343: mol_type = other DNA
atggccgccgtggacctggagaagctgcgggccagcggcgccggcaaagcaattggcgtgcttacaagtggcggcgacgcccagggcatgaacgctgccgtgagggccgtcacccgcatgggcatttatgttggagccaaggtgtttctgatctacgaaggatacgagggcctagtcgaaggcggggagaacattaagcaggccaattggttgtctgtctccaatattatccagttgggcggaactattatcggcagtgccagatgtaaggcttttaccacccgagagggcagaagggcagctgcctacaatctagtgcaacacggcatcacgaacctctgtgttatcggcggggatggtagcttgaccggtgcaaacatctttcggtcagaatggggatcgttgttagaggagcttgtggctgagggaaaaatctcagagaccacagctagaacctactctcatctgaacattgctggactggttggttccattgacaatgacttctgcggcacggacatgaccattggcacagacagcgcccttcataggattatggaggtgatagatgccatcacaacaacggctcagagccatcagagaacttttgtcctggaggtcatgggaaggcattgtggatacttggcactcgtgtctgccctggccagcggtgctgactggctgttcattcccgaagcccccccggaggatgggtgggaaaactttatgtgcgagaggctaggggaaaccaggtccaggggctccaggcttaatattataattattgctgagggggcaattgatagaaacggcaagcccatcagcagcagctacgtcaaggacctggttgtgcagagactgggcttcgatactcgcgtgacggtcctcggacatgtgcagcgtgggggcacaccgtcagcctttgacaggattctgtcctccaaaatgggtatggaggccgtgatggctctcttagaggccacaccggacacaccagcatgcgtggtgacactcagcgggaatcagtccgtgcggctgcccttgatggaatgcgtgcaaatgacgaaggaagtacagaaagcgatggatgacaaacgattcgacgaggctacacaactgcgcggtggctcctttgagaacaactggaatatttacaaactgttggctcaccagaagcccccaaaagagaagtccaatttcagtctggccattctgaacgtgggagcccccgcggcaggaatgaacgcagccgtgaggagtgcagttaggacaggcatttcccatggtcacacagtttatgtagtgcatgatggtttcgagggcctagcaaaggggcaggtgcaggaagtgggatggcatgacgttgctggctggctgggacgcggtggatcaatgctgggaaccaagcggacgctgcccaagggccagctggagtccatcgttgagaatattcgtatctatgggattcatgcattacttgtggtgggagggttcgaggcttacgaaggggttttgcagctcgtagaggcccgcggcaggtacgaggaattatgcattgtcatgtgcgtcatacctgccacaatttcaaataatgttcctggtactgatttttcactggggtccgacacagccgtgaacgcagccatggagagttgcgatagaataaaacagtccgcctccggcaccaagcggagggtgtttattgtggagacgatgggcggttactgtggctacctagctaccgtgaccggcatcgctgtcggagcggatgccgcttatgtgtttgaggaccccttcaacattcacgacctcaaggtcaacgtggagcacatgacggagaagatgaagaccgacattcagcgggggctagtcctgaggaacgagaagtgtcacgactattacaccacagaattcctgtacaacctgtattcctcggaagggaagggcgtgttcgattgccgcactaatgtgttaggccacctgcagcaggggggtgcccccaccccttttgacagaaactatggcacaaaacttggggttaaagcgatgctctggctgtctgagaagctgcgggaggtgtacagaaaaggcagagtctttgcaaacgctcccgactctgcatgcgtcattggtctgaagaagaaggcggttgcattctcaccagtgacagagcttaagaaggacactgacttcgagcaccggatgccccgggagcagtggtggctgtctctccggctgatgctcaaaatgctagctcagtatcgcatttcaatggcagcatacgtctctggggagcttgaacacgtgactcgtcgtaccctgagtatggataagggcttctag

SEQ ID NO: 199391 - DNA, 762 bp, synthetic construct
  misc_feature 1..762: note = Description of Artificial Sequence: Synthetic coding sequence
  source 1..762: mol_type = other DNA
atgcggagcatgtgcaaccagggccggggccgggagagcagccggggtggactgcatgtacaggggagctgcaggggattgtcccggtcgccccaacaggagacaggatttgccaaagctcccgcagggacggattgtttcttccactgttcccccggcagtcgggggcaaggggacagaaaggaggaggttacatctgagcctggcggcacgtccatcatgtctcgcctcggcggaatgaacgctgccgtgagagctgtaaccaggatgggtatctacgtcggagccaaggtgttcctgatctacgagggttacgaaggcctggtggaggggggagaaaacataaagcaggctaactggctctctgtctccaatatcatccagctcggcggcacgatcatcggtagcgcgaggtgtaaagcattcaccacaagagaaggtaggcgtgccgccgcatacaatctggtgcaacatggcattacaaacttatgcgtcatcggaggagacgggagtctgacgggggctaacatctttcgcagcgaatgggggagcctcctggaggaacttgttgccgaagggaagatttctgaaaccaccgctcggacctattcacacctcaatatcgcaggactggtgggttccattgacaacgacttctgtggcacggatatgaccatagggacagatagtgccctgcaccggattatggaagtcatagatgctataaccactagaggccgacttggtgagctgcacgtgtag

SEQ ID NO: 199392 - DNA, 2484 bp, synthetic construct
  misc_feature 1..2484: note = Description of Artificial Sequence: Synthetic coding sequence
  source 1..2484: mol_type = other DNA
atgtgcaaccagggccggggccgggagagcagccggggcggcctgcatgtgcaaggatcttgccgaggtctctccaggtctcctcagcaggaaacaggatttgccaaagcaccagccggaactgactgttttttccactgcagccctggttcccgaggccagggggatcgaaaggaggaggtgacctctgaaccagggggaacatcaattatgagcaggctgggcggaatgaatgccgctgtgcgagctgtgacccggatgggcatctacgtgggggcaaaagtgttcctgatttacgaaggatacgagggtctggtggagggcggcgagaatattaaacaagcaaattggctctccgtgagcaacataattcagttggggggaacgatcattggaagcgccagatgcaaggcctttacgacacgggagggaaggagggcggctgcgtacaacctggtgcagcacggtataaccaacctctgtgtcatcgggggcgacgggagcttaacaggagctaacatctttaggagcgaatggggttcactgttggaggaacttgtggccgagggtaagataagtgaaacaaccgctcggacttacagccatttgaacattgctgggctggttggatcaatcgataatgacttctgtggtactgatatgacaatcggcacagatagcgcacttcacaggatcatggaagtcatagatgccattacgaccacggcccagtcccaccagagaaccttcgttctggaggtcatgggtagacattgcggctacctggccctggtgagtgctctggcatccggtgcggattggctctttatccccgaggcccctccggaggatggatgggagaacttcatgtgtgagcgccttggagagacccgaagcaggggaagtagattgaacatcattatcattgctgagggcgctattgataggaatggcaagccaatctcaagttcatacgtgaaggatctcgttgtgcagcgcctgggattcgatacacgggtcacagtactgggacacgtgcagaggggtggcaccccgtcggctttcgatcgcattttaagcagtaagatgggaatggaggcagtgatggctttactagaagcaacccctgatacacccgcctgtgttgtcaccctttcaggcaatcagtctgttaggctgcccctgatggaatgtgtgcaaatgactaaggaggttcagaaggcgatggacgataagagattcgacgaagctacccagctgaggggcggatcctttgaaaacaattggaacatctacaagctgctggcccatcagaagccacccaaagaaaaatctaatttctcgctggcaatcctgaacgtcggggccccagctgccgggatgaatgctgccgttcggagtgccgttcgcactggaattagccatggccatactgtgtatgtcgtgcacgacggctttgagggtcttgccaagggccaggtccaggaggttggctggcatgatgtagcagggtggctcggccgaggcgggtctatgcttggaacgaagagaactctgcccaaaggccaactcgagtccattgtggagaacatacgaatttacggaatccacgctcttctcgtggtgggaggattcgaagcttatgaaggtgttctgcagttggtggaggcacgcggccgatatgaggaactgtgcatcgttatgtgtgtcatccccgctactatttctaataatgtccctggcaccgacttttcactcgggtctgacactgctgtaaacgccgctatggagtcgtgtgatagaataaagcaatccgcgtccggcacaaagagaagagtattcattgtagaaacaatgggcggctattgtggttacctcgctaccgtgaccggaatcgcggtgggagcagacgccgcgtacgtctttgaagatccattcaatattcacgacctgaaggtcaacgtggagcacatgaccgaaaaaatgaagaccgatattcaaagaggactggtgttacgtaatgaaaagtgtcacgactactatacaactgagtttctgtacaacctgtattcttccgaggggaagggggtcttcgattgcagaacgaacgtacttggacacctgcagcagggaggggctcctaccccctttgataggaactacggaactaagttgggcgtgaaggccatgctttggctctccgagaaattgagagaggtttacagaaaaggcagagtctttgctaacgccccagactccgcttgcgttatcgggctgaaaaaaaaagctgttgccttcagccccgtgaccgagctaaagaaagacactgatttcgagcatcggatgccccgggagcagtggtggcttagtctgcgactcatgctgaaaatgctcgcccagtaccgcatcagcatggccgcctatgtttctggcgaactggagcacgtaacacgcagaaccctctcaatggataaaggattttag

SEQ ID NO: 199393 - DNA, 1722 bp, synthetic construct
  misc_feature 1..1722: note = Description of Artificial Sequence: Synthetic coding sequence
  source 1..1722: mol_type = other DNA
atgggccggcactgcggctacctggccctggtgagcgccctggcctcaggggccgactggcttttcatccctgaagctccgccagaagacgggtgggaaaacttcatgtgcgaaaggttgggggagacacgttctcggggatcccgtctgaacataatcataattgccgagggcgccattgatagaaatggaaaaccaatttcgagttcatacgttaaggatctcgtggtgcagagacttggatttgatactcgtgttaccgtcctgggccacgtgcaaagaggcggaactccaagtgcattcgacagaatcctgagttctaagatgggtatggaggccgtcatggcccttctggaggctaccccagatacaccggcttgcgtggttaccctaagcggaaaccagagcgtccgtcttccgctcatggagtgcgtgcaaatgacgaaagaggtccaaaaagctatggacgacaagcggttcgacgaagcgacacagctgaggggcggatcatttgaaaacaactggaacatctacaagctgctggctcaccagaaaccccctaaagaaaagtcaaatttctcccttgctattctcaacgtcggcgctcccgctgccggaatgaatgccgccgtgcgatcagcagtgcggactggcatcagtcacggccataccgtttacgtcgtgcatgatggctttgagggcttagcaaaaggacaggtgcaggaagtcggatggcatgatgtggctggatggttaggtcgaggtggaagcatgctgggaacgaagcgtaccttgcctaaaggccagctggaatcgatagtcgaaaatatacgcatttatggaatccacgctctgctggtcgtgggcggcttcgaggcctatgagggcgtactgcaactggtcgaagccaggggacgttacgaagagctatgtattgttatgtgcgttatccccgcgaccataagtaataatgttcccggcaccgacttttctttgggctccgacaccgccgtgaatgctgctatggaatcttgtgaccgcataaagcaatccgccagtggtacaaagagacgggtctttatagttgagactatgggcggatactgtggatacctggccacagtgactggcatcgcagtgggagctgatgccgcatacgtgttcgaagatcctttcaatatccacgatctaaaagtgaatgtggagcacatgactgagaagatgaaaacagacatccagagagggctcgtgcttcggaatgaaaagtgccacgattactatacaacggaattcctatataacttgtactcctccgaagggaaaggtgttttcgactgccggacaaatgtacttgggcacctgcagcagggcggcgcacccacgccctttgacaggaattatggcaccaaattgggagtgaaggcaatgctgtggctcagtgagaaactgagagaggtgtatcgaaagggtagggtgttcgcgaatgccccagattctgcgtgtgtgatcggactaaaaaagaaggcagttgctttttccccagtcaccgaactcaagaaagatactgacttcgagcatcgaatgccgagggaacagtggtggctgagcctgagactaatgcttaagatgttggcccagtacagaatcagcatggcggcttacgtctccggcgagcttgagcacgtaacaagacgtactctcagcatggataaagggttctag

SEQ ID NO: 199394 - DNA, 2343 bp, synthetic construct
  misc_feature 1..2343: note = Description of Artificial Sequence: Synthetic coding sequence
  source 1..2343: mol_type = other DNA
atgacccacgaggagcaccacgccgccaagaccctgggcatcggcaaggctatcgctgtcctgactagtggtggggacgcacaaggaatgaacgccgcagtacgggcagtcgtccgagtggggatcttcacgggagctcgggtgtttttcgtacatgaggggtaccagggcctcgtcgacgggggcgaccacataaaggaagcaacttgggaaagtgtgtcgatgatgctgcagctcggcggaacagttattggctccgctaggtgcaaagatttccgcgagagagaggggaggctgagggcggcttacaatctggtgaaacggggaattacaaatctgtgtgtcatcgggggagacggcagcctcaccggtgccgacacctttcgatcagagtggtctgatttactatcggacctgcagaaggccggcaagataacggatgaggaagctaccaaaagctcttacttgaacatagtcgggctcgtcgggtcaatcgacaatgatttctgtggtactgatatgacaatcgggactgacagtgctctgcatcgtattatggaaatcgtggacgctattacgaccaccgcccagtcacatcaaagaaccttcgtgcttgaggtcatggggagacactgcgggtacctagcgctggtcacctcgctctcttgtggagcagattgggtgttcatacctgagtgcccacctgatgatgactgggaagagcatctgtgtaggcgactgtccgagacccgaactcgagggtccaggctcaacataattatcgtggctgaaggcgccatcgacaagaacggaaagccaattacatctgaggacattaagaatctggtagtgaaacgcttgggttacgatacccgcgtgaccgtgttgggtcatgtccagcgcggaggaacaccctcggcgttcgaccgcattctgggcagtaggatgggtgtggaggcggtaatggctctccttgaggggacacctgatacgcccgcctgtgtcgtgagtctgagcggtaaccaggcagtgcgactccctctgatggagtgcgtgcaagtaactaaggatgtcacgaaggccatggatgagaaaaagtttgacgaggctctgaagctgcgtggccgctctttcatgaataactgggaggtgtataagcttctggctcacgtccggccacctgtatccaaaagtggatcgcacaccgttgcagtcatgaatgtcggtgcccccgccgctggcatgaatgccgccgtgcgcagtacagtgagaattggactcattcagggcaatagggtgcttgtggtgcacgatggctttgaaggccttgcaaaaggccagattgaagaggcaggctggtcctatgtgggcgggtggacaggacaaggcggaagcaagctagggaccaaaaggaccctgcctaaaaaatctttcgaacagatctcagccaacatcaccaagttcaacatccagggactcgtcataattggtggcttcgaggcttacactggcgggctcgaactgatggagggcaggaagcagtttgatgagttatgcatccctttcgtggtgattcccgcaacagtgagcaataacgtgccaggttcagactttagcgtgggtgctgacacagcccttaacacaatttgcaccacctgtgacaggatcaagcagtcggcagccggcaccaagagacgggtgttcatcattgaaaccatgggtggatactgtggatacctggccacgatggcgggacttgcagctggcgccgacgccgcctatatctttgaggagccttttaccattcgcgatctgcaggcaaacgtggaacacctagtgcagaaaatgaaaacgaccgtgaagaggggactggtgcttagaaatgaaaagtgcaacgagaattacacaacagactttatttttaatctctacagtgaagaaggaaagggaatctttgacagccggaagaatgtgttaggtcacatgcaacaaggcgggagccccaccccattcgacaggaattttgccacgaagatgggtgccaaggcgatgaattggatgtctggcaagatcaaagaaagctacagaaatggcagaatctttgcaaacactccggacagcgggtgcgtgctggggatgagaaaacgggctctggtgtttcagccagtggccgaattaaaggaccagacggacttcgaacaccgcatccccaaggaacagtggtggctgaaactgagacctatacttaagatcttagccaagtacgaaatcgatctggatacgtccgatcacgctcacttggagcacatcacccggaagaggagtggcgaggccgcggtttag

SEQ ID NO: 199395 - DNA, 2556 bp, synthetic construct
  misc_feature 1..2556: note = Description of Artificial Sequence: Synthetic coding sequence
  source 1..2556: mol_type = other DNA
atgcacaaggacgagttccacctgaagttcttcatgtgcgtgatccaatcccgtcaactggttcggaccccccagagaacggccggcgaggcctccacatcgtccatgctaattcccaagcccccacctaaaaccgacatcctcaagtccctggataccatggatgaccctgataccgtcggtagcatcccggtctttaaaacagagtggattatgacgcacgaggagcatcatgccgctaagaccttgggcatcgggaaggctatcgctgtcctgacgtcggggggggacgctcagggtatgaacgcagctgtgagggcggtggtacgtgtcggcatctttaccggagcccgagtcttcttcgttcacgagggttatcaagggctggtggacgggggtgaccacattaaagaggccacgtgggagagtgtttctatgatgctccaattgggtggaacagttatcggcagcgcaagatgtaaagattttagggaaagagaaggccggctcagagcagcttataatctggttaagaggggcataacaaacctgtgcgtgattggcggggatggctccctaacaggggctgataccttcaggtccgaatggagcgatctgctgagtgacctacagaaggccggcaagataacagatgaagaggctacgaaaagtagctatttgaacattgtgggcctcgttggctcaatcgataacgacttttgtggcacagatatgactatcggcactgattccgcccttcacagaatcatggagatcgtggacgcgataactacaaccgcacagagccaccagagaacattcgtgctggaggtgatgggccgtcactgtggctacctggccctcgtgacaagcctgtcatgcggcgctgattgggtctttattcccgaatgccctccagacgacgattgggaggaacacctgtgccgccgtctatccgagactaggactcgcgggagcagacttaatattataatagtggcggagggagccattgataaaaacggaaagccaattacctcagaggacatcaaaaacctcgtggtgaagagactcggctacgacacacgcgtcacggtcttgggccacgtgcagagaggcggaaccccttccgctttcgataggattcttgggtcccgtatgggcgttgaagccgtcatggcgctgttggagggcacgccagatacgcctgcgtgtgtggttagcttatcaggcaaccaggcagtcaggctgcccctgatggagtgtgttcaagtcacaaaagacgtcaccaaggcaatggatgagaagaagtttgatgaagcactcaaactgagaggacgatcatttatgaacaactgggaggtgtataagttactagcgcatgtccggccaccagtgagcaagtccggatcacatactgtggccgtcatgaatgtcggcgcccccgcggccggcatgaacgccgccgttcgatcaacagtcagaatcgggttgattcaaggcaacagggtgctggtggtgcacgacggctttgagggtctggctaaggggcagatcgaggaagccggttggtcatatgtaggaggatggactggtcagggggggtccaaattgggtaccaaaaggaccttgcctaaaaaatccttcgagcagatcagcgctaatatcactaaattcaacatccagggtctggtgatcattgggggattcgaagcctatactggcggcttggagcttatggagggcagaaagcagtttgacgagctctgtattccatttgttgtgattcctgccacagtgtccaataatgtgccaggcagcgacttctcagtcggcgccgacacggcattgaataccatttgtactacgtgtgaccggattaaacaatcagcagccggcactaaacgccgggtgttcattatagaaacaatgggcggatactgtggatatctggccaccatggccgggctggctgccggcgcggacgccgcctacatattcgaggaacccttcacaatccgtgacctgcaggcgaatgtcgagcacctcgtgcaaaaaatgaagactactgtcaagagagggctggtcctgagaaatgagaagtgtaatgagaactacacaacagactttattttcaatctgtactctgaagaaggcaaggggatcttcgacagtcggaaaaatgtcctagggcacatgcagcaaggggggagcccaaccccctttgacaggaatttcgcaaccaagatgggcgccaaggcaatgaactggatgtccgggaaaattaaggagagttatcgcaacggccgtatatttgccaacacccctgattctggatgtgtcctgggtatgaggaagcgcgctcttgtgtttcaacccgtggccgaactgaaggatcaaacagactttgaacaccggatccctaaagagcagtggtggctgaagctgcggcccatcttgaagattctagccaagtacgaaattgacctggataccagcgatcatgctcacctggaacacattactcgaaaaagaagcggagaggctgccgtgtag

SEQ ID NO: 199396 - DNA, 2343 bp, synthetic construct
  misc_feature 1..2343: note = Description of Artificial Sequence: Synthetic coding sequence
  source 1..2343: mol_type = other DNA
atgacccacgaggagcaccacgccgccaagaccctgggcatcggcaaagctattgcggtgctgacctctgggggtgatgcacaggggatgaacgctgccgtgagagcagttgtgagggtcggtatttttactggtgcacgggtgtttttcgtgcacgagggataccagggactcgtggacggaggggaccacattaaagaagcgacgtgggaaagtgttagtatgatgttgcagctcggcggaaccgtgatcgggtctgccaggtgtaaagattttagagaaagggaaggacggctgagagccgcttacaatctggtaaagcgcgggatcactaacctttgcgtgataggcggtgatggaagcctgaccggggcggatacattcaggtccgaatggagcgaccttctaagcgacttgcagaaagccggaaagataactgacgaagaggccacaaagagctcttatctgaacatcgtgggtcttgttgggagcatcgataatgatttctgcggcacagatatgactattggtacagactcggcacttcatcggatcatggaaatcgtagacgccattacgaccaccgcccaatcccatcagcgtacttttgtgctcgaggttatgggacgtcattgcggctatctggcgttggtaaccagtctgtcttgcggagccgactgggtctttatccccgagtgccctccagatgacgattgggaagagcacctatgtaggaggcttagtgaaacacgaacccgggggagccgcctgaacatcatcatcgtggccgagggtgcaatcgacaaaaatggtaaacccattactagcgaggatattaaaaatctggttgtgaagcgccttgggtatgatacccgcgtgacggtcctaggccacgtccagcgaggagggaccccatctgcattcgaccgcatcctaggctcaagaatgggtgtcgaagcagtaatggctctgctcgaaggtacccctgatacacccgcctgcgtagtcagtctgagcggcaaccaggcagtgagactgccactaatggaatgtgtacaagtaaccaaggatgttacgaaagctatggatgagaagaagttcgatgaggctctaaagctgagaggtagatcctttatgaataattgggaggtttacaagctgcttgcccacgtgcgcccccccgtatccaaatccggctcgcacacggtggccgtcatgaatgtaggcgcccccgccgcagggatgaatgcagcggtcaggtcaacggttcgtattgggctgatacagggaaatcgcgttttggtggtgcacgacgggtttgagggtcttgccaagggacagattgaggaggccggttggtcctacgtcggcggctggactgggcaaggcgggtctaagctgggaacaaagagaacgctgcccaaaaagtcctttgagcagatctccgccaatataacaaaatttaatatacagggcctggtgatcatcggcggttttgaagcatacacaggagggcttgagctcatggaaggtagaaaacaatttgatgagttatgtatccccttcgtcgtgatccctgccactgtgagtaacaacgtccccggatccgacttctcggtgggagctgataccgccttaaatactatatgtactacttgcgacagaataaaacagagcgccgcagggacaaaaagacgggtgttcattatcgagaccatgggcgggtattgtggctacttagctaccatggcagggctggccgcaggggcggacgcagcctacatcttcgaagaaccctttactatccgtgacctgcaagccaacgttgagcatctggtgcaaaaaatgaaaactacagtgaagagaggacttgtgctcaggaacgagaagtgcaatgagaactacacaaccgatttcatttttaacctgtactctgaagagggaaaagggatctttgatagtcgtaagaacgtcttagggcatatgcaacaaggaggtagcccgactccctttgatcgtaatttcgctaccaagatgggcgccaaggcaatgaattggatgtccggtaaaattaaagaaagttaccgcaacgggagaattttcgctaatacccccgactccgggtgcgtactcgggatgcgcaagcgggctctcgtgttccagcctgtcgccgaactgaaggatcagaccgattttgagcacagaattccaaaagaacagtggtggctcaagcttagacctatcttgaaaatcttagctaagtatgagattgatcttgacaccagtgaccatgcccatctggagcatattactcgaaagagaagcggtgaagcagcagtttag

SEQ ID NO: 199397 - DNA, 2250 bp, synthetic construct
  misc_feature 1..2250: note = Description of Artificial Sequence: Synthetic coding sequence
  source 1..2250: mol_type = other DNA
atgacccacgaggagcaccacgccgccaagaccctgggcatcggcaaggctattgcagtcctgacttcaggaggcgacgcacaaggaatgaatgccgccgttcgagccgtggttcgggttggaatcttcacaggcgctcgcgtgttttttgttcacgagggctaccaggggctagtggatggtggagaccatatcaaggaggccacctgggaaagtgtgtcgatgatgctccagctggggggcaccgttataggaagcgctcgttgcaaagattttcgcgaacgagagggtcgattgagggctgcttataacttagtaaagagaggaataacaaatctgtgcgttattggtggtgatggctctcttacaggcgcagacacttttcgcagtgagtggtcagacctactgtcggatttgcaaaaggccggcaagataacagacgaggaagccacgaaatcttcttacttgaacatagtgggactcgtcggttccattgacaatgacttttgcggaactgatatgaccataggaactgacagtgccctgcatcggattatggaaattgtggatgctattactaccacagcacaatctcaccaacggacctttgtactcgaagtgatggggagacactgcgggtatctcgcacttgtgacttctcttagctgtggggccgattgggtctttatccccgagtgtccccctgacgacgactgggaggagcatctgtgtcgcagactaagcgagacgaggactcgtgggtccagactaaatatcattattgtggccgaaggcgctatagataagaacggtaaacccatcacttctgaagacataaaaaatggatctagaatgggagtcgaagctgtcatggctctgcttgagggaacacctgatacacccgcctgcgtagtcagtctttctggtaatcaggccgtgcgcctgcctctgatggagtgcgtgcaggtcactaaggacgtgactaaggcaatggacgagaagaaattcgacgaggcactgaaactgagagggcggtcgttcatgaataactgggaggtctataaactgcttgctcatgtgcggccaccagtgtccaaaagcggtagccatactgtagccgttatgaacgtaggcgccccggcagcaggtatgaatgccgctgtgcgttctacagtcagaattggcctgatccagggaaaccgtgtgcttgtggtgcacgacggctttgagggccttgctaagggccagatcgaagaggccgggtggagctacgtaggtggctggaccggccagggggggagtaagctgggcacaaaaaggacattgccgaaaaaatcttttgagcagatctccgccaacatcacgaagttcaatattcaaggcctagtcataattggggggtttgaagcctataccggcggcttagagctcatggaaggaagaaagcagttcgacgagctgtgcatcccctttgtggttatccctgccactgtgtcaaacaacgtgccaggaagcgacttctcggtaggcgccgacaccgcactcaacaccatctgcaccacatgcgacaggatcaagcagagcgccgccggaacgaagcgccgcgtgttcataattgagaccatgggaggctactgcggttatctcgccaccatggccggactggctgctggggcagacgctgcatacatctttgaggagcccttcactatccgggatctgcaagctaacgttgagcacctggtgcagaagatgaaaactaccgttaaaagaggtctcgttctgcgaaacgagaagtgcaacgagaattacaccacggatttcatttttaatctttattccgaggagggcaagggtatcttcgactctcggaaaaacgtcctgggccacatgcagcagggaggatcccctacaccttttgacaggaatttcgctaccaaaatgggggccaaggctatgaactggatgtctggtaaaattaaggaatcctacagaaatggccggatcttcgctaacactcccgattccggttgcgtgctcggaatgcgcaagcgggccttagttttccaacccgtcgcagagcttaaagatcagacagacttcgagcacagaatcccaaaggagcaatggtggttaaaactccggccgatcctgaagattctcgccaaatatgaaatcgacctggacacgagtgatcatgcccatctggaacacattacgcgcaaacgatccggagaagccgcagtctag

SEQ ID NO: 199398 - DNA, 534 bp, synthetic construct
  misc_feature 1..534: note = Description of Artificial Sequence: Synthetic coding sequence
  source 1..534: mol_type = other DNA
atgacccacgaggagcaccacgccgccaagaccctgggcatcggcaaagccattgctgtcctgacctccggtggcgatgctcaaggtatgaatgctgcggtcaggtctaccgttcgcatcggccttattcagggcaatcgggttctggtagtgcatgacggctttgaggggctcgctaagggacaaattgaagaggctgggtggtcatacgtgggcggctggaccgggcagggtgggagcaagctcggcaccaaaagaaccctacctaagaaaagctttgaacagatttctgccaatataactaagttcaatattcaggggcttgtgatcattggcgggttcgaagcatacaccgggggactcgaacttatggaaggcagaaaacagtttgacgaactctgcatcccttttgtggtgattcctgccacagtatctaataacgtccccggttccgatttcagcgtcggtgccgataccgcactgaacaccatctgcacgacatgcgatagaataaaacagagcgcagcaggctag

SEQ ID NO: 199399 - DNA, 2343 bp, synthetic construct
  misc_feature 1..2343: note = Description of Artificial Sequence: Synthetic coding sequence
  source 1..2343: mol_type = other DNA
atgacccacgaggagcaccacgccgccaagaccctgggcatcggcaaagcaattgcagtgctcacctcaggtggcgatgctcagggtatgaatgctgctgtacgggcagtcgtccgggtgggcatttttacgggagctagggtgttcttcgtccatgagggatatcaagggctcgtggacggcggagaccatattaaagaggccacctgggaaagcgtcagtatgatgctgcagttaggaggtacggtgatcggcagcgctcggtgtaaagacttccgggagagggagggcaggttgagggccgcctacaacctggtgaaacgggggatcacaaatctttgtgtcatcggaggggatgggagcctcactggggctgatacgttccgttccgagtggagcgatctgctctctgacctacagaaggcaggtaagattacggacgaagaggcaaccaaatcctcctacttgaacatcgttgggttggttgggtctatcgacaatgacttttgtgggacagatatgacaatcggcaccgattcagcgctgcacagaataatggaaattgtggatgcaatcaccaccacagcccaaagtcatcaacgaacctttgtgctggaggtaatgggccggcattgcgggtacctggcgctcgtaacatctttgagctgcggcgctgattgggtgttcatccccgagtgtccacccgatgatgactgggaggaacatctgtgtcgacgcctgtcagagacacgcacacgagggtctagattaaacatcatcatagttgccgaaggcgccatcgacaaaaatggcaagcccatcacaagtgaggacataaaaaatctggtggtgaagcggctgggatacgatacaagggtcaccgtgctgggtcacgtgcaaaggggcgggaccccatcagcctttgaccggattcttgggtctaggatgggagtggaggctgtcatggcactgcttgaggggacccccgatacacctgcctgcgtggtctcactcagcggcaatcaggcagtccgactcccgttaatggaatgtgttcaggtaacaaaagatgttacaaaagctatggacgaaaagaaattcgatgaagcactcaagctgcgtggtcggtctttcatgaataattgggaagtatacaagcttctggcccatgtaaggccacctgtctccaaatctggttcccacaccgtcgctgtgatgaatgtgggcgcccctgccgcaggtatgaatgccgccgtgagaagtaccgtcaggattggcctgatccaggggaaccgggtcctcgtcgtgcacgacggcttcgagggcctggcaaaaggacagatcgaagaggccgggtggagctacgtcggtggctggaccggacaagggggatccaagctaggaaccaagagaacactaccaaaaaagagctttgagcagatatccgcgaatattacaaaatttaacatacaggggctggtgataatcgggggttttgaagcctatacggggggcctagagctgatggaaggccggaagcaatttgatgaattgtgcatccctttcgtagtaattccagctactgtttccaacaacgttcccggctcagacttctctgttggcgccgatactgcactcaacaccatctgcacaacatgtgatagaattaagcagagcgctgccgggaccaagcggagagtgttcattattgaaacaatgggcggttactgtgggtatctggccaccatggccggcttagctgctggcgccgatgcagcatatatctttgaggagccattcacaattcgggaccttcaggcgaatgtggagcacctggttcagaaaatgaaaacaacagtgaaaagagggttggtgctgaggaacgaaaaatgtaacgagaactacacaacggatttcatcttcaacctctactctgaggaaggaaaagggatatttgacagtcgtaaaaatgttcttggccatatgcaacagggcggcagtcccacccccttcgatcgcaacttcgccacaaagatgggggcaaaagctatgaattggatgagcggcaagatcaaggaatcttatcgcaacggtcgtatcttcgccaatacacctgattcaggctgtgtgctaggcatgaggaaaagggctctagtgttccaaccagttgccgaactaaaggatcagacggatttcgagcataggatccccaaagagcagtggtggcttaagctccgccccatcctgaaaattttggccaaatacgagattgaccttgacacctcggatcatgcccacctggagcacattacccggaagcgcagcggcgaagcagctgtctag

SEQ ID NO: 199400 - DNA, 354 bp, synthetic construct
  misc_feature 1..354: note = Description of Artificial Sequence: Synthetic coding sequence
  source 1..354: mol_type = other DNA
atgacccacgaggagcaccacgccgccaagaccctgggcatcggcaaggccatcgccgtactgacttccggtggagacgcccagggtatgaacgcagcggtacgggccgtcgtccgagtgggcatatttacaggggcccgtgtgttcttcgtccatgagggctaccaggggctggtggacggaggagatcatatcaaggaggccacttgggagagtgtctccatgatgctgcagctgggaggtacagtaattggcagcgcacggtgcaaggacttccgggagagagaaggtaggctcagggcagcatacaatctcgtgaaacgggggataactaatctgtgtgtgataggctag

SEQ ID NO: 199401 - DNA, 486 bp, synthetic construct
  misc_feature 1..486: note = Description of Artificial Sequence: Synthetic coding sequence
  source 1..486: mol_type = other DNA
atgacccacgaggagcaccacgccgccaagaccctgggcatcggcaaagccatcgcggttctgacgagtggcggcgatgcccaagggatgaatgcggcagtccgtgcggtcgtgagggttgggatttttaccggcgctcgcgtgttttttgttcacgagggctaccaggggcttgtggacggaggagatcacattaaggaagctacgtgggagagcgtctccatgatgctccagcttggcggaacggtgattggaagcgcaagatgtaaggactttcgcgaaagagaggggcgattgagggccgcgtataacctggttaaacgcggcatcaccaacctgtgcgtgatagggggagacgggagtctgactggagccgacacctttcggtctgaatggagtgacctgctgtctgatctccagaaggcaggtaaaatcacagacgaagaagctaccaaaagcagttatttgaacattgttgggctgtag

SEQ ID NO: 199402 - DNA, 474 bp, synthetic construct
  misc_feature 1..474: note = Description of Artificial Sequence: Synthetic coding sequence
  source 1..474: mol_type = other DNA
atgacccacgaggagcaccacgccgccaagaccctgggcatcggcaaggctatcgccgtactgacgagtggcggtgacgctcagggtatgaatgccgcagttcgcgccgttgttagagtggggatttttactggagcgagggtgttcttcgtgcacgaaggataccaaggtcttgtggatgggggcgaccatattaaagaagctacatgggaaagcgtgtcaatgatgttacagctcggcggtaccgtgataggctcagctcggtgcaaggacttccgggaacgcgaaggaaggctcagggcggcttacaacctggtcaagcgaggtattactaacctgtgcgtgatcgggggcgatgggtcactgactggtgccgacaccttcagatcagagtggagtgacttgctgtctgatctccaaaaggccggcaagataacggatgaggaggcgacaaaatctagctatctcaactag

SEQ ID NO: 199403 - DNA, 258 bp, synthetic construct
  misc_feature 1..258: note = Description of Artificial Sequence: Synthetic coding sequence
  source 1..258: mol_type = other DNA
atgacccacgaggagcaccacgccgccaagaccctgggcatcggcaaagcaatcgccgtcctgactagcggaggggatgcccaaggcatgaacgcagcagtgcgagcagtcgtgcgggtgggtatatttacgggcgcgcgtgtgttcttcgttcacgagggttaccaggggctcgtagacggcggtgatcacatcaaggaggcaacctgggagtccgtttcaatgatgctccaactgggaggcactgtgatcggttag

SEQ ID NO: 199404 - DNA, 420 bp, synthetic construct
  misc_feature 1..420: note = Description of Artificial Sequence: Synthetic coding sequence
  source 1..420: mol_type = other DNA
atgacccacgaggagcaccacgccgccaagaccctgggcatcggcaaggcgatcgccgtgctgacttccggcggggacgcgcaggggatgaatgctgccgtgagggctgtcgtcagagtcggaatctttacgggcgcccgtgtgttttttgtacatgagggctatcaaggtctcgtggacggaggagaccacatcaaagaggccacctgggagagcgtgtccatgatgctgcagctggggggcaccgtgatcgggagcgcacgctgcaaggattttcgcgaaagagaggggcggttacgggcggcgtacaatctcgtgaagaggggtattaccaatctttgcgttattgggggggatgggtccctgaccggtgctgatacttttaggtccgagtggtcggacttactttctgatctgtag

SEQ ID NO: 199405 - DNA, 2250 bp, synthetic construct
  misc_feature 1..2250: note = Description of Artificial Sequence: Synthetic coding sequence
  source 1..2250: mol_type = other DNA
atgacccacgaggagcaccacgccgccaagaccctgggcatcggcaaagcaattgcggtccttacaagcggaggagacgcccaaggaatgaacgcggccgtcagagctgtggtccgggttggaatctttactggggcccgcgtgttctttgtgcatgaaggctaccagggcctcgtcgatggaggggatcacatcaaggaagccacctgggagagtgtgtcaatgatgctgcagctgggggggactgtgatcgggtctgccagatgtaaagatttccgcgagcgagaaggtaggttaagagctgcgtataacctagtcaagcggggtataactaacctctgtgttattgggggggacggttcccttactggggccgatacgttccgctccgagtggagcgacttactgtcagacttacagaaggctggtaagataactgatgaagaagccaccaaaagctcctatctcaacatcgtggggctcgtcggttctattgacaacgatttctgcggaacagacatgaccatcggaaccgactcggccctacatagaattatggagattgttgacgcaataactactaccgcacagtcacaccagcggacattcgttcttgaagtgatgggccgccattgcggatatctggctctggtgacaagtctcagctgcggtgccgactgggtgtttattcctgagtgtccaccggatgacgattgggaagaacatttgtgtcggagattgtccgagacaagaaccagagggtcacgcctgaatatcatcatcgttgctgaaggagcaattgacaagaatggaaaaccaattactagtgaggacatcaaaaacggtagtcggatgggagtggaggcagtaatggccctgctggagggcacccctgatactcctgcctgcgtggtatccctctccgggaaccaggcagtccggcttcccttaatggagtgtgtgcaggtgacaaaggacgttacaaaagcaatggacgaaaagaagtttgacgaagccctgaagctccgcggtcggagttttatgaacaattgggaggtgtacaagctcttagcccacgtcagaccaccagtgtccaagtccggatctcatacagtggctgtaatgaacgtgggcgcccctgctgcgggcatgaatgctgccgtgaggtccacggtgaggattgggctcatacagggtaacagggtattggtggtccatgacggtttcgaggggctggccaagggtcagatagaagaagcaggttggagctacgtgggaggctggacgggccagggcgggagcaaactgggaaccaaaaggacacttcctaagaaatcatttgagcagattagcgccaatatcactaagtttaacatccagggtctcgttatcatcggtgggttcgaggcctacacgggcggattggagctgatggagggcaggaaacagtttgatgaactgtgcatccccttcgtcgtcattcccgcaactgtcagcaacaacgtccccggatcagacttttctgttggggctgatacggccctgaatactatctgcacaacatgcgacaggattaagcagtccgccgcaggcaccaagaggagggtttttataatagaaactatgggcggatattgtgggtacttagcaactatggctggattggctgcaggagctgatgcagcttacattttcgaggaaccgttcacaatccgagatctgcaggctaacgtggaacacctcgtgcagaagatgaaaacaacagtcaaaagagggctagtactgaggaacgagaagtgtaacgaaaactacactacagatttcatttttaatctctattcagaggaggggaagggcattttcgacagtcggaaaaacgttttaggccatatgcagcagggtggaagccctacgcccttcgaccggaactttgctaccaaaatgggcgccaaagccatgaattggatgtccgggaaaatcaaggagtcttatcggaatggacggattttcgcaaacacgcctgactctgggtgcgtcctgggtatgagaaagcgggcactcgttttccagcccgtggccgaactgaaagatcagaccgatttcgagcatagaatcccgaaagagcagtggtggcttaaactgagaccaatcttgaaaattctggcaaaatacgagatcgacttggatacttccgatcacgcccaccttgagcatattacaagaaagagaagtggggaggcagctgtctag

SEQ ID NO: 199406 - DNA, 609 bp, synthetic construct
  misc_feature 1..609: note = Description of Artificial Sequence: Synthetic coding sequence
  source 1..609: mol_type = other DNA
atgggcggctactgcggctacctggccaacatgggcggcctggccgccggcgctgacgcagcatacattttcgaagagccattcgacatccgtgacttgcagtcaaatgttgagcatttgaccgagaagatgaaaacaactattcagcgcggtcttgtgctcaggaatgaatcatgtagtgaaaactacaccactgattttatttatcagttatacagcgaagagggcaagggggtcttcgattgccgcaagaacgttctgggtcacatgcaacaaggaggcgcacccagtccttttgataggaatttcggaactaagatttctgccagggctatggaatggatcactgcgaagctgaaagaagcgagaggcaggggaaagaaatttaccactgacgattctatctgcgtactggggatatccaagcggaatgtcatctttcaacctgtggccgagttgaaaaaacagacagatttcgaacacagaataccaaaagagcaatggtggctgaagcttaggcctctcatgaaaattctcgctaagtataaggccagttacgatgtttcagacagcggacagcttgaacatgtgcagccctggtcggtgtag

SEQ ID NO: 199407 - DNA, 2331 bp, synthetic construct
  misc_feature 1..2331: note = Description of Artificial Sequence: Synthetic coding sequence
  source 1..2331: mol_type = other DNA
atgtgcggctacgagcggtgccggccctgccggggcgcccacggctatcttcgaggaggccagggagtgctgcacctgcgtggtctccctgggcacgggggaagaagattgaaacaccgcaggggcagactgggggagtgcttgcagcacccagcttcgggcgcggtccggggcgattggagagagaagccaggctgttggtcccatcgctttccctgtccaggacgacacgctctcgtggggggcaccattatcgggtctgctaggtgtcaggcatttcggacccgggaaggccgtctgaaggctgcctgtaatctattacagcggggtatcacgaatttgtgtgtcataggcggcgacggctcactgacaggggccaacttgttccgtaaagagtggtctggtcttctggaagagcttgccaggaacggacagatagacaaagaggccgtacagaaatacgcatacttgaacgtagtaggcatggtggggtccatcgataatgatttctgtggcaccgatatgaccataggaactgacagcgcactacacaggatcattgaggtggtggatgcaatcatgacgacagcccagagccatcagcggacctttgtgctggaggtcatgggtcgccactgcggctatttagcattagtcagtgccctggcttgtggagctgattgggtgttccttccggaatcccctccagaggagggatgggaggagcagatgtgtgtcaagttgtctgaaaaccgagctcggaagaaaagactgaatatcattatcgtcgccgaaggggcaatcgacacccagaacaagcccattacctccgaaaagatcaaagaactcgtggtcacacagctgggctatgacactcgtgtcactattcttggacacgtccagcggggaggcactccttccgccttcgatagaatcctggcctctagaatgggagttgaagccgttatcgccctactagaggcgacacctgataccccagcttgcgtcgtgagtcttaacggcaaccatgccgtgagactaccactaatggagtgcgtgcagatgacccaggatgtccagaaggcaatggacgaacgaagatttcaggatgcggtgcgcctgcgaggtcgcagcttcgcaggaaatctgaatacctataaaagactcgcaatcaaacttcctgacgaccagatcccgaagacaaattgcaatgtagctgtcatcaatgtgggcgcccctgccgctggaatgaatgccgctgtccggtccgccgtgagggtagggattgcagatggccaccgcatgctggccatttacgatggatttgacggctttgcaaaaggtcagattaaagagattgggtggactgacgtcggaggatggaccggccagggcgggtccatcctcggcaccaagcgagttttaccaggaaaatatctggaggagatcgcgactcagatgcgcacccatagcattaatgccctgctaatcatcgggggcttcgaagcctatttgggactgttggagctctccgcagctagagagaagcacgaggagttttgtgtccccatggtaatggtgccggccaccgtatcaaataatgttccaggctcagacttttccattggcgctgataccgcccttaacactattacagacacttgtgaccgcattaaacagtcagcttctggtacaaagagaagggtgttcataatcgagactatgggcgggtactgcggctatcttgcaaatatgggcggcttagcagccggtgccgatgcagcttacatttttgaagaaccattcgacatccgcgatctccagagcaatgtagaacacctgaccgagaagatgaagaccacaattcagcggggactcgtacttcggaacgagtcatgcagtgaaaattacaccaccgactttatctatcagctctatagtgaggaaggcaaaggtgtatttgattgccgaaaaaatgtcctggggcacatgcaacagggtggagcgccatccccttttgatcggaactttggcaccaaaatttcagcgagagcaatggaatggattaccgctaagctaaaggaagcaaggggacgtggcaaaaaatttaccactgatgactctatttgcgtgctgggaatcagcaaacgaaatgtgatcttccagcccgtcgctgaactgaagaagcagacggacttcgaacatagaatcccaaaggagcagtggtggctcaagctgcgccctctcatgaaaatcctggcgaaatacaaagcatcctacgatgtatcagacagtggccagctggagcacgtgcagccatggtccgtgtag

SEQ ID NO: 199408 - DNA, 2355 bp, synthetic construct
  misc_feature 1..2355: note = Description of Artificial Sequence: Synthetic coding sequence
  source 1..2355: mol_type = other DNA
atggacgccgacgacagccgggcccccaagggcagcctgcggaagttcttagagcatctgagcggagcaggaaaggctattggcgtgctcacttctggaggagatgctcaggggatgaatgccgcagtccgggcggtcgtgcgcatgggcatttacgttggagccaaagtgtacttcatctatgaggggtaccaaggaatggtcgacggaggatccaatattgctgaggcagattgggaaagtgtaagctccatcctccaggtaggcggcacgattattggcagtgcacggtgtcaggcctttcggacccgcgaaggtcgccttaaggcagcctgtaatctactgcagagaggcatcaccaatctgtgtgtcattgggggggacggttccctgacaggggctaacctattccgaaaagagtggtctgggcttctggaggagcttgctcgcaacgggcaaatcgacaaggaagcagtccaaaagtacgcatacctgaacgttgtgggtatggtcggcagcattgataatgatttttgtggcacagacatgactataggcacagactccgccttgcatcgaattatagaggttgtggacgccataatgacaaccgctcagtctcatcagaggacctttgtgctggaagtgatgggccgacactgcggctatcttgccctggtgtccgcactggcctgcggtgctgactgggtgtttctacctgagtctccaccagaggagggatgggaggaacagatgtgcgtaaagttgtccgaaaatcgggcgcgtaagaagcgtctcaatataataatcgtcgcggaaggtgcgatcgacacccagaataagccgattaccagtgagaagattaaggagttggtcgtgacgcagttgggctacgacacacgcgtcaccattctcggacacgtacaaagaggaggtacaccttccgccttcgatcggattttggccagtagaatgggagttgaggccgtgatcgccctgctcgaagcaacacccgatacccccgcatgtgtcgtgtcactcaatggaaatcacgcagtgcgtttgcccttaatggaatgcgtgcagatgacccaagatgtgcagaaagccatggatgaacgtcggtttcaggacgcagtcaggcttcgcggccggagtttcgctggaaacctgaacacttacaagcgcctggccattaagctgcccgacgaccagatcccaaaaacaaactgcaatgtggccgtgataaacgtcggggcccctgcagccggcatgaacgcagcagtgcgaagcgctgtaagggtgggaatcgctgacgggcatcggatgttagctatttacgacggctttgatgggttcgccaagggacagatcaaggagatcggctggaccgacgttggtggctggaccggccaggggggtagtatcctcggaaccaagagggtgctccccgggaagtacctggaggaaatcgccactcaaatgcgaacccactctatcaacgctctgctcattatcggcggattcgaggcatatttgggcttactggaattgtccgctgcacgggagaagcacgaagaattctgtgtccctatggtcatggtgccagccacagtcagcaataacgtcccagggtccgacttttctattggcgcagacacggccttaaacactatcacagatacatgcgatcggattaagcagtctgctagcggaactaagcgccgagtgttcatcatagaaacaatgggtggttactgtggttacctagccaacatgggtgggctggcggcaggcgctgacgccgcctacatcttcgaagagccctttgatatacgggatctccagtcaaacgtcgagcacctcacagagaagatgaaaacgaccattcagaggggccttgtcctccgaaacgaaagttgcagcgaaaactatacaactgattttatataccagttgtacagcgaggaaggcaaaggtgtgttcgactgccgcaagaatgtcctagggcacatgcagcagggaggagctccttcaccattcgaccggaattttgggactaagatctccgctagagcgatggaatggattaccgcaaaattaaaggaggcgaggggaaggggtaaaaaatttactaccgacgactccatctgtgtgctgggaatatcaaagcgcaatgtgatctttcagccggtggcggaacttaagaaacaaaccgatttcgagcatcggatccctaaggaacagtggtggctcaaacttcgcccacttatgaagatactggcaaagtacaaagcatcatatgacgtgtccgactctggccaattggaacacgtgcagccttggtctgtgtag

SEQ ID NO: 199409 - DNA, 2322 bp, synthetic construct
  misc_feature 1..2322: note = Description of Artificial Sequence: Synthetic coding sequence
  source 1..2322: mol_type = other DNA
tacgagcggtgccggccctgccggggcgcccacggctacctgcggggcggtcaaggtgtcttgcatctcagagggctgcccgggcacgggggacggcgcctgaaacaccgcaggggccgccttggtgaatgtcttcaacatccggccagcggggccgtgcgaggcgattggcgggagaaacccggatgctggtcacatagattcccctgtcctggacgccacgctctggtgggagggacaatcatcggctccgccaggtgtcaggcctttaggaccagagagggacggctgaaagctgcgtgcaatctcctacagaggggcatcacgaatttatgtgtgataggaggggatggttccttgaccggagctaatctatttcggaaggagtggtcaggccttctcgaggaactcgcgcggaacggacagattgataaagaggccgtgcaaaaatacgcctacctaaacgtggtgggaatggtgggcagtatcgataatgatttctgcggtactgatatgacaatagggaccgactccgcacttcacagaataattgaggtggtcgacgctatcatgaccaccgctcagagccatcagcgcacattcgtgctagaagtgatgggcaggcattgtggctacctcgcccttgtgtcagccttggcttgcggagcagactgggtcttcttacccgagagtccccctgaggaggggtgggaagagcagatgtgtgtcaagttatccgagaatcgggctcggaagaagaggctgaacataatcatcgtggcggagggggctatcgatacccagaataagccaatcacctcggaaaaaatcaaagagctggtcgtaacccaactcgggtacgacacacgcgtgaccatcctcgggcatgtgcagagggggggcactccttctgcctttgaccggattttggcctccaggatgggcgttgaggcagttatagccttgctggaggctaccccggacacaccggcctgtgtggtgtctcttaacggtaaccatgctgtgcgcctgcccctgatggagtgcgtccagatgactcaggatgtccaaaaggcgatggatgaaaggcggtttcaggatgctgtgcggctccggggtagatcatttgccggcaatctgaacacgtacaagagactcgcaattaagctgcctgacgaccagattcctaagaccaactgcaatgtggccgtgatcaacgtgggcgccccggccgctggaatgaacgccgcagtgaggagtgcagtcagggtgggcattgcggacggtcacaggatgttagccatctacgatgggttcgacgggttcgctaaaggtcagatcaaagagataggatggacggatgtggggggctggacaggccaagggggttccattttagggaccaagagagtgttaccggggaagtacttggaagaaattgccacccaaatgcgaacccattcaattaacgccttgttaatcataggggggttcgaagcatatctcggcttgctggaattgtcagcggcccgggagaagcatgaggaattctgcgttcccatggtgatggtgccagccactgtctctaacaacgtgcccgggtctgacttttccataggtgccgacacagcactcaatacaatcaccgacacatgcgaccggattaaacagagtgcgtccggtacgaagcgcagggtgttcatcattgagactatggggggctactgcgggtacctcgccaatatgggaggactcgcagcaggggctgacgccgcttatatatttgaggagcccttcgacatcagggatcttcagtccaatgtggagcacctcactgaaaaaatgaaaactactatacaacgagggctggttctaaggaatgagtcgtgttctgagaattacacaacagatttcatttaccaactgtactccgaagaagggaagggcgtcttcgactgcagaaaaaatgtgttgggccacatgcagcagggcggcgctccctccccctttgacagaaactttggaactaagatatctgcccgggctatggagtggatcaccgccaagcttaaagaggctagaggtagaggcaagaaatttactaccgatgattcaatctgcgtactggggatcagcaagcgcaacgttatatttcagcctgttgcagaacttaagaagcagaccgactttgagcaccgaattcccaaagagcagtggtggctcaagttgcggccacttatgaagatcctcgccaaatacaaagccagctatgatgtgtcggacagcgggcagttggaacacgtgcaaccctggtccgtgtag

SEQ ID NO: 199410 - DNA, 633 bp, synthetic construct
  misc_feature 1..633: note = Description of Artificial Sequence: Synthetic coding sequence
  source 1..633: mol_type = other DNA
atgaacgccgccgtgcgggccgtggtgcggatgggcatctacgtgggcgctaaggtctatttcatttacgagggctaccagggtatggttgatggaggatccaatatagccgaggcagactgggaatcagtaagttcgattctgcaggtcggaggcactattattggaagcgctcggtgccaggcgtttcgcacccgcgaaggcagacttaaggcggcttgcaatttgctccaacgaggaattacaaacttatgcgtgatcggaggcgatggatccctaacaggcgcgaatctgttccgtaaagagtggtccggactgctagaagaattagctcggaacgggcagattgacaaggaggcagtgcaaaagtacgcttaccttaacgtggttgggatggtgggctccattgacaatgatttctgtggcactgacatgaccattggcacagatagcgccttacatcggatcattgaggtcgtcgatgcaatcatgactacagcccagagtcatcagagaacattcgtgcttgaagtaatgggtcgccattgcggatatctggccttggtgtcagctctcgcctgtggtgcggactgggtgtttctccccgagtcccctcccgaggaaggttggtag

SEQ ID NO: 199411 - DNA, 501 bp, synthetic construct
  misc_feature 1..501: note = Description of Artificial Sequence: Synthetic coding sequence
  source 1..501: mol_type = other DNA
tgagccgacggccaccggatgctggccatctacgacggcttcgacggttttgctaagggccaaatcaaagagatcggatggacagatgttggtggctggaccggccagggtggtagtatattaggtacaaaaagagtcttgcctggaaagtacctggaggagattgctacacaaatgcgcactcattctattaacgccctgctgatcatcggggggttcgaggcttacaaaagcgcttgtgatatggctgaagctcgcggaaggcaccaagagctgtgcattcccctgtgtgtggtccccgcaaccatctccaataacgttccgggcacagagataagcctgggatctgacacaggtctcaatgccgtagtggagacatgtgacagaatcaaacagagcgcgtcaggaaccaagaggagagtgtttatcattgagactatggggggatactgcgggtacttagctaacatgggagggcttgccgccggcgccgacgcgtag

SEQ ID NO: 199412 - DNA, 723 bp, synthetic construct
  misc_feature 1..723: note = Description of Artificial Sequence: Synthetic coding sequence
  source 1..723: mol_type = other DNA
atgggccggcactgcggctacctggccctggtgagcgccctggcctgcggcgctgattgggttttccttccagaatctccaccagaagagggatgggaagagcagatgtgtgtcaaactatccgagaaccgtgccagaaaaaaaaggctgaatatcatcatagtggcagagggagctatagatacccagaacaagccaatcacttccgagaagattaaggagctggtagtgacccaacttggatatgatacccgggtcacgatcctgggacacgtccagagaggcggcaccccatctgctttcgacagaattcttgcatctcgcatgggtgtcgaggccgttatcgccctccttgaggcaaccccagatactccggcctgtgtggtgtctctgaacggcaaccacgcggtacgactcccacttatggagtgcgtccagatgacgcaagacgtccaaaaagctatggacgagaggagatttcaggacgcggtgaggttacggggacgttcctttgcaggcaatctgaacacctacaagcgactggctatcaaattgcctgacgatcaaatccctaaaactaactgcaatgtcgccgtgattaacgtaggggcccctgccgccggtatgaatgctgccgtgagatccgcagtgcgcgtcggaatcgcagacgggcataggatgttggctatctacgatggctttgacggatttgccaaaggatag

SEQ ID NO: 199413 - DNA, 501 bp, synthetic construct
  misc_feature 1..501: note = Description of Artificial Sequence: Synthetic coding sequence
  source 1..501: mol_type = other DNA
atgaacgccgccgtgcgggccgtggtgcggatgggcatctacgtgggtgctaaggtatatttcatttatgagggctaccaggggatggtggatggcggctctaatatcgcagaagccgattgggaatctgtgtcctcaattcttcaggtgggcggtacgattatcggaagcgcgcggtgccaggcctttcggactcgcgaaggccggctcaaggccgcatgcaaccttctgcaacgtggcataaccaatctttgcgtcatcggtggggacggctcactgacaggtgccaatctttttcggaaggaatggtccggattgctggaagagttggcaaggaatgggcaaatcgataaggaggcagtgcagaagtacgcttatctcaacgtggtgggaatggtgggaagcatcgacaatgatttttgtgggactgacatgacaattgggaccgacagcgccctccacaggattatcgaggtggtcgatgcgatcatgaccacatag

SEQ ID NO: 199414 - DNA, 312 bp, synthetic construct
  misc_feature 1..312: note = Description of Artificial Sequence: Synthetic coding sequence
  source 1..312: mol_type = other DNA
tgattcatctaccagctgtacagcgaggagggcaagggcgtgttcgattgtcgaaagaacgtgctgggccatatgcagcaggggggggctccgagcccattcgaccggaattttggcaccaaaatctccgctcgggctatggaatggatcactgctaaattaaaagaagcaagagggaggggtaaaaaatttactaccgatgactccatctgcgtgcttggaataagcaagcgaaatgttatcttccagccagtggcagagcttaaaaaacagacagatttcgaaaccgttagtatgcaaccaccacgatag

SEQ ID NO: 199415 - DNA, 1743 bp, synthetic construct
  misc_feature 1..1743: note = Description of Artificial Sequence: Synthetic coding sequence
  source 1..1743: mol_type = other DNA
atgagcgacttcgaggagtggatcagcggcacctaccggaagatggaggaaggtcctttaccactgctgacgttcgccactgccccttaccacgaccagaagcctggcacgtccgggctcagaaaaaaaacctattattttgaagagaaaccgtgttacctggagaattttatccaatctatctttttttccattgatttaaaggacaggcaggggtcgagtctggtggtaggaggagacggtaggtatttcaataagtccgcaatcgagaccatcgttcaaatggctgccgcaaacggtataggccggctggtcattggccagaatggcatcctttcgacccccgctgtgtcatgcatcatacggaaaatcaaggccatcgggggaatcatattgactgcctctcacaatccaggcgggcctaatggagattttggtatcaaattcaatatttctaatggcggcccagctcccgaagctattactgacaagatattccaaattagcaaaacaatcgaagagtacgcggtgtgtcccgatcttaaagtcgacctgggcgtcttggggaagcagcagtttgacctggagaacaaattcaagcccttcaccgtggagatagtggactctgtggaagcgtacgctaccatgctcagatccatttttgacttctctgcactgaaagagctgttaagtggcccaaaccgcctgaaaatccgcattgatgccatgcatggagtcgtcggaccatatgtcaagaaaatactttgtgaagagctgggagctcccgcgaacagtgctgtgaactgcgtcccactcgaagactttggcgggcaccatccagatcctaacctcacgtatgcagccgatctggtcgagaccatgaagagtggggaacatgacttcggcgcagcattcgatggcgatggtgacaggaatatgatcctggggaagcatggattttttgtcaacccatctgacagtgtcgcagtaatcgccgccaatatatttagcatcccctattttcagcaaacaggggtaaggggattcgccaggagtatgccaacatccggcgccctcgatcgcgtcgcctccgcaaccaaaatcgccctgtatgagaccccaaccggctggaaattctttggaaatctgatggacgccagtaagctgagcctttgcggtgaggaaagctttggaaccggcagcgatcatattcgagaaaaagatggactgtgggccgtcctggcatggctttctattctggctaccagaaagcagagcgtcgaagatatccttaaagatcattggcaaaagtatggtaggaatttctttacacgatacgattatgaagaggtggaggccgagggcgcgaataaaatgatgaaggacctggaggccttaatgtttgacagatcctttgtaggaaaacagttctcggccaatgacaaggtgtatacggtcgagaaggcagataactttgaatacagcgatcccgtggatggaagcatctccagaaatcagggattgcggctgatcttcacggatgggtcaaggatagtttttcgtctctcaggcaccggctctgcgggcgccaccatccggctgtatatcgactcatatgaaaaggatgtcgcaaagatcaaccaggatccacaagtcatgctagcacctttaatcagcatcgccttgaaggtcagccagctgcaggaaagaacaggtcgtaccgcaccaactgtaataacttag

SEQ ID NO: 199416 - DNA, 1689 bp, synthetic construct
  misc_feature 1..1689: note = Description of Artificial Sequence: Synthetic coding sequence
  source 1..1689: mol_type = other DNA
atggtgaagatcgtgaccgtgaagacccaggcctaccaggaccagaagcccggcactagcggtcttaggaaaagagttaaagttttccagagcagcgctaactatgccgagaacttcatccaaagtataatctctaccgtcgagcccgcccagagacaggaagccacattggttgtgggcggtgatggccggttttatatgaaggaggcgatccaactgatagccagaattgccgcagccaacggcataggccgactggtgattggtcagaatggcattctctctacacccgccgtttcatgtattatcaggaaaatcaaggcgattggcggaatcatactgaccgcttctcacaacccaggcggcccaaatggcgatttcggcataaagtttaacatcagtaatggggggcccgcaccagaagcaattacagacaaaatctttcagatcagcaaaaccattgaggaatacgcagtgtgtcccgatcttaaggtggacctcggcgtgctgggcaagcaacagttcgacctagaaaacaaatttaagcccttcacagtcgagatcgtggatagtgtggaagcttacgctaccatgctgcgaagtatttttgatttctcagccctgaaggaactactgtctggccctaatcgcctgaagatacgtatagatgcaatgcacggagtcgtgggcccttatgtaaagaaaatcctatgcgaagaactgggcgccccagccaattcagctgtaaattgcgtgcccctggaggactttggcggccaccatcctgaccccaacctaacttacgccgccgatctcgtggagaccatgaagtccggagaacacgatttcggcgccgcgttcgatggggacggagataggaatatgattctggggaaacacggcttttttgtgaacccgtccgactctgttgctgttattgccgccaatattttctcaattccgtatttccagcaaacaggtgtgcgcggatttgccagaagcatgcccacctccggggcgcttgatagggtcgcctcagccacaaagattgctctgtacgagacaccaactggatggaagttttttggaaatctaatggatgcctccaagctcagcttgtgcggtgaggagagttttgggacaggaagcgaccacatcagggagaaggatggactgtgggccgtgttagcttggctgtctatactggctactagaaagcaaagcgtcgaagacatactgaaggaccattggcagaaatacggccgtaacttcttcacccgttatgattacgaagaggtagaggcagagggcgctaataaaatgatgaaggatctcgaagccttgatgttcgatagatctttcgtggggaaacaattttccgcgaatgacaaggtgtatactgtggagaaagctgacaactttgagtactccgaccctgtggatggctctatctcccggaaccaaggtctcagattaatctttaccgatgggtctcggatcgtctttcgactgagtggcacaggctccgccggagctaccattagactttatatagattcatatgagaaggacgtcgcaaagatcaatcaagatcctcaggtgatgcttgcccctctgatttccatcgcactcaaggtatctcagttgcaagagagaaccggccgcacagcccccactgtgattacatag

SEQ ID NO: 199417 - DNA, 1617 bp, synthetic construct
  misc_feature 1..1617: note = Description of Artificial Sequence: Synthetic coding sequence
  source 1..1617: mol_type = other DNA
atggtgaaggtgttccagagcagcgccaactacgccgagaacttcatccaaagtatcatctccaccgtggaacccgcccagagacaggaagctacactggtggtaggcggtgacggccgtttctatatgaaagaggccatccagttgattgctcgcattgctgcagccaatggtattggccgacttgtaatcggacagaacggaatactgtctacacctgccgtgagttgtattatcaggaaaatcaaagcgatcggaggcatcatcctgaccgcctcccacaatcccggggggcctaacggggactttgggattaagttcaatatttccaatggcggcccagccccagaagcaataaccgataaaattttccaaatttccaagacaatcgaagagtacgccgtctgtccagatctcaaagttgacctgggcgttctaggaaaacagcagttcgatctagagaacaaattcaaaccatttaccgtggagatcgtggatagtgttgaggcctatgcaacaatgctgaggagcatatttgatttttcagcactgaaagagttgctaagtggccccaacagacttaagatccgcatcgacgcaatgcacggggtcgttggcccctacgtcaagaagatcttgtgcgaggagctgggcgctcctgcgaactcggccgtcaactgtgtccctctcgaggactttgggggccatcaccctgatcccaacctcacttacgctgctgacctagttgagacaatgaagagtggcgagcatgattttggggcggccttcgacggggatggggataggaacatgatcctgggcaagcacggattcttcgtcaacccaagcgactccgttgccgtgattgctgcaaatatcttttccataccgtattttcagcaaacaggcgtcagaggctttgcacggtctatgcccacttctggtgccttagatagggtcgcaagcgccactaaaattgccctttacgagacacccactggctggaaatttttcggcaatctcatggacgccagtaaactgtcactatgtggggaagagtccttcggcacaggatctgatcatatcagggagaaggacgggctctgggcagttctggcctggctatccatacttgccacccgaaagcagtcggtcgaggacatcctcaaggaccattggcagaaatatgggaggaacttcttcaccagatacgactatgaggaagtggaggccgagggagcgaataaaatgatgaaagatctcgaggcccttatgttcgaccgatccttcgtgggcaaacagttctctgctaacgacaaagtttacaccgttgagaaggccgataactttgaatattctgaccctgttgatggctccattagtaggaatcaggggctcagattgatcttcacggacgggtcaagaatagtgttccgactgagcgggacaggatcagccggcgctaccattcgcctctacattgactcctatgagaaagacgtggctaagataaatcaagacccccaggtcatgcttgccccactgatttctattgctctgaaggtcagccagctacaggaacgcacagggaggactgcaccaacagtgatcacatag

SEQ ID NO: 199418 - DNA, 1098 bp, synthetic construct
  misc_feature 1..1098: note = Description of Artificial Sequence: Synthetic coding sequence
  source 1..1098: mol_type = other DNA
atgctgcggagcatcttcgacttcagcgccctgaaggagctgctgtcaggtcccaatcggctcaagatccgaatcgatgccatgcatggcgtagtcgggccgtacgtgaagaagatcctatgtgaggagctcggcgcccccgcgaatagtgcggtgaactgcgtgcccctggaagatttcgggggccaccatccagaccccaacttaacatatgcggcggatctggtcgagaccatgaagtccggcgaacacgattttggggcggcgtttgatggagacggagatcgcaatatgatcctggggaaacacggctttttcgtcaatccgtccgactctgtggccgtgatcgccgccaatattttcagtatcccatattttcagcagactggcgtgagaggtttcgctcgttcaatgcctacaagtggggccctggacagagtcgccagcgctactaagatcgctctgtatgaaacccccaccggctggaagttctttggaaatttgatggatgcttcaaaactgagtctgtgtggtgaggaatcttttgggaccggctccgaccacatccgtgaaaaagacgggttatgggctgttcttgcctggctatctattctcgctactaggaagcagtcagtagaggacattttaaaggatcactggcagaaatacggcaggaacttcttcaccaggtatgattacgaggaagttgaggccgagggagccaataaaatgatgaaggatctggaggctctgatgttcgatcgctcctttgtgggcaagcagttcagtgctaacgacaaggtttatactgtcgaaaaggcagacaacttcgagtacagtgaccctgtggacgggagcattagcagaaaccagggcctgaggttaattttcacagatggttcacgcatcgtattccgacttagtggaaccggcagtgccggtgccacgataaggctgtatattgacagctacgagaaggacgtagccaagattaatcaggatcctcaggtcatgttggctccgttgatctccattgctttgaaggttagtcagcttcaggagaggactggcagaacggcaccaaccgttattacctag

SEQ ID NO: 199419 - DNA, 1839 bp, synthetic construct
  misc_feature 1..1839: note = Description of Artificial Sequence: Synthetic coding sequence
  source 1..1839: mol_type = other DNA
atggccgcccccgagggcagcggcctgggcgaggacgcccggctggaccaggagacggcccaatggttgcgctgggataaaaactccctcacccttgaggccgtcaagcgccttatagccgaggggaacaaggaggagttacggaagtgtttcggagcacgtatggagttcgggaccgccggactgagagccgctatgggcccaggaatttcacgcatgaacgacctcacaatcatacaaaccacccagggtttctgtcggtacttggagaagcaattttctgatttgaaacagaaagggattgtgatcagctttgacgcgcgtgcccatccttcatcaggcggttcatcccgacgatttgccaggctcgccgcaacaacctttatcagccagggaatcccggtttacctgttttcggatattacaccgactccttttgtgccttttaccgtgagccacctgaaactgtgtgcgggaatcatgatcacagcctctcacaatcctaaacaggacaatggatataaggtgtattgggacaacggggcacagatcattagccctcatgataagggcatatctcaagctattgaggaaaatctggagccttggccccaggcatgggatgatagtctgattgactcttcacccctgctgcacaacccctcagcctccataaacaacgactacttcgaggacctgaaaaaatattgtttccatcggagtgttaacagagagactaaagtgaaatttgtgcatacgtctgttcatggggtgggccacagcttcgttcagtccgcattcaaggcgtttgatctggtcccccctgaggccgtgcctgaacagaaggacccagacccagagttccctacagtaaaatatccaaatcctgaggagggaaaaggagtgctaaccctttcttttgcactggccgataaaacaaaggctaggattgtgctggccaacgacccagacgcggaccgcctcgctgtggccgaaaagcaggactccggggaatggcgagtgtttagcggcaacgaactgggggcactgctggggtggtggctgttcaccagctggaaggaaaagaatcaggatcggagtgcattgaaagacacctatatgctgtcatccaccgtgagcagcaagatacttcgcgccatcgccctcaaagaaggctttcatttcgaagagacacttacaggattcaaatggatggggaatagagccaaacaactcattgaccaagggaagacagtcctgttcgcttttgaagaggccattgggtatatgtgttgtccttttgtactagacaaggacggagtgtccgccgccgttattagcgctgagctcgcttcctttctcgccacgaaaaacctgtcactgtcacagcagttgaaggctatttacgtggagtacggttaccacatcactaaagcctcttattttatctgtcatgaccaggagacgataaaaaagctcttcgaaaacctccgaaactatgatgggaagaataactaccccaaggcatgcgggaagttcgaaatcagcgctataagggacctaaccaccgggtatgatgactctcagcctgataaaaaggcagtactgcctacgagcaagtctagtcagatgatcactttcacgttcgccaacggcggagtcgccacgatgaggacctccggtacagagccgaagataaagtattatgccgagctttgcgcaccacccggcaattccgaccccgagcaactcaagaaggagctaaatgagctcgtctcagccatcgaagagcactttttccagccccagaagtacaatctgcagcctaaagccgactag

SEQ ID NO: 199420 - DNA, 1359 bp, synthetic construct
  misc_feature 1..1359: note = Description of Artificial Sequence: Synthetic coding sequence
  source 1..1359: mol_type = other DNA
atgatcaccgccagccacaaccccaagcaggacaacggctacaaggtctattgggataatggcgcacagattatatctccgcacgacaaggggatctctcaggccatcgaagaaaatcttgagccctggcctcaagcttgggacgactctctaatcgatagttcccctctgctgcataatccctcagcttccattaacaatgactattttgaggacctcaaaaaatattgcttccatcgcagtgtgaatagggagacaaaggtgaagtttgtgcacacctcggtgcacggcgtcgggcatagcttcgtgcagtcagcctttaaagccttcgacctggtgccacctgaagccgtcccagaacagaaggaccccgaccctgaatttcctaccgtcaagtatccaaatccagaggaaggaaagggtgtcctcacgcttagttttgcactagccgataaaacaaaagcaaggatcgtgctggccaacgatccagacgccgatcggctggctgtggcggagaaacaggactctggagaatggcgtgtgttttccgggaatgaactgggtgccctccttgggtggtggctgtttaccagttggaaagaaaaaaatcaagacaggtccgctttgaaagacacctatatgctcagctctacagtaagtagcaaaatcctcagggctatcgcactgaaagaagggtttcacttcgaggaaaccctgaccggattcaaatggatgggcaacagagcaaagcagctgatcgaccagggtaaaacagtgttatttgcattcgaggaagccatcggctatatgtgctgcccgtttgtactggacaaagatggggtatcggctgcagtcatctctgccgagctggctagctttctggcaactaaaaatcttagtctctcacagcagctgaaggccatttatgtggagtacggatatcacattactaaagctagctacttcatctgtcacgatcaggagacaataaaaaagcttttcgaaaatctgcgtaactatgatggcaagaataactatccaaaggcatgcggcaaattcgagattagcgccatcagagatttgaccactggctacgacgattcccagcccgacaagaaagctgtcttacccacgtcaaagagttcacaaatgatcacctttaccttcgcaaacggcggggttgctactatgcgtacaagcgggacagaacccaaaatcaaatattacgctgagctgtgcgcaccccccgggaactctgatccagaacagctgaaaaaggagttaaatgagctggtctctgctattgaagaacacttcttccagccccagaaatataatctacagcccaaagcggattag

SEQ ID NO: 199421 - DNA, 876 bp, synthetic construct
  misc_feature 1..876: note = Description of Artificial Sequence: Synthetic coding sequence
  source 1..876: mol_type = other DNA
atgagcagccagctgatcctgcggcccttcaccgtgagccacctgaagttgtgcgcggggatcatgattacagcttcccacaatccgaaacaggataatgggtacaaagtatattgggacaacggggcccagataatctcaccccacgataagggaatttcacaagccatcgaggagaacctagaaccttggcctcaggcctgggacgacagtctaattgactccagccccctcctgcacaacccatccgcaagcattaacaatgattattttgaggatcttaagaaatactgctttcacaggtcagtcaacagggagacaaaggtaaagtttgtgcatacgtctgtgcatggggtcgggcactctttcgtccagtccgccttcaaggcttttgatctggtgccgcctgaggccgttccagaacagaaggaccccgatccagaatttcccactgtgaaataccctaacccggaggaagggaaaggggtcctgacactcagcttcgcgctggccgacaaaactaaagccagaattgttttagcgaatgaccctgatgcagacaggctggccgttgcagaaaagcaggactcaggtgagtggcgggtattcagcggaaatgaactcggcgcgctgctcggttggtggctgtttactagctggaaggaaaaaaaccaagatagatccgccctcaaggatacctacatgctgtcatccacagtcagctcaaaaatcttgagggcaattgccctgaaggaggggttccactttgaggagactctgactggttttaaatggatgggcaatcgggctaaacagttgatcgatcaaggaaaaaccgtgttgtttgccttcgaggaagccatcggcaagaagtag

SEQ ID NO: 199422 - DNA, 1869 bp, synthetic construct
  misc_feature 1..1869: note = Description of Artificial Sequence: Synthetic coding sequence
  source 1..1869: mol_type = other DNA
atggccgagaacaccgagggcgacctgaacagcaacctgctgcacgctccgtaccacaccggggaccctcagttggacacagcgatcgggcagtggctaagatgggataaaaaccctaaaacaaaggagcagatagaaaatctactgagaaatggaatgaacaaggagctgcgtgacaggctgtgttgtcgcatgaccttcgggacagctggtcttagatccgctatgggcgcgggtttttgttatattaacgaccttaccgtcattcaatctacacaggggatgtataagtatctcgagcggtgcttcagcgatttcaaacagcgtgggtttgttgtgggatacgacacaagaggtcaagtgacatcttcatgctcttctcaacggctcgcgaaactgaccgccgctgtgctgctggccaaagatgtcccagtgtacctgttcagtcgatatgttcctacaccgtttgtaccctacgctgttcagaagttgaaagcggtcgctggcgtgatgattactgcctcccataaccgcaaggaggataatggctataaggtgtattgggaaactggcgcccagataacctcccctcatgataaggaaattctgaagtgcatcgaagaatgcgtcgagccttggaacggttcatggaatgataatctggtggatacctcacctctgaaacgggatccattgcaagacatatgtcgtagatatatggaagacctgaaaaagatctgtttctatcgggaactgaactcaaaaactaccttaaaattcgtgcacacaagtttccacggcgttggccacgattacgtgcagctggctttcaaagttttcgggttcaagccacccatccctgtgccagagcaaaaggaccccgaccctgatttctccacagtcaagtgccctaaccctgaggagggcgagagcgtcctggaactcagtctgagactcgccgagaaggaaaatgctcgcgtcgtcctggccactgatcctgatgcagaccggctggctgcagccgagctgcaggagaacgggtgctggaaggtgttcacaggcaatgagttggccgctttattcggatggtggatgttcgattgttggaagaagaataagtctcgtaatgcagacgttaagaatgtctatatgttagcaacaacagtttcatccaaaatactgaaggccattgctctcaaggaagggtttcactttgaggaaactttgcctgggttcaagtggataggctccaggatcatcgaccttctggaaaacgggaaggaggtcttgttcgcttttgaagaatccattgggttcctgtgtgggacctctgtgctcgacaaagacggagtctcagctgctgtggtggtggcagagatggcctcatacctagaaacaatgaatattacacttaagcaacagttggtaaaagtgtatgagaagtacggctaccacatttccaagactagctactttctctgctacgagccgccaaccattaagtctatattcgaaaggctcaggaatttcgattcccccaaagaatacccgaaattttgtggcacctttgccatcttgcacgtacgcgatgtaaccacaggttatgatagttcccagcccaacaagaaaagcgtactgcctgttagtaagaactctcagatgatcacatttacctttcaaaatgggtgtgttgccacattgagaacaagtggaacagagcccaagataaagtactatgcagaaatgtgtgccagccctgatcagtcggacacggcacttctcgaggaggaactgaaaaagctgatcgatgccttgattgagaattttctgcaaccaagtaagaatggcctcatctggagaagcgtctag

SEQ ID NO: 199423 - DNA, 1713 bp, synthetic construct
  misc_feature 1..1713: note = Description of Artificial Sequence: Synthetic coding sequence
  source 1..1713: mol_type = other DNA
atgggcggcgagtggggccagagcgccatctgccccgagagcgcccaggaatggacctaccaagtgggccagcatcttgtggatatggatctgggggctatcaccaaatatagtgcacttcacgctaaacctaatggcctaatcttgcagtacgggactgctgggtttcgcacaaaagccgagcaccttgaccacgttatgtttcgcatgggactgctggctgttctgcgcagcaagcaaacaaagtccacaattggcgtcatggttacggcatcgcacaaccctgaggaagataacggcgtgaagctggtggatcctctcggtgaaatgttagcacctagttgggaagagcacgcaacatgcctcgccaatgcggaggaacaggacatgcagcgtgttctgatcgatatttccgagaaggaggctgttaacctgcagcaggatgcctttgtggtgattggtcgggataccaggcctagtagcgagaagctgagtcagtctgttatagatggggtcactgtgctgggtggccagttccacgactatggccttctaaccaccccacagctacactatatggtctactgcagaaacactggaggccgctacggaaaagcaaccatcgaggggtactaccaaaagttgagcaaagcctttgtcgagcttacaaaacaggcctcatgttcaggagacgagtatcggtctcttaaggtcgattgcgccaatggcattggagcactgaaactgagggagatggaacactatttcagtcaggggctttcggtacagctattcaatgacggatcaaaaggcaagttgaaccacctatgtggtgccgattttgtgaaatctcaccagaaaccgcctcagggaatggagatcaagtccaacgaaagatgctgcagctttgacggggacgctgacagaattgtctactactaccacgatgctgatgggcattttcatcttatcgatggggacaaaatcgccacgctgatctcttcttttttaaaggaactgttagtggaaattggagaatctctcaacatcggggtggtccagacagcatatgctaatggaagctcaaccagatatttggaggaggtgatgaaagtccctgtgtattgtaccaagacgggagtgaaacatctgcatcataaggcccaggagtttgacattggggtctattttgaagctaacggccacggaactgccctgtttagcaccgcggttgagatgaaaatcaagcagtccgccgaacaactggaggacaaaaagcggaaggccgcgaagatgctagaaaacataatcgatctgtttaatcaagccgcaggcgatgctatctccgatatgctcgttatagaagcaatactcgcattgaaaggactcacagtgcagcagtgggatgccctgtatacagacctacccaatagacagctgaaggtgcaggtagcagacaggagagttatttcgaccacggacgccgaacggcaggcagtaacgccacccggcttacaggaagcaattaacgatttagtgaagaagtacaaattgtcacgagcgttcgtgagaccatcaggcacagaagacgtcgtgagagtatatgctgaagcagatagccaggagtcggcagatcaccttgcccacgaggtgtctctggctgtgtttcagctcgctggcggaatcggtgaaagacctcagcctggattctag

SEQ ID NO: 199424 - DNA, 444 bp, synthetic construct
  misc_feature 1..444: note = Description of Artificial Sequence: Synthetic coding sequence
  source 1..444: mol_type = other DNA
atggacctgggcgccatcaccaagtacagcgccctgcacgccaagcccaacggtctgattttgcagtacggcaccgctggatttcgaactaaagcagagcacctggatcatgtgatgtttagaatgggcctattggccgttttgcgctccaagcagaccaaatctaccattggcgtaatggttactgctagtcataatccagaagaggacaacggcgtgaaacttgtcgatcccctaggcgaaatgttggctcctagctgggaagagcacgctacctgtctggctaatgcagaggagcaggacatgcagagggtattgatcgatatcagcgaaaaggaagccgtgaatctccagcaagacgcattcgtggtaatcggtcgcgatacacgtccaagctcagaaaagttgtcacagtcagtcattgacggagtcacagtactgtag

SEQ ID NO: 199425 - DNA, 1629 bp, synthetic construct
  misc_feature 1..1629: note = Description of Artificial Sequence: Synthetic coding sequence
  source 1..1629: mol_type = other DNA
atggacctgggcgccatcaccaagtacagcgccctgcacgccaagccaaacggtctgattctgcagtacgggacggcagggtttcgaaccaaggctgaacatctggaccatgtgatgttccgcatgggattactcgccgttttaaggagcaaacagaccaaatcaactatcggggtaatggtcaccgcctcgcacaatcctgaagaggataacggcgtgaagttggtggatccactgggcgagatgctggctccatcttgggaggagcatgccacttgtcttgcaaacgcagaggagcaggacatgcagcgtgtgctgatcgacatatcggaaaaggaagccgtgaatttgcagcaggacgcctttgtggtgattggccgggatacccgaccctcttccgaaaaactgagccagtctgtgatcgatggggtaacagtcctaggcggccaatttcacgattacggcttgctgacgactccccaactgcattatatggtatactgtcgtaacacaggtggcagatatggcaaagcaaccatagaaggctactaccagaaattgagcaaagcctttgtggagctgactaaacaagcaagttgttcgggtgatgagtaccgtagcctgaaagtggattgtgctaacggaattggggccttgaaactgcgggaaatggagcattattttagtcagggcctgtcagtgcagctttttaacgatgggagtaaggggaagttgaatcacctgtgtggggctgatttcgtgaagtcacatcagaaacccccgcaaggcatggaaataaaatccaatgagaggtgctgttcctttgacggggatgctgataggattgtgtactactaccatgacgccgacggtcacttccacttaatcgacggagataagatcgccacattgatcagctcattcttgaaagagctgctggtagaaattggagaatctctgaatatcggtgttgttcagacagcctacgccaacgggtctagcacccgttaccttgaggaagtaatgaaggtgccggtttattgcaccaagacgggagtgaaacacctgcatcataaagcccaggagtttgatataggcgtgtattttgaagctaatggccacgggactgctttgttcagtactgctgtggagatgaagattaaacagagtgcagaacaactggaagacaaaaagcggaaagctgctaagatgctggagaacattatagacctgttcaaccaagcagccggcgatgccatcagcgatatgctggtgattgaagccattctggctctgaaggggctaaccgtgcaacagtgggatgccttatatactgacctccctaataggcagcttaaggtgcaggtcgccgatcgcagggttattagtacaacagatgcggaacgtcaggcagtgactccccctggcctgcaagaggccatcaatgaccttgttaagaagtacaagttgagcagagcttttgttaggccaagcggcactgaagacgttgtgagagtttacgcggaggcagacagtcaggagagtgctgatcacctcgcccacgaggtatctctagccgtcttccagctggccggggggatcggcgaaagacctcagccaggattttag

SEQ ID NO: 199426 - DNA, 1701 bp, synthetic construct
  misc_feature 1..1701: note = Description of Artificial Sequence: Synthetic coding sequence
  source 1..1701: mol_type = other DNA
atggacctgggcgccatcaccaagtacagcgccctgcacgccaagcccaatggacttatacttcagtatggcaccgccgggttccggaccaaggccgaacatctcgatcacgtaatgttccgtatggggctcctcgccgttctacggagcaaacagacgaaaagcaccataggggttatggtaaccgcgagccataatcccgaggaggataatggggtcaagctggtcgaccccctcggggagatgctggcccctagctgggaagagcacgccacctgtctggcgaatgctgaggaacaggatatgcaacgtgtgttgatcgacatttctgagaaggaggccgtcaatcttcagcaggacgctttcgttgttattggcagggacaccaggccctccagcgaaaagctctctcagtccgtcattgacggcgtgacagtcctgggcggacagtttcacgactacggcctactgacaaccccacaactgcactatatggtttattgccgcaacacaggcggaaggtatggaaaagccacaatagagggctactaccagaagctgtcaaaggcattcgtcgaattaactaagcaggcaagttgctcgggcgacgagtaccgatcacttaaagtcgactgcgcgaatggaataggcgctctaaaattgcgcgagatggaacactacttttctcaaggcttatcggtgcaattattcaacgatggatccaaaggcaaactgaatcacctgtgtggcgcagactttgtgaagtcccatcagaagccccctcagggcatggaaatcaagtcaaatgaacgatgctgtagtttcgatggcgacgctgaccgcatagtgtattattaccacgacgccgatgggcattttcacctaattgacggtgacaagatcgccactctcattagcagctttttaaaagagctgctggtggagatcggggaatctctgaatatcggagtagtgcaaactgcttacgcaaacgggagttctacacggtatctggaagaagttatgaaggttcctgtctactgtactaaaacaggagtcaagcaccttcaccacaaggcacaggagtttgatatcggagtctacttcgaagcaaacggtcacggcaccgcattgttttctaccgctgttgaaatgaagatcaaacagtccgccgaacagttagaagataaaaaaaggaaggcagccaaaatgttggagaatatcattgacctattcaaccaggcagccggggacgcaatctccgatatgctggttatcgaggcaatcttagctcttaaaggtttaacagtccagcagtgggatgccttgtacaccgatttgccaaataggcagttgaaggtgcaggtcgccgacaggagggttatcagtaccacggacgctgagcgacaggccgtcactccccccgggttgcaagaagctattaatgatctggtgaagaagtacaaattatcccgagcctttgtaaggccatcaggcacagaagacgttgtgagggtatatgcagaagctgactcccaggagtcagcagaccatctcgcacatgaagtttcacttgcagtctttcaactggcaggcggcatcggcgagcgccctcaacccgggtacaaagcggccgaaaccacccacaacataaacaacgcctttggaccagggaccgcaaatgagcataccgtcccttag

SEQ ID NO: 199427 - DNA, 720 bp, synthetic construct
  misc_feature 1..720: note = Description of Artificial Sequence: Synthetic coding sequence
  source 1..720: mol_type = other DNA
atggagggcagccccatccccgtgctgaccgtgcccaccgccccctacgaagaccagcgccccgcaggtggaggcggtctgagaagacctactggattattcgaaggacaacggaattacctccccaacttcatacagtcagtgctgagtagcattgacctgcgggatagacagggatgcactatggtggtagggtcggacggcagatacttcagcagaacagctatcgagatagtggtgcagatggcagcggctaatggcataggccggttgattatcggccaaaatggtatcctatcgactcctgcagtcagctgtatcatccgcaaaattaaggctgcggggggcattatcctaacagcatcccactgccctggtggacctggtggagagttcggtgttaagtttaacgttgcaaacggcgtcgagatcgtcgatcccgtggatatctatctgaacctgctcaggacgattttcgacttccatgccattaagggattgctaaccggtccttcccagctgaaaatccgcattgatgcaatgcatggagtcatgggaccctacgtcaggaaggtcttatgtgatgaattgggcgcaccagcaaattcagcaataaactgtgtgcccctcgaggactttggcggccagcaccctgacccgaacctgacatacgcaacgactctgctggaagctatgaaagggggcgagtatggtttttag

SEQ ID NO: 199428 - DNA, 1704 bp, synthetic construct
  misc_feature 1..1704: note = Description of Artificial Sequence: Synthetic coding sequence
  source 1..1704: mol_type = other DNA
atggagggcagccccatccccgtgctgaccgtgcccaccgccccctatgaagaccaacgacccgccggaggaggcgggttgaggaggccaacaggattgtttgagggccaacggaattacttacccaacttcatccagtcagttctgtcctctatcgacctaagggatcggcagggttgcaccatggtcgttgggagtgacgggagatacttctctcgaacagcaattgaaatagtagtgcagatggccgccgcgaacggaatcggtcgtctcatcattggccaaaatggtatccttagcacaccagctgttagctgcattatccggaagataaaagctgcaggcggaatcatcctcacggcgtcacattgtcccggcgggccaggaggcgaattcggagtgaaattcaacgttgctaacggtggtcccgcgcccgacgttgtcagtgacaaaatttaccagatctctaagacaatcgaggagtatgccatctgccctgacctgaggattgacctctcccgcctggggagacaggaatttgatctggagaataaattcaaacccttccgcgtggagattgttgatccagtagatatttacctgaatctactgcgtactatcttcgattttcatgcgatcaaagggctccttaccggtccctctcaactgaagatacggatcgacgccatgcacggcgttatgggtccatacgtgaggaaagtattatgcgacgagttgggggcacctgctaactcagcaattaattgtgttccattagaggattttgggggccagcaccctgaccccaaccttacttacgcaactactcttctcgaagcaatgaagggcggcgaatatgggtttggcgcggccttcgacgctgacggtgaccgctatatgattctcggccaaaatggattctttgtgtccccctcagattccctggccatcatcgctgcgaacctttcctgcattccctacttcaggcagatgggggtgagaggctttggtcggtccatgccaacaagcatggccctcgatcgagtcgctaaaagcatgaaagtcccagtctacgagacaccagccggatggaggtttttcagtaatctgatggacagcggccgttgcaatctgtgtggcgaggagagcttcggtacgggcagtgatcacctgagggagaaggatgggttgtgggccgtgctcgtttggttaagcatcattgccgcgcgcaagcaatccgtcgaggaaattgtaagagatcattgggctaagtttgggcgtcactactattgcagattcgactatgagggcctggaccctaaaacgacttactatattatgagagaccttgaggctctggtcaccgacaagtcatttattgggcaacaatttgctgtcggaagtcatgtctactctgtcgctaagaccgacagtttcgaatatgtggaccccgtggatgggaccgtcacgaagaaacaggggctgcgaataattttcagcgacgcatctaggctgatcttcagactgagttccagtagcggtgtgagggcgaccctgcggctatatgccgagtcatatgaacgggatccatccggtcacgatcaggaaccacaggccgtactcagccccctgatcgccatcgcactcaaaatcagccagatccacgaacgtacaggtaggcgtggtcctactgtgatcacctag

SEQ ID NO: 199429 - DNA, 1452 bp, synthetic construct
  misc_feature 1..1452: note = Description of Artificial Sequence: Synthetic coding sequence
  source 1..1452: mol_type = other DNA
atggcccaggccgacatcgccctgatcggcctggccgtgatgggccagaatttgattttgaatatgaatgaccacggtttcgtagtctgtgccttcaataggacagtgagtaaggttgatgactttctggctaatgaagcaaaaggaacgaaggtggtgggcgcacagagtctaaaagagatggtctccaaattgaagaagcctcgacgaatcattttgttagtgaaggcgggacaggcagtcgacgacttcatcgagaagctcgtgcccttgctggatacgggcgatattattatcgatggtggaaattccgagtatagagatacaactcggagatgccgggatttgaaagctaaaggcatcctttttgtgggttctggagtaagtgggggggaggagggagcgagatatgggcccagcctcatgccggggggtaataaagaggcatggccccacattaagactatctttcagggcattgctgcgaaggtgggcaccggagagccctgttgcgactgggtgggtgacgaaggtgcaggacacttcgttaagatggttcataacggtattgagtatggcgatatgcagctgatttgtgaagcataccacctcatgaaagatgtgctgggtatggcgcaggacgaaatggcccaggccttcgaggattggaacaagactgagctagactctttcctgattgaaataactgctaatattctgaagttccaagacactgacggcaaacacctattgccaaagatcagggactcagctggtcaaaaaggcaccggtaagtggacggcgattagcgctctggagtacggcgtgcccgttacgctaataggggaagctgtgttcgcccgatgtctaagcagcttgaaggacgaacggatccaagcctccaagaagctcaaggggccacagaaattccagtttgatggggacaaaaaatctttcctagaagacataaggaaagccctctacgctagtaagatcatctcctatgcacagggatttatgctgctacgccaagcagcaacagaatttgggtggacgctgaattacggcggaatcgcgctgatgtggcggggcggttgcatcattcggtcggtgttcctgggcaagattaaggatgcgttcgacaggaaccctgaattgcagaatctgctgttggatgatttttttaaatccgccgtggagaattgtcaggattcatggaggagggccgtctccacgggcgtgcaggcggggatccccatgccttgtttcaccacggcattatccttttacgatgggtatagacacgaaatgctccccgcgagtctcatccaggcccaaagggattacttcggagcgcatacttacgaactgctcgcaaaaccaggccagttcatccacacaaattggacaggccacggtgggactgtgtcttcgagctcatataacgcttag

SEQ ID NO: 199430 - DNA, 1413 bp, synthetic construct
  misc_feature 1..1413: note = Description of Artificial Sequence: Synthetic coding sequence
  source 1..1413: mol_type = other DNA
atgggccagaacctgatcctgaacatgaacgaccacggcttcgtggtgtgtgctttcaacagaactgtcagtaaagttgacgattttctcgcgaatgaggcgaagggcactaaggtcgtgggggcccagtcactgaaagaaatggtgtcgaaactcaagaaaccccgcagaattatattgctggttaaggccggacaagccgtcgatgattttattgaaaagctggtgcctctgctcgacaccggggacatcatcattgatgggggcaatagcgagtatcgtgacactacccgtagatgccgcgacttgaaagctaaggggatactatttgtggggtctggggttagcggcggagaggagggcgctcggtacggtccttccctcatgccaggtgggaacaaagaggcctggccacacatcaaaactattttccagggaatcgctgccaaagtgggcacaggggagccgtgttgcgactgggttggcgacgagggtgccggacattttgtgaagatggtccataatggaatcgagtatggtgatatgcagcttatctgcgaagcatatcatttaatgaaagatgtcctgggcatggctcaggacgaaatggcacaggccttcgaggattggaacaaaaccgaactggattcatttctgatagaaattactgccaacatactgaaattccaggatacggacggtaaacacctcttgcccaagatccgcgacagtgctggacagaaggggactggcaaatggacagccataagcgccctggaatatggagtaccagtgaccctgatcggggaagcagtctttgcgcggtgtctgtcttccctgaaagacgaaagaattcaagctagcaagaagctcaaaggcccacagaagttccagtttgatggcgacaagaagtcatttctggaggatatccgcaaggccctctatgctagtaagataattagctatgcccaggggttcatgctcctacggcaggctgcaaccgaatttggctggacgctcaactacggcggaattgcccttatgtggcgaggtggatgtatcattaggtcagtgtttctgggaaaaataaaggatgcctttgaccgcaaccccgaacttcagaatctccttctggatgacttttttaagtccgctgtggaaaactgccaggattcttggcggcgtgctgtgtctacgggagtccaagcgggaattcccatgccgtgcttcaccactgctctgtcattttatgatggatacaggcatgaaatgttaccagctagtctcattcaagctcagcgtgattactttggggcccacacatacgagttgttagccaaacctggccagttcatccacaccaactggacaggtcacggagggactgtgtcgagctcttcctataacgcctag

SEQ ID NO: 199431 - DNA, 1386 bp, synthetic construct
  misc_feature 1..1386: note = Description of Artificial Sequence: Synthetic coding sequence
  source 1..1386: mol_type = other DNA
atggcccaggccgacatcgccctgatcggcctggccgtgatgggccagaatctgatcctcaacatgaacgatcacggattcgtggtctgcgctttcaatcgaacagtcagtaaggtggatgattttttagcaaacgaagcaaagggtacaaaggtggtgggtgctcaaagccttaaagaaatggtttcaaaacttaaaaagcctagacgcatcattctattggtgaaggccggacaggccgtggatgattttatcgagaagttgagacgctgtagagacctgaaagccaagggcattctgttcgtgggtagtggggtaagcggcggtgaggagggcgctcggtatggcccctctctgatgcctggtgggaacaaagaggcctggccacacataaaaactatcttccagggtatcgcagcaaaggtagggaccggtgagccttgctgcgactgggtcggcgatgaaggtgctggccacttcgttaagatggtacataatggcattgagtatggtgacatgcaactcatatgcgaggcctaccatctaatgaaagacgtgttaggcatggctcaagacgagatggcccaagccttcgaagattggaataagaccgaactggacagctttctgattgagatcaccgcaaacatacttaaattccaagacactgatgggaaacatcttctccctaagatccgcgatagtgctggccagaaaggcaccggaaaatggaccgcaatctcagccctggagtacggagttccggtgacactgattggggaggcagtgttcgctaggtgcctgtcgtccctcaaggacgaaagaattcaagcctccaaaaagctgaagggccctcagaagtttcagttcgacggcgacaaaaagagcttcctggaggacatcagaaaggctttatatgcatctaaaatcatctcctacgcgcaggggtttatgctgctccgtcaggcggctactgagttcgggtggaccctcaactacggcggtattgctctgatgtggcgtgggggctgcatcatcagaagcgtgttcctcggcaagatcaaagacgccttcgatcggaaccccgaactgcaaaacctgcttttggatgacttttttaaaagcgccgttgagaattgtcaggacagttggcggagagccgtctcaacgggtgtccaagccggaatacccatgccgtgctttacaactgccctatccttctatgacgggtaccggcatgaaatgttacccgcatctctaatccaggcacagcgcgactattttggagcgcacacctatgagcttctcgccaagccaggtcaattcatccatacaaattggaccgggcatggaggcaccgtctcgtcaagcagttacaacgcctag

SEQ ID NO: 199432 - DNA, 1290 bp, synthetic construct
  misc_feature 1..1290: note = Description of Artificial Sequence: Synthetic coding sequence
  source 1..1290: mol_type = other DNA
atgaccaccgccctgtggagcgtgctgctgatcggcctgagccccaagctgatgatcagctggccgatgcgacaggctgttgatgacttcatcgagaaattagttcctcttttagataccggcgatatcatcattgacggaggcaactcggaataccgggacaccacaagaagatgccgagatctgaaagctaagggcatactgtttgtgggctctggggtgagcggaggggaagagggggcccggtacggcccctcactgatgccaggcggtaataaggaagcttggcctcacattaaaacaatttttcaaggaatcgcagcaaaggttggtacaggtgagccctgttgcgactgggtgggtgacgaaggggctggccacttcgtgaagatggttcacaatggaatcgaatacggtgatatgcaacttatttgtgaggcctaccacctcatgaaagatgtgctgggaatggcccaggacgaaatggctcaggcctttgaggactggaataagactgagctcgatagcttccttattgagataactgccaatattctcaagttccaggacactgatggcaaacacctcctccctaaaatacgggattccgccggccagaagggcactggtaagtggacagccataagtgcccttgaatacggtgtgccagtgaccctgatcggggaggccgtgtttgctcggtgtttgtcctctctcaaagatgaaagaatacaggcatctaagaagttaaaaggcccgcagaaatttcaatttgatggcgacaagaagagcttcctcgaagacattagaaaagctttgtacgctagcaagattatttcctatgcacaggggtttatgttgctgaggcaggcagccactgagttcgggtggacactgaactatggaggcatcgctctcatgtggagaggtggctgcattatcaggtcagtgtttctcgggaagattaaagacgcgttcgaccgcaatccagagctccagaacctgttacttgatgacttctttaaaagcgcagttgagaactgtcaagacagctggcggcgcgcagtgtccaccggcgttcaggctggaatcccaatgccctgtttcaccaccgccctgtctttttatgatgggtaccggcatgagatgctgcctgcatctctgattcaggcccaaagagactattttggcgcccacacttacgagttgttggcaaagcccgggcagtttatccacaccaactggactggacacggtggaacagttagcagtagcagctacaacgcatag

SEQ ID NO: 199433 - DNA, 1500 bp, synthetic construct
  misc_feature 1..1500: note = Description of Artificial Sequence: Synthetic coding sequence
  source 1..1500: mol_type = other DNA
atgaccttctggacccagatgttcttcctgctgcaggactgcgagggactgatcgtccggtcagccacgaaagtaactgctgacgtcatcaacgcggctgagaagttgcaagtggtgggtcgggccggaacaggagtggataacgtcgacctcgaggctgccactagaaaaggaattttagtcatgaatacacccaacggtaatagtctgtctgctgctgaacttacttgtgggatgatcatgtgtctcgcgagacagatcccccaggccactgcctccatgaaggatggcaagtgggagcgcaaaaagttcatggggacggaattgaatggaaagacactcggcatactaggacttggtagaataggccgggaagtagcaacacgcatgcagtcattcggaatgaagacaatcggctacgatcccattatcagcccagaggtaagcgcttcctttggtgtgcagcaattgcctctcgaagagatctggcctttgtgtgattttatcacagtgcacacccctctgctgccctcaactactggtctgctaaacgataatacctttgctcaatgtaagaagggcgttcgggtcgtcaactgcgcaagagggggaatcgtggacgaaggtgctctgcttcgcgccctgcagagtggccagtgcgccggcgccgctctcgatgtgtttacggaagaacccccccgggaccgtgccctggtggatcacgagaatgtcatttcctgcccccacttgggggcgtcgaccaaggaggcacagtccagatgcggcgaggagatagcagtgcagtttgtggatatggtgaaaggcaagtcgctgacaggagtggtcaatgctcaggccctgaccagcgctttctctccgcacactaaaccctggatcgggttggccgaggcgctagggacactcatgagagcctgggctggatccccgaagggcactatacaagtaatcacccaggggacaagcctcaaaaacgcgggcaactgccttagccccgctgttatcgtgggacttttgaaggaggcctcgaagcaggcagacgttaatttggttaatgcaaagctcttggtaaaggaggcgggactgaatgtcacaaccagccatagcccggcagcacccggcgagcagggctttggcgagtgcctgctcgccgtcgccttagccggagccccctaccaggctgtcggcctcgtgcagggaacaacaccagtgctccagggactgaacggagctgtgtttagacccgaggttcctctgagaagagacttgcccctactgttgttccgtacccagacatcagatcctgcgatgctcccaaccatgataggcctgctggccgaagctggtgtgagactcctctcatatcaaacatctttggtatcggatggggaaacatggcacgtcatgggtatcagttccctgctacccagcctcgaagcatggaagcagcatgtgacagaggcctttcagttccacttctag

SEQ ID NO: 199434 - DNA, 1602 bp, synthetic construct
  misc_feature 1..1602: note = Description of Artificial Sequence: Synthetic coding sequence
  source 1..1602: mol_type = other DNA
atggccttcgccaacctgcggaaggtgctgatcagcgacagcctggatccgtgttgtcgcaagatcttgcaagacggaggcctccaggtggtggagaagcagaacctgagtaaagaggagctcatcgccgagctccaggactgtgagggacttatcgtcaggagcgcaactaaagtgactgctgacgtcataaatgctgcagaaaagctccaggtggtgggcagagcggggacaggagtagataacgtcgatctcgaggcagccactcgcaagggaatactcgtcatgaatacaccgaacggcaattcattgagtgcagccgagctgacttgtggtatgataatgtgcttagcgagacagatcccgcaagccacagcatccatgaaagacggcaagtgggagcggaagaagttcatgggcacagagctgaacgggaaaactctgggtatattagggctgggccgaattggcagggaggtggccactaggatgcagtccttcggcatgaaaactatcggatacgacccaataatctccccagaggtctccgccagctttggcgtacaacaattgccactagaggaaatttggcccctgtgcgattttatcacggtccacactcccttacttccttcgacaactggactgttaaacgataacacttttgcacagtgcaagaagggcgttcgggtggtcaattgtgctagaggaggcatcgtcgacgaaggggcgttgctgcgcgcgctacagagcggacagtgcgctggagccgccctggacgtctttactgaagaaccaccccgggaccgggcgctggtagatcatgaaaatgtgatctcttgtccccacctgggagcgagcactaaggaagcccagtcacggtgtggcgaggagatagctgtgcagttcgtagatatggtcaaaggaaaatctcttaccggcgtggtcaatgcgcaggccttaaccagcgccttttcaccacacaccaaaccctggattgggctggccgaggctttgggcacactcatgagggcttgggctggcagcccaaaaggcactatccaggtgatcactcagggtacaagcttgaagaacgcggggaattgtttgtcccccgccgttatcgttggacttctgaaagaggcatcaaaacaagctgacgtcaacttagtaaatgctaaactactcgtgaaggaagctggcctgaacgtgacgacaagtcactctcctgcagcccctggagaacaggggtttggcgaatgcctactggccgtggctctcgcgggtgccccataccaggccgtgggactcgtgcaaggcactaccccagtgttgcaggggctcaacggagcggtattcagacccgaagttcccctcaggagagaccttccactcctactttttcgaactcagacaagcgaccctgcaatgttaccgacaatgattgggctgctggcggaggcgggtgtgaggcttctgagttatcagacttccctagtgtccgacggagagacctggcacgtcatgggtatcagttctcttcttccttcgctcgaggcttggaagcagcacgtgactgaggcctttcaattccatttttag

SEQ ID NO: 199435 - DNA, 291 bp, synthetic construct
  misc_feature 1..291: note = Description of Artificial Sequence: Synthetic coding sequence
  source 1..291: mol_type = other DNA
atgaagaccatcggctacgaccccatcatcagccccgaggtgagcgctagctttggagtacagcaactgcctttagaggagatctggcctctgtgtgattttatcaccgtgcacactccactcttgccttccacaacaggcctgttaaacgataacacatttgcacagtgtaagaagggtgtgcgggtggttaattgcgcgaggggggggatcgtggatgagggcgcactcttgagagccctacaatcgggtcagtgcgcgggggccgcccttgacgtgtttacagaatag

SEQ ID NO: 199436 - DNA, 1221 bp, synthetic construct
  misc_feature 1..1221: note = Description of Artificial Sequence: Synthetic coding sequence
  source 1..1221: mol_type = other DNA
atgaaggacggcaagtgggagcggaagaagttcatgggcaccgagttgaatggaaagactctgggcatcctaggtctgggaaggatcgggagggaggtcgcaactaggatgcaaagcttcggaatgaagaccattggttacgacccaattattagtcctgaggtcagcgcctccttcggggttcaacagctgccactggaagagatctggcccctgtgcgactttattactgtgcacacccccctcctaccaagcacaacaggcttgctgaacgataacaccttcgcccagtgtaagaaaggggtaagggtcgttaattgcgctcggggcggtatcgtggatgagggcgctctccttagggctctccagagcgggcagtgtgccggggctgccttagacgtgtttactgaagagcccccaagagatcgcgcacttgtcgaccatgagaatgttatttcttgtccacacctcggagcttctacaaaggaagcgcagagccgatgcggtgaggagatcgccgtgcaatttgtggatatggtcaaagggaagtctttgaccggagtcgtcaacgctcaggctctgactagcgcatttagtccccacactaagccctggatcggcctagctgaagctctgggcactctgatgagagcctgggccgggtccccaaaaggaacgattcaggtaatcacacaagggaccagcttaaagaatgccggcaactgcctcagcccagcagtcattgtcggcctgctgaaggaagcaagcaagcaggccgacgtgaacctcgtcaatgctaagctcctcgtgaaggaagccggcttgaacgtgaccaccagccactcccctgccgcgccgggtgaacagggctttggcgaatgcctgctggctgtagctctggcaggtgcaccgtatcaggctgtcgggttggtgcaggggactacaccggtgctccagggcctcaacggagctgttttccgaccagaagtccccctgcggagggacctgcccctgctgctctttcggactcaaactagtgaccctgccatgctcccaaccatgattgggctacttgctgaggctggggttcgccttctgtcttaccaaacgtcgctggtaagtgatggcgagacctggcatgtgatggggatatcatctcttcttccctctctagaggcatggaagcagcatgtaactgaagcctttcagttccacttctag

SEQ ID NO: 199437 - DNA, 1254 bp, synthetic construct
  misc_feature 1..1254: note = Description of Artificial Sequence: Synthetic coding sequence
  source 1..1254: mol_type = other DNA
atgagcctgagcaacaagctgaccctggacaagctggacgtgaaggggaaacgcgtggttatgcgggttgatttcaacgtacccatgaaaaataaccagataacaaacaatcagcggatcaaggcagccgtgccaagtataaaattttgtttagacaatggagccaagtccgttgtactgatgtcacacctgggccgaccagacggcgtacctatgccggacaagtatagtctagagcccgtggctgtggagttgaagtccctattgggaaaagacgttctgttcctgaaagattgtgtgggcccagaagtggagaaagcttgtgctaaccctgcagccggtagcgtgatactgctagagaaccttaggttccacgtcgaggaggagggaaaggggaaagacgccagcggcaacaaagtaaaggccgagccagccaaaatcgaggccttcagggcatcattatccaaacttggcgatgtctacgtcaatgacgcctttgggactgcacaccgcgctcatagcagcatggtgggcgtaaacctgccacaaaaggcaggggggttcttgatgaagaaggagctcaattattttgcgaaggctctcgagtctcctgaacgtcccttcctcgccatcctgggcggtgcaaaagtggcagataagatacagctgatcaacaacatgcttgataaggtgaatgaaatgattattgggggcgggatggcctttacttttctgaaggtgctgaataatatggaaattggtaccagtcttttcgacgaagaaggcgcgaaaatcgtgaaagacctaatgagtaaagcagaaaaaaatggtgtaaagatcacactgcctgtggacttcgtaacagcagacaagtttgatgaaaatgctaaaacaggccaggcgacagttgcctccgggattccagcagggtggatgggtctagattgtggccctgagtccagtaaaaagtacgccgaggcagtcacgcgtgcaaagcagatcgtctggaacggaccagtgggggtgttcgagtgggaagcctttgctcgcggcactaaggctctcatggacgaggtggtgaaagccaccagtcgtggttgcattacaataattggtgggggcgatacagcaacctgctgtgccaagtggaataccgaggataaggtcagccacgtgtcaactggcggcggcgcctcactggaattactagagggcaaggtcctgccgggcgtggatgctctgagcaacatttag

SEQ ID NO: 199438 - DNA, 846 bp, synthetic construct
  misc_feature 1..846: note = Description of Artificial Sequence: Synthetic coding sequence
  source 1..846: mol_type = other DNA
atgagcctgagcaacaagctgaccctggacaagctggacgtgaaggggaagagagtcgtaatgcgggtggacttcaacgtgccaatgaagaacaatcagattacaaataatcagaggataaaagctgcagtcccgagcataaagttctgcttagataacggggcaaagagtgtcgtgctcatgagccacctaggccgccctgacggcagacccttcctcgccatactgggcggggccaaagtcgcagacaagattcaactcattaacaacatgttagataaggttaatgagatgattataggaggaggcatggcattcacctttttgaaggtgctgaataatatggaaattgggacatcccttttcgacgaggagggggccaaaatagtaaaggatctgatgtctaaggccgagaaaaatggcgtcaaaatcactctgccagtggacttcgtgaccgctgacaaattcgatgaaaacgcaaaaactggtcaggcgacagtagccagtgggataccagccggctggatgggcctggactgcgggccagaaagcagcaaaaagtacgctgaggcggtaacacgcgcgaagcaaatcgtgtggaacgggcctgtaggcgttttcgagtgggaggcctttgctcgcgggacaaaggccctgatggacgaggtggtgaaggccacatctcggggttgcatcactatcataggcggtggggacactgccacttgttgcgccaaatggaacacggaggataaagtctcccacgttagtactggcgggggggcttcactggaactgctggaagggaaggttctgccaggtgtggacgcactatccaatatttag

SEQ ID NO: 199439 - DNA, 729 bp, synthetic construct
  misc_feature 1..729: note = Description of Artificial Sequence: Synthetic coding sequence
  source 1..729: mol_type = other DNA
atggtgggcgtgaacctgccccagaaggccggcggcttcctgatgaaaaaagagctgaactatttcgcaaaggccctagagagcccggagagacctttcttggccattctgggaggggccaaggtggctgataaaattcagcttatcaacaacatgttagataaggtaaatgagatgattattggcgggggaatggccttcacctttctgaaggtcctgaataacatggagatcggcacttccctgttcgatgaggaaggtgctaaaatagtgaaagatttaatgtccaaagctgaaaaaaacggggtcaagatcactttgccagttgatttcgtaacggctgacaaatttgatgagaatgccaagaccggccaggccaccgtggcttccggaattcctgccgggtggatgggacttgactgtggacccgagtcttcgaagaagtacgcggaagccgttacgagagccaagcagattgtgtggaacggacctgtgggcgtgttcgaatgggaggctttcgcccgcggcactaaagctctgatggacgaagtcgtgaaagcaacctccagaggctgtatcactatcattggcggaggagacaccgcaacgtgctgcgcgaaatggaacactgaggacaaggtgtcccacgtgagtacaggaggcggagctagtctggagttgctggagggtaaagtgctgcccggggttgatgccttgtcgaacatttag

SEQ ID NO: 199440 - DNA, 1170 bp, synthetic construct
  misc_feature 1..1170: note = Description of Artificial Sequence: Synthetic coding sequence
  source 1..1170: mol_type = other DNA
atgaagaacaaccagatcaccaacaaccagcggatcaaggccgccgtgccatccattaaattttgtcttgacaacggagcaaagtccgttgtgctgatgtcccacctgggtcgtccagacggcgtacccatgccagacaagtatagcttagagccagttgcagtggagctgaagtctctcctagggaaggatgtactgttcctcaaggattgcgttggtcccgaggtggagaaagcttgtgcgaaccctgctgccggttctgtgatcctattggaaaacctccggttccacgtggaggaggaagggaaaggaaaggacgcctctgggaataaagtcaaggccgagcccgccaagattgaggcgtttcgtgctagtttaagcaaacttggcgatgtgtatgtgaatgacgcctttggaaccgcccaccgcgcgcattcttctatggttggtgtgaacctaccacagaaagccggcggatttttaatgaagaaggaactgaactatttcgcaaaagccctggaaagccctgagcgaccatttctggcgatactgggtggtgctaaggttgccgacaaaattcaactcattaacaacatgttggacaaggtaaatgagatgataattggcggggggatggccttcacttttctcaaagtgctgaacaacatggagattggcacgtctctgttcgacgaggagggcgctaagatcgtgaaagatctgatgagcaaggcggaaaagaatggggtgaagataactctgcctgtcgacttcgtgactgccgacaaatttgacgagaatgcaaagactggacaagctaccgttgccagtgggattccggctggctggatggggcttgactgcggccccgaatcttccaagaagtacgctgaggctgttacgagagccaagcagatagtctggaacggaccagtgggcgtgtttgaatgggaagcctttgcccgagggacaaaagcactaatggacgaagtggtcaaggccacttccaggggatgtataaccatcattggaggcggagacactgctacatgttgcgccaagtggaacacggaagataaagtgtcacacgtctcgaccggtggaggtgcttccctggagctgcttgagggaaaggtgctccccggcgtggacgcactgtcaaacatctag

SEQ ID NO: 199441 - DNA, 1254 bp, synthetic construct
  misc_feature 1..1254: note = Description of Artificial Sequence: Synthetic coding sequence
  source 1..1254: mol_type = other DNA
atgagcctgagcaagaagctgaccctggacaagctggacgtgcggggcaaacgagtcattatgcgcgtagattttaacgtgcccatgaaaaaaaaccagattaccaataatcagcgtataaaggcctctataccgagcattaaatattgcttggacaatggtgctaaagcagtggtgctaatgtctcatctggggcgccccgacggcgttcccatgccggacaagtactcgctggcacctgtggccgtggagctcaaaagcctgttgggcaaggacgtgttgtttctcaaggattgcgtcggggccgaagtggaaaaagcttgcgccaatcctgccccgggatccgttatcttattggaaaacctgagatttcacgtcgaggaagaaggcaaagggcaggatccctccggaaagaaaataaaggcagaaccggacaaaattgaagcttttcgtgcgagtctcagtaagttaggagatgtgtacgtgaatgacgcatttggcacggcgcatcgcgcgcacagctccatggttggcgttaatcttccacacaaagcatccggcttcttgatgaaaaaagaactcgattacttcgccaaagccttggaaaacccagttcggcccttcctcgccattctgggcggcgccaaggtcgccgacaaaatacaactgatcaagaacatgttggacaaagtcaatgagatgattatcggggggggaatggcttacaccttcttaaaggttctcaataacatggagatcggagcatctctgtttgacgaggagggggcaaagatcgtgaaggatataatggcgaaagcccagaagaatggggttcgtataacttttcctgtggattttgttactggagacaaatttgatgagaatgcccaggtcggaaaagctaccgtcgctagtggaattagccccggctggatggggttggattgtggccccgagtctaacaagaatcacgcccaggtggtcgcccaggcacggctgattgtttggaatggtcccttgggggtttttgaatgggatgcgtttgccaaggggactaaggctttgatggacgaaatagtcaaggctacctcgaaggggtgtatcaccgtgatcggaggcggcgacactgcaacatgctgtgccaagtggaacaccgaggataaagtgtcccatgtgtccaccggtgggggcgcctccctggaacttttggaggggaaaattctaccgggggtggaggctctgtccaatatgtag

SEQ ID NO: 199442 - DNA, 765 bp, synthetic construct
  misc_feature 1..765: note = Description of Artificial Sequence: Synthetic coding sequence
  source 1..765: mol_type = other DNA
atggccgcctacaagctggtgctgatccggcacggcgagagcgcctggaatctcgaaaacaggttctccggctggtacgacgcggatcttagccctgctggccacgaggaggcaaaaagaggtggccaggccctgagagatgccggctacgagtttgatatctgctttacttcggttcagaaaagggcaattaggacactctggaccgtacttgacgctattgaccaaatgtggctcccagtcgtccgaacctggcgacttaacgagcggcactatgggggcctgacaggtcttaataaggcggagacggcggcgaagcatggggaagcccaggtaaaaatttggcgtaggtcctacgatgtgccgccgcctcccatggagccagatcatcctttttattcaaatatctctaaagaccggagatacgcagatcttaccgaggatcagcttccctcctgtgaatcactaaaagacacaatcgctcgtgccctccctttctggaatgaggagatcgttccccagatcaaagagggcaaaagggtcctgatcgccgctcatggtaattccctgagggggatcgtaaaacaccttgaagggctgagtgaagaagctattatggagctgaatctgccaactgggattcctatcgtctacgaattagacaaaaatctgaaacctataaaacctatgcagtttctgggtgatgaggaaacagtgcgcaaggccatggaggcggtcgcagcacaggggaaggcgaaaaagtag

SEQ ID NO: 199443 - DNA, 435 bp, synthetic construct
  misc_feature 1..435: note = Description of Artificial Sequence: Synthetic coding sequence
  source 1..435: mol_type = other DNA
atgcccctgatccggtgcggctgccacgacgtgccccccccccccatggagcccgatcacccattttactcgaacattagtaaggacagaagatatgctgacctgacagaagaccaattgccatcttgtgagagcttgaaagacaccattgcgcgtgctctgcctttctggaatgaggagatcgtgccacaaataaaggaggggaaaagggtgctcattgccgcacacggtaactcccttcgaggcatcgtgaagcatctcgagggactgagcgaagaagcaatcatggagttaaacctgccaacaggcatccccatagtgtatgagctggacaagaaccttaagcctattaagcccatgcagttcctgggagatgaagaaaccgtgaggaaagcaatggaggcggtggcagcacaagggaaggccaagaagtag

SEQ ID NO: 199444 - DNA, 762 bp, synthetic construct
  misc_feature 1..762: note = Description of Artificial Sequence: Synthetic coding sequence
  source 1..762: mol_type = other DNA
atggccacccaccggctggtgatggtgcggcacggcgagagcacctggaatcaggagaacagattctgtggctggttcgacgccgaattatcggagaagggaacagaggaagctaagaggggggccaaagccattaaggacgctaagatggagttcgacatttgttataccagtgtgttaaaacgggctattaggacgctctgggcaatcctggatggcactgaccagatgtggttgcccgtggtgagaacctggagactgaacgaaagacactacggggggctcacaggcctgaacaaggcagaaacagccgctaaacacggcgaggaacaagttaagatatggcggagatcattcgatatcccccccccacctatggacgagaagcacccctactacaacagtatcagtaaagagcggcggtatgcaggactgaaacctggcgagctacccacctgtgagagccttaaggatacaatcgcccgcgccctccccttctggaatgaagaaatagtcccccagataaaagctggaaagagagtcttaatcgcagcccatggtaatagcttgagaggtattgtcaaacacctggagggtatgtccgaccaggccatcatggaattaaaccttcctactggtatcccgatcgtctacgagcttaacaaggagcttaaacctacaaaacccatgcaattcctgggcgacgaggagactgtacgcaaagccatggaagcagtggcagcacaaggaaaggctaaatag

SEQ ID NO: 199445 - DNA, 765 bp, synthetic construct
  misc_feature 1..765: note = Description of Artificial Sequence: Synthetic coding sequence
  source 1..765: mol_type = other DNA
atggccgcctacaagctggtgctgatccggcacggcgagagcacctggaacttggaaaaccgtttttcgtgttggtatgatgccgatctgtcccccgccggacatgaggaagctaaaagggggggtcaagccctccgagatgccggatatgagttcgacatttgtttgacgagcgtccagaaacgggtgatacggacgctgtggaccgtgctggatgctatagatcaaatgtggctcccagtggtgcgcacttggagactcaatgagaggcattatggcggcttaacagggttaaacaaggccgagaccgcagcgaaacatggtgaagcacaggtgaaaatctggaggcgcagctatgacgtgccccctcctcccatggagcctgaccatccattctactccaacatatccaaggacagaaggtacgctgacttaacagaggaccagttgcctagctacgagagtcccaaagatacgatcgctcgggcactgcctttttggaatgaggagattgtgcctcaaataaaagaaggtaagagggtccttatcgctgcacacggaaacagtcttcagggtatcgccaagcacgttgagggactttccgaagaggctattatggaattaaatctacctaccgggatacctatcgtctacgagttagacaagaacctcaaacccatcaagcctatgcagttcctaggagatgaagagactgtctgtaaggcaatagaggcggtggcggcccagggcaaagccaaaaaatag

SEQ ID NO: 199446 - DNA, 966 bp, synthetic construct
  misc_feature 1..966: note = Description of Artificial Sequence: Synthetic coding sequence
  source 1..966: mol_type = other DNA
atggccgccgccgaggccggcggcgacgacgcccggtgcgtgcggctgagtgccgagagagcacaggccctcttagctgacgtggacacattgctcttcgactgtgatggagttctgtggcgtggcgaaactgccgtgccaggcgcccccgaagcactgagagctttgcgcgcacgggggaagagactcggattcataacaaacaactctagcaagacacgcgccgcttatgcagaaaagcttcgcaggctcggatttggtggacccgccgggcccggggcatctttagaggtgtttgggaccgcctattgcactgcactgtaccttcgacaaagactggcaggggcgccagctccgaaagcttatgtgctgggttcccctgcccttgccgccgagttggaggcagtgggtgttgcttctgtgggcgtcggtccagagccgttgcagggagaagggcccggcgattggctgcacgcccctctggagccagatgtgagggccgtcgtcgtcggctttgatcctcatttcagctacatgaaactgaccaaggccctgaggtaccttcagcaaccaggatgtttgctggtgggaacgaacatggacaacagattacctcttgaaaatggccgattcatagccggtactggctgcttggtgagggcggtcgagatggccgcacaacgccaggctgacatcatcggtaagccctctcggtttattttcgactgtgtgtcccaggagtacggaatcaatcctgaacgtaccgtgatggtcggcgatcgcctggatactgacatcctgctaggagccacttgtggcctaaagaccatacttacactgaccggagtgtcgactctgggcgatgttaaaaacaatcaggaatccgactgcgtgagtaagaaaaagatggtgcccgatttttatgtagatagtattgccgacctcctgcctgcactgcagggctag

SEQ ID NO: 199447 - DNA, 378 bp, synthetic construct
  misc_feature 1..378: note = Description of Artificial Sequence: Synthetic coding sequence
  source 1..378: mol_type = other DNA
atggccgtggccgacctggccctgatccccgacgtggacatcgacagtgatggcgtctttaagtacgtgctgatccgggtgcactccgccccaaggagtggagccccagccgccgagagtaaagagatagtgaggggctacaaatgggccgagtatcatgccgacatctatgataaagtcagcggtgatatgcaaaaacagggttgcgactgtgaatgtctgggcggcggccgcatcagccaccagtcccaggataaaaaaatacacgtgtatgggtattctatggcatatggccctgcacaacatgctatatctaccgagaaaataaaggctaagtaccctgactacgaggtcacctgggcaaatgatggttactag

SEQ ID NO: 199448 - DNA, 375 bp, synthetic construct
  misc_feature 1..375: note = Description of Artificial Sequence: Synthetic coding sequence
  source 1..375: mol_type = other DNA
atggccgtggccgacctggccctgatccccgacgtggacatcgactcagacggggtgttcaaatatgtcctgattcgcgtccacagtgcacccaggtctggcgcgcccgccgccgagtcaaaggaaatcgtccgcgggtacaaatgggccgaataccatgccgatatatacgataaggtctccggagacatgcaaaagcaagggtgcgattgcgagtgcctgggtggaggacgaattagccaccaatcacaggataaaaaaattcacgtctacgggtatagtatgatgcgacctacatgcgttccactgggagcgagcggacctcgcatccatcatcagggactttggtcttgccccgcgagacattttaactag

SEQ ID NO: 199449 - DNA, 375 bp, synthetic construct
  misc_feature 1..375: note = Description of Artificial Sequence: Synthetic coding sequence
  source 1..375: mol_type = other DNA
atggccgtggccgacctggccctgatccccgacgtggacatcgacagtgatggggttttcaagtacgtgttaattagggtgcacagcgctcctagatctggggctcctgccgctgaatccaaggagatcgtcaggggatacaagtgggcagagtaccatgccgatatctatgacaaggtgagcggtgatatgcaaaaacagggatgtgattgcgaatgcctcggcggtggtaggatctcccaccaaagccaggacaaaaaaatccacgtctatggctattctatgatgagaccaacatgcgttccactcggtgcctcaggcccccggatccaccaccagggcctctggagttgccctgccaggcattttaactag

SEQ ID NO: 199450 - DNA, 1356 bp, synthetic construct
  misc_feature 1..1356: note = Description of Artificial Sequence: Synthetic coding sequence
  source 1..1356: mol_type = other DNA
atggccaccgacgacaagaccagccccaccctggacagcgccaacgacttgcctcgcagccccacgtcccccagccacctgacccacttcaagcctctgaccccagaccaggacgagccaccctttaaatccgcatacagcagcttcgtcaatcttttccggttcaacaaggaaagggctgaggggggacagggggaacagcagcccctttcgggttcttggacgagcccgcagctgcctagtcgtacacagagtgtaagatcgcctaccccttataagaagcagctcaacgaggagctacagagaagatcgagcgctctgggcgacctgcgcgcgtgcacttactgccgcaagatagccttgtcatacgctcatagcaccgattcgaactccatcggggaagacttaaacgccttgtccgactctgcgtgttctgttagtgtcctggacccgtcagagcctcggacacccgtcggcagtaggaaggcttctagaaacatattcctcgaagatgacttagcatggcaatccctgatccaccccgatagttcaaatactcccttgagcacccggcttgtgtcagttcaagaagacgccggcaagtcccctgcacgcaatcgcagtgctagtatcaccaatctgtccctggaccgctctggatccccaatggtgcccagttatgagacctcggtatccccacaagccaatcgcacatacgtgagaacagagacaaccgaagatgagagaaaaattctgctggattctgtgcagctaaaggatctgtggaagaaaatatgtcatcattcatccggcatggagtttcaagaccaccgctattggctcaggacacaccccaattgtatcgtgggtaaagaactggtaaactggctgatccggaatggacacattgctacaagggcacaagcaatcgctattggccaggccatggtcgacggacgctggctcgattgtgtgtcacaccacgatcagttgttccgagacgaatatgccctctatcgccccctacaatccacggagttctcagagaccccatcaccagacagtgattcagtcaacagtgttgaaggtcacagcgaaccaagctggtttaaagacatcaagtttgatgactccgataccgagcagattgccgaagagggcgacgataaccttgcaaactctgcatctccatcaaaaagaacctccgtttccagttttcaaagcactgttgattccgacagcgcagcctccatctctctgaatgtggaactggataacgttaatttccacattaaaaagccaagcaagtatccacatgtacctcctcaccccgcagatcaaaagggccgccggtag

SEQ ID NO: 199451 - DNA, 1647 bp, synthetic construct
  misc_feature 1..1647: note = Description of Artificial Sequence: Synthetic coding sequence
  source 1..1647: mol_type = other DNA
atggccaccgacgacaagaccagccccaccctggacagcgccaacgacctccctcgaagtccaacaagcccttcgcatctgactcacttcaagcctctgacaccagaccaggatgagcctccctttaagtcggcctactcgagcttcgtaaacctgttccggttcaataaagaaagggcagaaggcggacagggggaacagcagcctctctctggttcttggacgtccccacagctgccttctaggactcaaagtgttcgcagtcccacgccttacaagaaacagctcaatgaagaactccagagacggagctccgctctggacacacgacgtaaagctgagccaacgtttgggggtcacgacccgaggaccgccgtacagctgcgcagcctcagtacggtcctcaaaaggcttaaagaaattatggagggaaaaagtcaggacagcgacttgaaacaatactggatgcctgatagccagtgcaaggagtgttacgattgttccgagaaatttactactttcaggagacgccatcactgtcgactttgcggacagatcttttgctctaggtgctgcaaccaggaaattcctggaaaatttatgggctacaccggtgacctgagggcgtgcacctactgccgaaagatcgcactgtcttatgcccactccactgattctaactcgatcggcgaagatctaaacgcactcagcgattctgcctgtagcgtgtcagtattggatccaagcgaaccccgaactcccgtggggtctcgtaaagcatcaagaaatatatttttggaagatgatctggcttggcaaagcctgatccaccccgacagctctaacaccccactgtccacccggctggtcagcgtgcaggaggatgcaggaaagtctcctgcaaggaacagatctgctagcatcactaatctcagccttgaccgatccggatccccgatggtccccagttatgagaccagcgtatccccccaggccaaccggacttatgtgagaacagagaccacggaagacgagagaaagatattgctagactctgtacaactgaaggacctctggaaaaaaatatgccatcactcctcaggcatggagttccaggaccatcgctactggctcagaacccaccctaactgcatagtgggcaaggaactggtgaattggcttatccgtaacggccacattgctactcgggcacaggcaattgcgattgggcaggccatggtcgatggccgatggctggactgcgtcagtcaccatgaccaattgttccgagatgagtatgcactgtatcggcctctacagtctactgagttttctgaaaccccctcacctgattcagacagtgtcaattcagtggaaggacacagcgagccaagttggttcaaagatattaagtttgacgactctgacacagaacagattgcagaagagggagacgacaatcttgccaatagcgccagtccatctaagcggacttcagtctctagcttccagtcaacagtcgatagcgattccgcggcttccatctcactgaatgtagaactagacaatgtgaatttccatattaaaaaaccctccaagtacccccatgtaccacctcacccagctgatcagaaagggagacgatag

SEQ ID NO: 199452 - DNA, 6297 bp, synthetic construct
  misc_feature 1..6297: note = Description of Artificial Sequence: Synthetic coding sequence
  source 1..6297: mol_type = other DNA
atggccaccgacgacaagaccagccccaccctggacagcgccaacgacctgccgcggtcacctacctctccctcacatctaacacattttaaaccactaacccccgatcaagatgagccgccatttaaaagcgcttactcatcatttgtgaatttattccggttcaataaagagagggccgaagggggtcagggcgagcagcaaccactctctggttcgtggactagcccgcaactccctagccgcacacagtcggtgaggtctccaactccttacaagaaacagctcaacgaggagctgcagcgccgcagctctgcactggatacaaggcgaaaggcagaacctactttcggtgggcacgaccccaggaccgcggtgcagcttaggagcctgtcaactgtgctcaaacggctgaaggagatcatggagggcaagtcgcaggattctgacctcaaacagtactggatgcctgactcacaatgcaaggagtgttatgactgttctgagaagtttacgactttccgccgccgtcaccattgtcgtctttgcggtcagattttttgctctcgctgctgtaatcaggagatcccgggtaaattcatgggttatactggggacctgagagcgtgcacctattgtcggaaaattgcattgtcatacgcccactccacagacagtaacagcataggagaagacctgaacgcgctctcggactcagcgtgttctgtatcggtgttggaccctagtgagccaagaaccccagtaggttccaggaaggctagccggaatatcttcttagaggacgacctggcctggcagagcctcatccaccccgatagcagcaacaccccactttccaccagattggtgagtgttcaggaggatgccggaaagtctccagcacggaacaggagtgcatccattactaacctgtctctggatcggtccggtagcccaatggtcccctcatacgagacaagtgtgtcgcctcaagctaatcggacatacgttcgtaccgaaacaaccgaggatgagcggaagattctgttagactcggtccagctgaaagatttatggaagaaaatatgtcatcactcgagtggaatggaattccaagaccacagatactggcttcggacgcaccccaattgtattgtgggcaaggaactggtgaactggctgataagaaacggccacattgccacaagggcccaggccatagctattgggcaggccatggttgacggtcgctggctggattgtgtgtctcaccacgaccagctgtttagggacgagtacgcgttgtaccgccctttacagagtacagaattctctgaaacccccagtcctgattctgactccgtaaactctgtggaaggtcactcggagcccagttggttcaaagacataaagtttgatgattccgataccgagcagatcgccgaggagggggacgacaacctcgctaactctgcgtcccccagtaagcgcacctctgtgagtagcttccaatccacagtagattccgactctgccgctagtatcagcttgaacgtcgaactggataacgtgaattttcacataaagaagccgtcaaaatatccccacgtgccacctcacccagcggaccagaaggagtatctgatctcagatacaggaggccagcagctgtctattagcgatgccttcattaaagagtccctgttcaataggagggtcgaggagaagtctaaggaactgccattcacccctctcggatggcaccataataacctcgagttgctgagagaagagaacggggaaaagcaggctatggagcgcctccttagcgccaatcacaatcacatgatggctctgcttcagcagctgttgcactccgacagtctgagtagcagctggcgggatatcatagtttctttggtatgccaagtagtacagacagtgcgacccgatgttaaaaatcaagatgacgatatggacatcaggcaattcgtacacatcaaaaagattccaggcggcaagaaattcgattcagtcgtcgttaatggattcgtttgcaccaagaatatcgcgcacaagaagatgtcctcatgtatcaaaaacccaaaaattctactgctgaagtgttctattgagtacctctatagggaggaaaccaaatttacgtgcatagaccctattgtgctgcaggagcgagagttccttaaaaactacgtgcagcgaatcgtggatgtaaggcctaccctcgtgctggtcgagaagaccgtttcacgtattgcccaggacatgctactggaacacggcattacccttgtgatcaacgtgaaaagccaggtgctcgagcggatcagcagaatgacacagggcgacttggtaatgagcatggatcaactgttaactaagccacatcttgggacatgtcataagttttacatgcagatcttccagctccccaatgaacagacaaagaccctgatgttcttcgaaggatgcccacaacacctggggtgcacaataaagctgcgcggtgggtccgactacgagctggctagagtcaaagagatattaattttcatgatttgcgtggcctatcacagccagcttgagatctcctttctaatggacgagtttgcgatgccgccgacccttatgcaaaacccctcttttcactcgttaatcgagggcaggggacatgaaggagcagtacaggagcagtatggcggagggagcattccgtgggatcccgacataccgccagagagcctcccatgcgacgactccagcctgctcgaactacgcatcgtgtttgaaaaaggggagcaggaaaacaagaatctgccacaggcagtggcgagcgttaagcatcaagagcattcaaccactgcttgtcctgccggactaccctgcgccttctttgcgcccgtccccgagagcctgcttccacttccagtggatgatcaacaggacgcactgggatcagaacaaccagagactcttcagcagacagtagtgctgcaggatcccaaatcacagattagggccttccgtgacccattgcaagacgataccggcctatacgtaacggaggaggttaccagtagcgaagacaaacgtaagacgtacagcctagccttcaagcaggagctaaaagatgttattctctgcatttctccagtgatcacattcagggaaccattcctgctgaccgagaaaggcatgaggtgcagtacccgagactacttcgcagaacaggtatactggtctcccttgctgaataaggaatttaaagagatggagaatagacgaaaaaagcagctgctgagggatctctcaggcttgcagggaatgaatggctccattcaggctaagagcatacaggtgcttccaagccacgaactggtttccaccaggatcgctgagcatctcggagatagccagagcctcggaaggatgctggccgactatcgggcaaggggtggccgaatccaaccaaaaaattccgatccctttgcgcactccaaggacgcttcctcgacttccagcggtcagagcgggtccaagaatgaaggagatgaagagcggggtctgattctgtcagatgccgtgtggtcaacaaaagtggattgtcttaatccaatcaatcatcagcgcttgtgcgtgcttttttctagctccagcgcccagtcttccaatgcaccttccgcttgtgtcagcccttggattgtcactatggagttttacgggaagaatgatttaaccctcggaatatttctcgaacggtactgtttcaggccgtcgtatcagtgcccttctatgttttgtgacacccccatggtccaccatatccgcagatttgttcatgggcagggatgcgtgcagattatcctgaaagagctggattcacccgtgcccggttaccagcatactatcttgacatatagttggtgtcgcatctgcaagcaagtcactccagttgtggccctttctaacgaatcttggtccatgtcctttgctaagtaccttgagctccggttttacgggcaccagtacacaaggcgcgctaacgcagaaccatgcggccacagtattcatcacgactatcaccagtacttctcttacaatcagatggtcgctagcttctcctattcccctattcggctgctggaagtgtgcgttcccctccccaagatcttcattaaaaggcaggcacctctcaaagtatctctgctgcaggatcttaaagatttttttcagaaggtctcgcaggtgtacgtggcgattgacgagagacttgcctctctaaaaaccgacacattcagtaaaacccgggaagaaaagatggaagatatatttgcacagaaggagatggaggaaggggagtttaagaactggatcgagaaaatgcaggctcgtctcatgagttcaagcgtggacactccccagcagctgcagtcagtgtttgagtctctcatcgccaagaagcagtccttgtgcgaggtgctacaggcctggaataatcggttgcaggatttattccagcaagagaaaggacggaagcgcccctcagtgccaccaagtcctggtagactcaggcagggggaggagagtaagatcagtgccatggatgcgtcacccaggaacattagtcccggcctgcagaacggagagaaagaggacagatttctgactacactatccagtcagtctagcaccagtagcacacacctgcaactgcctacacctcctgaagtcatgtcagagcagtctgtgggcgggccccccgaactggataccgctagcagcagtgaagatgtgtttgatggccacctgctgggatctacagactcacaggtcaaagaaaagagcactatgaaggcaattttcgccaatctcctcccaggtaatagttataacccgatcccgtttcccttcgatcccgataaacattacctgatgtatgagcatgagcgagtgccaatagcagtatgcgagaaggagccgagctcaataatagcctttgcattgtcttgcaaggaataccgaaacgcattggaggagctcagcaaagccacccagtggaactctgctgaggagggactgcctacgaactcgacatccgacagtagacccaagtctagcagtcccattaggttgcccgaaatgtcagggggacagacaaatagaaccactgagaccgagccccagccaaccaaaaaagcttctgggatgttatctttcttcaggggcaccgcggggaaaagccccgacctgagctcacagaagcgcgagaccctgaggggcgcagattcagcctactatcaagtgggccagactggtaaggagggcacagagaaccagggcgtagagccccaggatgaagttgatggaggtgacacacagaaaaagcagcttattaatccacacgttgagctgcagttctctgacgctaacgcgaagttttattgtagactgtattacgctggggaatttcataaaatgagggaggtcattctcgatagcagcgaggaggacttcatacggtccctgtcacacagctccccatggcaggcacgaggtggaaagtcaggggccgctttctatgcgacagaggacgatcgctttattcttaaacaaatgccacgccttgaagtacagtctttccttgacttcgctccccattactttaactacatcaccaacgccgtgcagcagaaaagacctactgccttggccaagattctgggcgtctaccgcatcggctataagaactcgcaaaataacacggaaaaaaaattagacctgctggtgatggagaaccttttttatggccggaaaatggctcaggtgtttgatctgaagggctcactgcggaaccgcaatgtgaaaacagataccggaaaggaatcctgcgatgtagttctgctggatgagaatctcttgaaaatggtgcgcgataacccgctgtatattcggtcccactcgaaggctgttctacggacgagcattcactctgacagtcattttctctcttcccacctgattattgactacagcctgctagtgggaagagacgatacctcgaatgaactagtggtgggaataatcgattacatccggacctttacatgggacaagaagctggagatggtggtgaaatccacagggatacttgggggacaggggaagatgccaaccgtggtgagccctgagctgtatcgaacccgcttttgcgaagccatggataaatacttcttgatggttccagatcactggaccggcttaggactcaactgctag

SEQ ID NO: 199453 - DNA, 3051 bp, synthetic construct
  misc_feature 1..3051: note = Description of Artificial Sequence: Synthetic coding sequence
  source 1..3051: mol_type = other DNA
atggagttccaggaccaccggtactggctgcggacccaccccaactgtatcgtgggaaaagagctcgtgaactggcttatccgcaacggacacatcgcaactagagcccaggcgatagccattgggcaggcaatggtggacgggcgctggttggactgtgtcagccaccacgaccagttgttcagggatgagtatgcactgtacaggccactgcaaagcacagagttctcagagactccatctcccgattccgattctgtgaacagtgtggagggccactccgagccctcatggtttaaagacattaagtttgacgactctgacacagagcaaatagctgaggagggggacgataatttggccaaatacctcatctccgataccggggggcagcagctgtctatctccgacgctttcatcaaggaatctctttttaatcgacgtgtggaagagaaatctaaggaactcccattcacacctctggggtggcatcacaacaatcttgagctgttaagagaagagaacggggaaaagcaggccatggagcgtctgttaagcgctaatcacaaccatatgatggccctgctgcagcagcttctacatagtgattccctctctagtagctggagagacattatcgtatctttagtgtgtcaggttgtgcagaccgtgagacccgacgtgaaaaatcaggatgacgatatggacataaggcagttcgtccatattaagaaaatcccaggaggcaagaaattcgactcagtggtggtgaacgggttcgtttgcacaaagaatatcgcccacaagaagatgtcctcatgcataaagaaccctaagatccttctcctcaagtgttcaatcgaatacctctatcgcgaagaaaccaaatttacatgcattgacccaattgttctgcaggagcgcgaatttctgaagaattacgttcaaagaatcgttgatgtacgcccgacgcttgtgctggttgaaaagacagttagtaggatcgctcaagatatgcttctcgaacatgggatcacactggtaattaacgtgaagtcacaggtgctggagcggatctctaggatgacgcagggtgaccttgttatgtccatggatcagcttcttaccaaacctcatctgggcacatgccacaaattttacatgcagattttccagttgccgaatgagcagacaaagacattgatgttttttgaaggatgccctcagcacctggggtgcaccatcaagctaaggggaggcagcgattacgagttggcacgtgtgaaggagattcttatcttcatgatctgtgttgcctatcactctcagttggagatctccttcctgatggatgaattcgctatgccccccacactgatgcagaacccaagctttcattctctaatagaggggcgcggacatgagggagcggttcaggaacagtacggcggtggctccataccttgggatccagatattcctcccgagagtctgccttgtgatgacagctctctactggagctgcgaatcgtgtttgaaaaaggagaacaggagaacaagaacttgcctcaagccgtggcctctgttaaacatcaggagcattccacgaccgcgtgtcccgctggcctgccgtgtgccttctttgctcccgtcccagagagcttactgcccctacctgtcgacgaccagcaggatgccttgggatccgaacagccggagacgctgcagcagaccgtggtgctgcaggatcccaaatcacaaatccgagcattccgggaccccctgcaggatgacactggactctatgtgaccgaagaagtgacatcctctgaagataagagaaaaacctattctctcgccttcaagcaggaactcaaagacgtgattctgtgcatctccccggtgatcacgttccgcgaacctttcttgttaactgaaaaggggatgagatgcagtacgagggactattttgccgaacaagtctattggagcccactcctgaataaagaatttaaagagatggagaatcgacgaaaaaaacaactcctgcgcgacttgtcgggtcttcaggggatgaatggttccatacaggcgaaatcgattcaggtgttaccttcacatgagctagtgtcaacaagaatcgcagagcatttaggcgatagccagagcctggggcgcatgctagcagattatagagcccgtgggggccggatccagcctaagaattctgacccattcgcccatagtaaagatgcctcatccacaagctcaggccagagcgggtctaaaaatgaaggcgacgaggagagaggcctgatcctctcagatgctgtctggagcaccaaagtggattgcctgaacccaatcaatcaccaaaggctctgcgtattattttctagtagctccgctcagagctccaacgcaccaagcgcttgcgtctccccttggattgtgaccatggagttttacgggaagaatgacctcacccttggaatcttcttggaaaggtactgcttccggcctagctaccaatgtcccagcatgttttgtgatacgccaatggtgcatcacatccggagattcgtgcatgggcagggctgcgtgcagatcatcttgaaggaactggactctcctgtgcccggctatcagcatactatcctgacatattcttggtgtagaatctgcaaacaagtcacgccagtggtcgctttgtccaacgagtcgtggtcgatgtctttcgctaagtacctagagctgagattctacggccatcagtatactcggagggcgaacgccgaaccttgcgggcattcgatccaccacgactaccaccagtatttctcatataatcagatggtggcctccttctcatattctcccatcagactcttggaagtttgcgtacccttgccgaagatatttataaaaaggcaggcccccttgaaggtcagcctgttgcaggacttgaaggactttttccagaaagtgtctcaggtgtatgtcgcaatcgacgaacggctggcctcactcaagactgacactttttcctag

SEQ ID NO: 199454 - DNA, 522 bp, synthetic construct
  misc_feature 1..522: note = Description of Artificial Sequence: Synthetic coding sequence
  source 1..522: mol_type = other DNA
atgcggccctggagcagccccgcccagctggtggccggcgcccagcctgccggacggggtgatccactcgggcctcggcctattcctccaccgaggttccgccgagcctcaagtcagcgtgaacctccatacccgcggccagccgaacccgcccttgagctggccggttctaaatgtcaacccgatacacctgctgcctctctatgtccagccgactcacccagccagcaccgcgtaatgcccccaggcccagcatcttgggcaaacgttggttctcgcccgcataccgttgccaatgggcacgagctgttcgaggtgtctgaagaaagggatgaagaagttgcagccttttgccatatgctggatatcttgcgcagtggctccgatatacaagactatttcctcaccggctacgtgtggtccgctgtcaccccatccccggaacacttaggcgacgaggtcaacctcaaggtgacagtcctgtgcgataggttgcaggaagcattaactttcacatgctag

SEQ ID NO: 199455 - DNA, 4905 bp, synthetic construct
  misc_feature 1..4905: note = Description of Artificial Sequence: Synthetic coding sequence
  source 1..4905: mol_type = other DNA
atgagcagcacccagggcaacggcgagcactggaagagcctggagtccgttggcatctcccggaaagagcttgcaatggccgaagccttacagatggagtatgatgcattgagccgcctacgtcacgacaaggaggaaaatcgggctaaacagaacgccgacccctctctgatcagctgggatgagccaggcgtggatttctactccaagccagccggcaggcgcaccgatctgaaactgctgcgggggctgagcggctccgaccccacgctcaattacaactccctctccccgcaggaggggccaccaaaccattctacctcacaggggcctcagcccggcagcgacccatggcccaagggctcgctctcaggggattacctgtatatattcgacggctccgacggaggcgtctcaagcagtcctggtcccggcgacatcgagggctcatgcaaaaagctgtcaccacctcccctcccaccaagagcgtctatttgggatacaccccctctgccgccacggaaaggctccccctccagttcaaagatctcacagccatccgatattaacacatttagcctcgtagagcagctgcccggaaaattgttagagcatcgcatccttgaagaggaagaggttctgggaggaggaggacagggacgattgctggggtccgtggattatgatggaatcaatgatgctatcaccaggttgaacctgaagtccacatatgatgctgaaatgctcagggacgccactcggggctggaaagagggaagaggtcctctggattttagtaaagacacatccggcaagcccgtggctaggagtaagacaatgcctccgcaggtgcccccccgcacctacgccagccgctacggcaaccgaaaaaacgcaactccaggaaagaacaggcggatcagtgcagctccggttggctcacggccacatacagtggcaaatggacatgagctgttcgaagttagcgaagaacgcgatgaggaagtggctgctttttgtcacatgctcgacatcctgcgcagtggcagcgacatacaggactattttctgacaggctacgtctggtcagccgtaaccccaagccccgagcacctcggggatgaagtgaatctgaaagttacagtgctctgtgaccgacttcaggaggccctcacttttacctgcaactgctccagcactgtggatctcctgatttaccagacactgtgctatacacacgacgacctgcggaacgtggatgtgggcgactttgtcttgaagccatgtggcctggaagagttcctgcagaacaaacatgcgctcggctctcatgaatatatccaatattgccggaagtttgacatcgacattaggcttcagttgatggaacagaaggtggtgagatctgacttggccagaaccgtgaatgacgaccagtctccaagcactctgaattatctcgtgcatctccaggagcggcccgtgaaacagacaatatcccgccaagcactgtccctgctgttcgatacgtaccataatgaggtcgatgcatttctgttagcagacggcgactttccactgaaggcagacagagtggtccagagcgtaaaagccatctgcaacgctctggctgcagtcgagacccccgaaataacttctgccctgaaccagcttcctccgtgccctagcaggatgcaacctaagatccagaaggaccctagcgtcttggctgtgagggaaaatcgggagaaagtagtcgaggccttaaccgccgctatcctggatcttgtggagctgtactgtaacacattcaacgctgatttccagacagcagtgcctggaagtcgtaagcacgacctggtgcaggaggcatgccattttgccaggagcctggcttttaccgtttacgcaacccaccgtatcccaatcatctgggctactagctacgaagacttctatctctcttgttctctttcccacggaggaaaagaactgtgctcccccctgcagacccgcagagcgcatttctcaaagtacctgttccatctgatcgtgtgggatcagcagatctgtttccccgtccaggtgaacaggctacctagagaaacgttactgtgcgccaccctgtatgctctaccaattcctcctccaggctcaagtagcgaagccaacaagcaaagacgcgtgccggaggcactcggatgggttacaacaccgttatttaactttcggcaggttttgacatgcggtcgcaaattacttgggttatggccagccacccaggaaaatcctagtgcccgatggtccgcacccaatttccatcagcctgacagcgtcatcctgcagattgacttcccaacgtccgcttttgatatcaaatttacgtctccacccggcgacaaattcagtccgcggtacgaattcggctctctgcgcgaagaagatcagcgtaagctcaaggacatcatgcaaaaggagtccctttattggcttaccgacgcagacaaaaagcggctgtgggaaaaaagatattattgccattccgaggtgagcagcctgccgctcgttctggcaagcgcgccatcttgggaatgggcctgtttaccagatatttatgttcttctgaaacagtggacccacatgaatcatcaggatgcccttggcctgctacatgccacattccccgatcaggaggtgcggcgtatggccgtccaatggataggaagcctgtcagatgctgagctcctcgactatctgccccagctcgtccaagccctgaagtatgaatgttacctggactcccccctggtacggtttttacttaagcgagctgtgtccgatctgcgtgtgacccactactttttctggctgctgaaggatggattaaaagactcccagttttctatccgataccagtaccttctggcagccctcctttgctgttgcggcaagggcctgcgtgaggagtttaacaggcagtgctggcttgtcaatgccttggccaagctcgcccagcaagtgagagaggccgcgccaagtgcccgccaaggaatcctccgcactggcctagaggaggtaaagcagttctttgcactgaacggatcctgtcggcttcctctgtcaccttcgctgctggtgaaggggatcgtcccgcgggattgcagctacttcaattcaaacgctgtccctctgaagctttcttttcagaacgtggacccactgggcgaaaacatacgcgtcatttttaagtgtggcgacgatctgagacaggatatgttgaccttgcaaatgataaggatcatgagtaaaatctgggtacaggagggattagatatgcgcatggtgatattccgctgcttttccaccgggcggggacgcggcatggtggagatgattccaaacgctgaaactttacgcaaaatacaggttgagcacggagtgactggcagtttcaaggataggccacttgcagactggcttcagaaacacaatccaggcgaagacgaatacgagaaggctgtcgagaacttcatttattcttgtgcaggatgttgcgtggccacctatgtcttaggtatctgtgacagacacaatgacaatattatgttgaagaccactggtcacatgttccacattgatttcggcaggttcctgggccacgcacagatgtttgggaatatcaagagagatcgggccccatttgtgtttacgtcagatatggcctacgtaattaacggcggcgataaacccagctccaggtttcatgattttgtggacttgtgctgtcaagcctacaatctcattaggaaacacactcatctgtttctcaacctcctcgggcttatgctgtcttgtggtataccagaactctcggatctggaggatttaaagtatgtctatgacgctctgagacctcaggatactgaagccaacgcaactacctactttacacggttgatcgagtccagcctgggctccgtggctacaaagttaaatttcttcatacacaacttagctcagatgaaatttacaggtagcgacgacaggctgactcttagtttcgcctccagaactcacacccttaagagcagtgggcgtatttcagacgtgttcctgtgccgacacgaaaaaattttccatccgaataagggctacatatacgtggtgaaggtgatgcgtgaaaacacccacgaagccacgtatatccagcgcaccttcgaggaattccaggaactccacaacaagttgaggctgctctttccttcttcccacctgccctcattcccctccaggtttgtgatcggcaggagtcgcggggaagccgtcgccgagagacggcgtgaggagctgaatggatacatctggcatttgatccacgcccctcccgaggtcgccgaatgcgacctcgtgtacaccttcttccatcctctgcccagagacgaaaaggccatggggacgagtcccgctcctaagagcagcgatggaacctgggctaggcccgtggggaaagtcggcggagaggtgaagttgagcattagctataagaacaacaagcttttcatcatggtgatgcacatccggggtctccagttactacaggatggcaatgaccctgatccatatgtgaagatttacctgctgcccgacccccaaaaaacaaccaagcggaagaccaaggtcgccagaaagacatgcaacccgacgtataatgaaatgctcgtgtatgacggtatcccaaaaggggacttacagcagcgagaactgcagctgagtgtgctgtccgaacaaggcttttgggagaacgttctcttaggtgaggtcaacattcggctgcgtgagctagatttggctcaggaaaaaacaggctggtttgccttagggtcgagatcccacggcaccctgtag

SEQ ID NO: 199456 - DNA, 360 bp, synthetic construct
  misc_feature 1..360: note = Description of Artificial Sequence: Synthetic coding sequence
  source 1..360: mol_type = other DNA
atgttcggcaacatcaagcgggaccgggcccccttcgtgttcacctctgacatggcctatgtgatcaatggaggtgataaaccgtcatccaggtttcatgactttgtggacttgtgctgtcaggcttacaatctcattcgcaaacacacgcatctgtttttgaacctgttgggactgatgttgtcttgtggaattcctgagcttagtgatttggaagatctgaaatacgtctacgacgccttgcgcccgcaggatacagaggctaatgcaaccacctattttaccagggtgattctggcgtctgtggtgggcggacgggagagcaaaacctgctccgccgtgtcgtcttcaggagactag

SEQ ID NO: 199457 - DNA, 396 bp, synthetic construct
  misc_feature 1..396: note = Description of Artificial Sequence: Synthetic coding sequence
  source 1..396: mol_type = other DNA
atgagcagcacccagggcaacggcgagcactggaagagcctggagagtgttggtattagtcggaaagaactcgccatggccgaggctcttcagatggaatacgatgccttgtccagattaagacacgacaaagaggagaacagggctaagcagaacgctgacccttcattgatcagttgggatgagcccggcgtggacttctattccaaacccgccggaaggagaacagatctgaaactcctccgcggactctccggcagcgatccgacactgaattataatagcttgagcccccaggaagggccacccaaccattcgacatcccagggccctcagccggggagcgatccctggccaaaggggagcctatcaggtgactatttgtatatattttag

SEQ ID NO: 199458 - DNA, 4821 bp, synthetic construct
  misc_feature 1..4821: note = Description of Artificial Sequence: Synthetic coding sequence
  source 1..4821: mol_type = other DNA
atgagcagcacccagggcaacggcgagcactggaagagcctggagagtgtaggcatcagccggaaggaactcgcgatggccgaggctctccaaatggaatatgacgcattgtcccgacttagacatgacaaggaagagaatagagccaagcaaaatgccgatccatccctgatttcttgggacgagccaggggtggacttctactccaagccagcaggccgccgtacagacttgaaactcctgaggggcttaagcggaagtgacccaaccctcaattacaattccctctctcctcaggagggaccaccgaatcacagcacttctcaggggccgcagcccggaagtgacccatggccaaaagggtccttaagtggggattacctctacatatttgatggctccgacggtggcgtctcaagctcgcctggacccggagatattgaaggtagttgcaagaagttatcaccccccccattaccgccaagagcttccatctgggacacacctccattgcctccccgaaagggcagtccctcgtcctctaaaatctctcagccctcagatataaacaccttctccctggttgagcaactccctgggaagcttctcgaacacagaatcctcgaagaggaagaagtgttgggagggggcggacagggccggctcctgggaagcgtcgactacgacgggatcaacgacgcgatcacaagactgaatctcaaatcaacttatgatgccgagatgcttcgggacgcaacccgtggatggaaagagggacgcggcccacttgactttagtaaggacacctcgggaaagcccgtggcacgctccaaaaccatgcctccccaggttccccctcggacttatgcaagccggtatgggaaccggaagaacgccacccctggcaaaaaccgccgcatatcagccgcgcccgtcgggtcgagaccccataccgtggctaatggccacgagctgtttgaggtgagcgaggaacgtgacgaagaggtggctgccttctgtcatatgctggatatcttaaggtccggtagcgatatccaggattactttctgaccggatatgtgtggtccgccgtaacaccctcacctgagcacctgggagatgaagtcaaccttaaggtgaccgtgctctgcgatcgtctccaagaggctctgacctttacatgcaattgcagcagcaccgtagatctgctcatttatcagactttatgttacacccatgacgatctgaggaacgttgacgttggggatttcgtgttaaagccttgtggtctcgaagagttcctgcagaataaacacgctttagggtcccatgaatacatccagtattgcaggaaatttgatatcgacatacggctgcagctgatggaacagaaggtggtgcgctcagacctggccaggacagtaaatgacgaccaatctccgtctacactaaactaccttgtgcacttgcaggagagaccggtcaaacagactattagtcgacaggctttgagcttactgttcgacacctaccacaatgaggttgacgcctttctcctcgccgacggggactttcctttgaaggccgatagagtggtgcagtcagtgaaagctatctgcaacgcactggcagctgttgagacgcctgagattacctcagctctgaaccaactgcccccctgcccatctcgaatgcagcccaaaattcagaaggacccaagtgtgctggcagttcgagagaaccgcgagaaggtggtcgaggcgctgaccgctgctatcctggatttggtcgaactctactgcaatacctttaatgctgactttcagaccgctgtgcccggatcacgaaagcacgatttagtgcaggaggcttgtcacttcgcccggtcattggcctttacagtgtatgccacccatagaattcccataatttgggccaccagctacgaagacttttacttgagctgcagtttatctcacggcggaaaggagctgtgttctccattgcaaactcggcgagcccacttttccaaatacctgttccacctcatcgtttgggaccagcaaatttgtttccctgtgcaggtaaacagactgccacgggaaacacttctctgcgcgacgctatatgcactccccatccctcctcccggcagctcctccgaagcaaacaaacagagaagggttcccgaagctctagggtgggtgacaacacctctgttcaatttccggcaggtcttaacatgcggcaggaagctgttggggctctggcccgccacccaggagaacccgtcagcacgctggagtgcccccaattttcatcagccagacagcgtcattctccagattgatttccccactagtgccttcgatatcaagtttacctcacccccaggcgacaagttttctcctcgttacgaatttggtagtctacgcgaagaagaccagcgcaagctgaaggacatcatgcagaaagaaagcctttattggcttacggacgcagataagaaaagactgtgggaaaagaggtactactgccacagcgagtggactcacatgaaccaccaagacgcactgggcctgttgcatgcaactttccctgatcaggaagtccggaggatggcagtccagtggattggctccctgtcagatgcagagctgttggactatttaccccagctggtacaggcacttaaatacgaatgttaccttgactctcccctggtccgctttttgctcaaacgcgctgtctccgatctccgggtgacccactacttcttctggctcctgaaggatggcctgaaggactcacagttctctattagataccaataccttctagcggccctcctctgttgttgcggcaaaggactaagggaagagtttaatcggcagtgctggttagtgaatgccctcgccaaactggcccagcaagtgcgggaggctgcgccctctgctcggcagggcatcctgcgcactggcctcgaagaagtcaaacagttcttcgctctgaacgggtcatgccggctccccctctcacccagtctcctggtgaaaggaattgtgccccgcgattgttcgtatttcaatagcaatgccgtgcctctgaagcttagcttccaaaatgtagatcctttgggcgagaacatcagagtgatatttaagtgtggagacgatctcagacaggatatgttgacactgcaaatgattcggattatgagcaagatctgggtacaggagggactcgatatgcgtatggtcatcttccgctgtttcagtacaggccgaggccgaggaatggttgaaatgattcctaacgcagaaaccttacgcaagatccaggtagaacacggcgtgaccgggtccttcaaggacagacccctcgcagactggcttcaaaaacacaatcccggcgaggatgagtacgaaaaagcagtggagaattttatctacagttgcgccggctgctgcgtggccacttatgtcttgggtatctgcgatcggcacaatgacaatattatgttaaagacaaccggtcacatgtttcatatagacttcgggaggtttctcggacacgcccagatgtttggaaacatcaagagggaccgggccccctttgtgtttacttccgacatggcttacgtgataaacggtggagataagcccagcagccgattccatgacttcgtggatctgtgctgccaagcttataatctcatcagaaagcatacccacctcttcctgaatcttttgggactcatgctgagttgcgggatccctgaattgagcgacctggaggacctaaagtacgtctatgacgctctgagaccacaggatacagaggcaaatgctacaacttactttacccgactgatagaatcctctctgggctccgtggccaccaagctaaactttttcatccacaacttagctcagatgaaattcacaggaagtgacgacagacttaccctatcgttcgcaagtcggacacacaccttaaaatcctccgggaggatctcagacgtgttcctgtgccggcatgagaagatcttccatccaaacaagggatacatctacgtcgtgaaggtaatgagagagaatacccacgaagccacatatatccagcgcaccttcgaagagttccaggagctgcataacaagctgagactgctgttcccgtcctctcacttgccttcttttcctagcaggtttgttattggacggagccggggtgaagccgtcgctgagagaaggcgcgaggaactgaacggctacatttggcacctcatacacgccccgcccgaggtggctgagtgtgatctcgtctatactttttttcaccctttaccacgcgatgagaaagctatgggcactagccctgctccgaaaagctctgatggcacttgggcacgcccagtaggcaaagtgggcggtgaggtgaaattgagcattagctacaagaacaacaagttattcatcatggtcatgcatattcgcgggctccagttgctgcaagacggaaatgatcctgatccctacgtcaagatctatcttctccctgacccccagaaaacaaccaagcgaaagaccaaggtggccagaaaaacgtgtaaccctacgtataacgaaatgcttgtgtacgatggaatccccaagggtgacctccagcaacgagagctgcaattgagcgttctgtcggagcagggattctgggagaacgtgttgctgggagaagtgaatatccggcttcgcgagctcgacctggcccaggagaaaaccggttggtttgccctagggagtaggtcacatgggactctgtag

SEQ ID NO: 199459 - DNA, 183 bp, synthetic construct
  misc_feature 1..183: note = Description of Artificial Sequence: Synthetic coding sequence
  source 1..183: mol_type = other DNA
atgagcagcacccagggcaacggcgagcactggaagagcctggagtcagtgggtatttctcggaaggagttggccatggccgaggctcttcaaatggagtacgatgctctgtctcggcttcgccacgataaggaagaaaaccgcgccaaacagaacgccgatccaagcctcatcagctggtag

SEQ ID NO: 199460 - DNA, 522 bp, synthetic construct
  misc_feature 1..522: note = Description of Artificial Sequence: Synthetic coding sequence
  source 1..522: mol_type = other DNA
atgcggccctggagcagccccgcccagctggtggccggcgcccagcccgccggacgcggcgatccactaggaccacggccaatcccaccaccgcgatttcgacgggccagtagccagagagagcctccataccctcggcccgccgagccagccttagagcttgcaggatccaaatgccagccagacacacctgctgcaagcctgtgccctgcagattctccttcacagcatagggtcatgccccccgggcccgcctcatgggccaacgttggctcacgcccacacactgtagccaatggccatgaactgtttgaagtatccgaggagcgcgatgaggaagtggccgccttctgtcatatgttggacattctgagatcaggaagcgacattcaggactacttcttgacaggatacgtgtggagtgccgtgaccccatcccccgagcacctaggggacgaagtcaaccttaaagtgacagtgttgtgtgatcgattgcaggaggccttgacgtttacctgttag

SEQ ID NO: 199461 - DNA, 4338 bp, synthetic construct
  misc_feature 1..4338: note = Description of Artificial Sequence: Synthetic coding sequence
  source 1..4338: mol_type = other DNA
atggcctacagctggcagaccgaccccaaccccaacgagagccacgagaaacagtatgagcaccaggaatttctatttgtgaatcagccacattcttcgtcacaagtcagtctcgggtttgatcagatcgtggacgaaatctcgggcaagatccctcactacgaaagcgaaattgacgaaaatacctttttcgtgcccacggctcccaagtgggatagcactggccattccctcaatgaggctcaccagatctctctgaatgaattcacatcaaagagcagggagctaagctggcatcaggtatccaaggcccccgctataggtttttctccatccgtgctgcctaagcctcagaacactaacaaagaatgctcctggggttcgcctatcggaaaacaccacggagccgatgacagccggttctctatccttgccccaagcttcacatctctagataagatcaaccttgagaaggagctggagaatgagaatcacaactatcatatcggatttgaatcctccatccccccaaccaactcatctttttcatcagattttatgcccaaagaggagaacaaaaggagcgggcatgtgaacatcgtggaaccgagcctcatgttgcttaagggcagtttgcagccagggatgtgggagagtacttggcaaaagaatatcgagtccataggctgcagtatccagctcgtggaggtcccccagagctcgaatacatccttagcttctttctgcaataaggtgaagaagattcgggaaagataccacgcggccgacgtgaatttcaactccggcaagatttggtctacaaccaccgctttcccctaccaacttttcagcaagacaaagtttaatatccacatttttatcgataattcaacccagccactgcatttcatgccatgtgcaaattacctggttaaggacctcatcgccgaaatcttgcacttctgtaccaatgaccagctattgccaaaggaccacatactgtccgtgtgtggctctgaggaatttctgcagaatgaccattgccttggatctcataagatgttccagaaggataaatccgtgatccagctgcatttgcagaaatcgagggaggccccagggaagctgtctaggaagcacgaagaagatcactcccagttttacctgaatcagctgttggagttcatgcatatctggaaggtgtcccgccagtgtctgctcacactaatccgtaagtacgactttcatctgaagtaccttctgaagacacaggagaacgtatacaatataattgaagaggtcaaaaagatttgctcagtcctgggttgcgtcgagaccaaacagatcacagatgctgtgaacgagttatccttgattctccagcgtaagggcgagaacttttaccagtcaagcgagacttctgccaaggggttgatagagaaggtcaccaccgaactttccacatcgatttatcaactcattaacgtgtattgtaactccttttatgccgacttccaacccgtcaacgtgccacggtgtactagttacttgaacccgggactaccttcacatctgagctttacggtatacgctgcccacaatatccctgagacatgggtacaccgaattaacttccccctggagatcaagagcctgccccgcgaatctatgttgacagttaagctattcgggatcgcatgtgcaactaacaatgctaacttgttagcatggacctgtcttcctctctttcccaaagaaaaatcgattctgggttccatgctcttctccatgactttgcagtccgagccaccagtggagatgattactcccggcgtctgggatgtgtcacaaccctcaccagtgaccctgcagatcgactttcctgcaaccggctgggagtacatgaagccagattccgaggagaatcgctcgaatctggaagaaccgttgaaagaatgtataaaacatattgcacggctaagccagaagcaaacccctttactgcttagtgaagaaaaaaagcgatacctgtggttttatcgtttttactgcaataacgagaactgctccctgcctctggtcctgggttcggcacctggttgggacgaaagaacggtgtcagaaatgcatacaattctgcgccgctggacattctctcagcccctagaggctctggggttactgacttcgagtttccccgaccaagaaatccggaaggtggccgtgcagcagctggataacctgttgaacgatgaactgctggagtacctcccccagctcgtgcaagccgtaaaattcgaatggaatttagagagccccctcgtgcagttattactgcaccggtctttacagagcatccaggtggctcaccgcctctattggctcctgaagaacgccgagaacgaggcgtacttcaaaagctggtatcagaagctcttagccgccctccagttttgcgccggaaaggccctcaacgatgaattcagtaaggagcaaaaactgatcaaaattcttggcgatattggagaacgagtaaaaagcgcttctgaccaccagaggcaggaggtgctcaagaaggagattggtagactggaggagttctttcaagatgttaatacatgccacttaccacttaacccagctctgtgtatcaaagggatagatcacgatgcctgttcctactttacctccaatgctctgccgctgaagatcacgtttatcaatgcaaaccctatgggcaaaaatatcagtattattttcaaagcgggagatgatctgcggcaggacatgttggtcctgcaactgatacaggtcatggacaacatctggcttcaggaaggtctggacatgcagatgataatctaccggtgtttgtcgaccggcaaagaccagggtctcgtgcaaatggtacccgacgcggtgacgctcgctaaaattcaccggcactcagggctgatcggccccctaaaagaaaataccattaaaaagtggttctcccaacataaccacctgaaggctgactatgaaaaggccctccggaacttcttttactcctgtgctggctggtgcgtcgtgacttttatactaggcgtttgtgacagacataacgacaacatcatgctgacaaaatctggccacatgttccacatagattttggaaagtttctgggtcatgcccagaccttcgggggcatcaagagagacagggcgccatttatctttactagtgaaatggagtattttataactgagggggggaagaaccctcagcattttcaggatttcgtggaactctgttgccgcgcttataacattatcagaaagcactcccaactgcttctcaatctgctggagatgatgctgtacgcgggactgcccgaactgtctggtatccaggatcttaaatatgtttacaacaatctgcgaccacaggatacagaccttgaggccacttcacactttactaaaaagatcaaggagtcactggagtgcttcccggttaaactgaacaaccttattcacactctggcccagatgagcgccatctccccagccaaatcaaccagccagaccttccctcaagagagttgtttattatcaaccaccagaagcattgagagagcgaccatcctgggcttttccaaaaaaagctctaacctgtatctgatccaggtaacgcattctaacaatgagactagcttgacagaaaagagcttcgaacaattttctaagctccatagccagctccagaaacagtttgcgtctctcacacttcccgagttcccgcactggtggcacctgccctttacgaactccgatcacagacgcttccgggacctgaatcattatatggagcagatcttgaatgtgagccacgaagtgactaattccgactgcgtcctttccttctttctctccgaggcagtgcagcagacagtggaggaatcctcacctgtgtatctgggagagaaattccctgacaaaaagcctaaagtccagctggtcatttcttatgaggacgtgaagctgaccatactagtgaaacatatgaaaaatatccaccttccggatggtagtgccccgtcagcccacgtggagttttacctgctcccttacccatctgaggtgagacgcaggaagaccaaatcagtccccaagtgcaccgatcctacttataatgagattgtggtgtatgatgaagtgactgaactccaggggcatgtcctgatgttgattgttaaatccaagactgtatttgtgggcgcgatcaatattcgtttatgtagtgttccacttgataaggagaaatggtatcccctagggaacagcataatctag

SEQ ID NO: 199462 - DNA, 4338 bp, synthetic construct
  misc_feature 1..4338: note = Description of Artificial Sequence: Synthetic coding sequence
  source 1..4338: mol_type = other DNA
atggcctacagctggcagaccgaccccaaccccaacgagagccacgagaagcagtacgaacaccaggagtttctatttgtgaaccagccacacagtagctcccaggtttcactcggcttcgaccagatcgttgatgagatatcaggtaagatcccacactacgagtcagaaatcgacgaaaacaccttcttcgtgcccacagcccctaaatgggacagtaccgggcatagccttaatgaggcacatcagattagccttaatgagtttaccagtaaatctagagaactgtcctggcatcaggtgagtaaagctccggctattggcttttcgccatccgtgctcccgaaacctcaaaacacaaataaagaatgtagttgggggagtcccatcggcaaacaccacggagccgatgattccaggttctcaatcctggcccctagtttcaccagcctagacaagataaatctggagaaggagctggagaacgagaaccacaattaccacattggcttcgagagctccatccctcctaccaatagttcgttcagcagtgacttcatgccaaaggaagaaaacaagagatccggtcatgtgaacattgttgaacctagcctgatgctcctaaaaggatccctacagcccggcatgtgggaatcaacatggcagaaaaacatcgagtctattggctgctcaatccaactggtggaggtgcctcagtcaagcaatacgtctctcgcaagcttttgcaacaaagtgaaaaagattagagaacgctaccacgccgcggatgtgaattttaattcaggaaagatatggtctaccacaaccgccttcccttaccaacttttttctaagaccaagtttaacattcatatttttatcgacaattctacccagccactgcactttatgccctgtgccaattacctggtcaaggacctgatcgctgagatcctccacttttgtactaacgatcagctcctgcctaaagaccacatcctgagcgtttgtgggtcagaagagtttctacaaaatgatcactgcttgggatcccataaaatgttccagaaagacaaaagcgtcatccaactccaccttcaaaaatcccgggaggcacccggaaaactgagtaggaagcatgaagaagatcatagtcagttttacctgaatcagctgcttgagtttatgcacatctggaaggtatcaaggcagtgcctcctgaccctgattcgcaagtatgacttccacctaaaatacctcctgaaaactcaggaaaatgtgtacaacattatagaagaggttaagaagatctgctcagttttgggttgtgtggagacgaagcagatcaccgatgccgtgaatgagcttagcttgattttgcagcgcaagggcgagaatttttaccaatcatcagaaactagtgccaaagggctgattgaaaaggtgactactgagctgagtacaagcatctatcagctgattaacgtgtactgcaattctttctacgctgactttcagcccgtgaatgtgcctaggtgcacttcctatctgaatccaggcttgccttctcacctcagcttcacagtctatgccgcgcacaacatccccgaaacgtgggtgcaccggattaatttccccttggaaataaagtcacttcctagggaaagcatgctcacagtcaaactctttggcattgcctgcgcaacaaataacgctaacctgctcgcctggacctgcctgccactgtttcccaaggaaaagtcaatcctcggcagcatgctatttagtatgacactccagtcagaaccccctgtcgagatgattactccaggcgtgtgggatgtgagccagccttccccagtcaccctgcagattgacttccccgcaaccgggtgggaatacatgaagcccgactctgaagaaaatcgcagtaatctggaggagcctcttaaggaatgcataaagcatattgcgcgactttcgcagaagcagacgcctttactgctgagcgaagagaaaaagcggtatctgtggttctataggttctactgcaataacgagaactgtagcctgcccctcgtgctaggttctgcccccgggtgggacgagcggacagtatcagagatgcatacaatcctccgaaggtggacattctctcagccattggaagcgcttggactgttaacaagttcgttcccagaccaggagatacgtaaagtcgctgtgcagcaactcgataaccttctgaacgacgaactgctggaatacctgccccagcttgtgcaggccgtcaagtttgagtggaatctggaatcacccctggtccagttgttgctccatcgcagtctccagagcatacaggtggcccacagactatactggctcctaaaaaacgccgaaaatgaggcatatttcaagtcttggtatcagaaattactggccgcattgcagttctgtgcggggaaagctctgaatgatgagttttcaaaggagcaaaaactcattaagatcctaggggacatcggggagcgcgtgaagagtgcctccgaccaccaacgccaggaggtactgaagaaagagatcgggcgactggaggaattcttccaggacgtcaatacttgccacctgcctctcaatccggcattgtgtattaagggcattgatcatgacgcatgctcttatttcacatccaacgcactccccctcaaaatcactttcatcaatgctaatccaatggggaaaaacatatccataattttcaaggcaggggacgatctgaggcaggacatgctggtactgcaactcatacaggttatggataatatctggctacaagaagggctggatatgcagatgatcatttaccggtgcctttccactggaaaggaccagggcctcgtgcagatggtccctgatgctgtcacacttgcaaaaatccacaggcactctggcctcatcgggcccctcaaagaaaacactattaaaaagtggttctcccaacacaaccatcttaaagcagactacgaaaaggcactgcgaaacttcttttactcctgtgccgggtggtgcgtagttacgtttatccttggcgtctgtgatagacacaatgataacattatgctgaccaagagtggacatatgtttcacatcgattttggcaagttccttggacatgcccagacgttcggtggaataaaacgagatcgggcgcctttcatcttcacctctgaaatggagtatttcataactgagggtggaaagaatcctcagcacttccaagattttgtcgagctgtgctgcagagcctataacatcatcagaaaacacagtcagctgttgcttaacctcttggaaatgatgctgtacgccggcttaccggaactaagcggaatccaggatttaaagtatgtttacaataaccttagacctcaggacactgatctggaggccactagccatttcacaaaaaaaattaaagagtctctcgagtgcttccctgtgaagttgaacaatctaatacacacactcgctcagatgtctgcaattagtcccgcgaagagtacttcacaaaccttccctcaggaaagctgcttactgtccaccacccggtctatcgagagagcaactattctgggattcagtaaaaagtcatctaatttatacctcatccaggtgactcatagcaacaatgagacaagcctgactgaaaaaagcttcgaacagttttcaaaactacattctcagttgcagaagcagttcgccagtcttaccctgccagaattcccccattggtggcatctcccttttacaaactctgaccaccggcgattccgagacctgaatcactatatggaacagattcttaatgtaagtcatgaagtaaccaatagcgactgcgttctgtccttttttctgtctgaggctgtgcagcagacagtagaggagtccagcccagtttatctcggagaaaagtttcctgataagaagcccaaggtccagttggtgatcagctatgaggacgtgaagctgaccattctcgtgaagcacatgaagaacatccatctgccggatggaagcgcaccaagcgcccacgtcgagttctacctgttaccctacccatctgaagtgcgccgccggaagactaagagcgttcccaaatgtacggaccctacatacaacgaaatcgtggtgtacgacgaggtgacggagctgcaagggcacgtgttaatgttaattgtgaagtcaaaaaccgtctttgtcggcgcaattaatatccgcctgtgctccgtgcccctcgacaaagaaaaatggtaccccctaggcaactcaattatttag

SEQ ID NO: 199463 - DNA, 4461 bp, synthetic construct
  misc_feature 1..4461: note = Description of Artificial Sequence: Synthetic coding sequence
  source 1..4461: mol_type = other DNA
atggcctacagctggcagaccgaccccaaccccaacgagagccacgagaagcagtatgagcatcaagagttcctgtttgtgaaccagccccattcatctagtcaggtttcccttggctttgaccagatcgtggatgaaatttccgggaagataccacactatgagtctgaaatcgatgagaataccttcttcgtcccgacagcacccaaatgggatagtactgggcatagcctgaacgaggcccaccaaatctccctcaacgaatttaccagtaagtcccgggaactatcttggcatcaggtgtcaaaagcacctgctattggtttttctcctagtgtcctgcctaaaccccagaatacgaacaaggagtgttcttgggggagcccaatcggaaagcatcacggggccgacgatagtcggttctcaatcttagcaccttcatttacttctcttgataaaatcaacctagaaaaagagttagagaatgaaaaccacaattaccatataggcttcgaaagttcaataccgcccaccaactcttccttcagtagcgacttcatgcccaaggaagagaacaaaagatctggacatgtcaatatcgtggagcctagtctgatgctgttaaaagggtcactgcagccaggcatgtgggagtcaacctggcagaagaatattgaaagcatagggtgttctatccagctggtcgaggttcctcaaagttcaaatacctcactcgctagcttctgtaacaaggtcaaaaagatacgggagaggtaccacgccgcagatgtcaacttcaattccggcaaaatttggtctactacgacagcgtttccctaccaacttttctctaagacaaaattcaacattcatattttcattgacaatagcacccagcctttacacttcatgccctgcgctaactacctggtaaaggaccttatagccgagattctgcatttctgtactaacgaccagctcctcccaaaggaccacattctctctgtgtgtggatctgaggagttcctgcagaacgaccactgcctggggtcacataaaatgttccaaaaagacaagagcgtaatccaactccatctacaaaagagcagagaggcgccaggcaagctctccaggaaacatgaggaggaccactcacagttttatcttaaccagttgttagagttcatgcacatttggaaagtgtcacgccaatgtcttcttaccctgatcaggaaatatgacttccatcttaaatatctgctcaagacacaggagaacgtgtataatatcattgaggaagtgaaaaagatctgctccgttttgggatgcgttgagactaagcaaataacagatgccgtgaatgagctgagtctgatcctccaaaggaaaggcgaaaacttctatcagtcctcggagacctccgcaaagggcctgatagagaaggtcacaaccgaactgtctacctctatctaccagctgattaacgtgtactgtaactccttttacgccgattttcagcctgtcaatgtgccaaggtgtacatcatacttgaacccgggcttaccatcacatttgtccttcactgtctatgctgcccacaacatcccagagacctgggtgcattcttacaaggcattcagcttcacatgttggctcacctatgctggtaagaaactttgccaggtacgaaactaccggaatataccggataagaagttgttctttttcttggtgaattggaacgaaaccattaacttccccctagaaatcaagtctttacccagagagagcatgttgacagttaagctttttgggatcgcttgcgcgacgaacaatgcgaatctattggcctggacttgtctacctctgtttccgaaggaaaagtctattctgggtagtatgctgtttagtatgaccttacagtccgagcctccagtcgaaatgattacgccaggcgtatgggatgtttcacaaccaagcccagtgaccctgcagatcgactttcctgcaactgggtgggagtatatgaagcccgactccgaagagaatcggtcaaatctcgaggagcccctcaaggagtgtatcaaacacatagctagactatcacagaaacagactcctctgctgctcagcgaggagaaaaagagatacctgtggttttacaggttttactgtaacaatgagaattgttcgcttcctctggttcttgggtctgcacccggctgggacgagagaactgtaagcgagatgcacaccatcctgcggcgctggacatttagtcagccacttgaagcgctcggactgcttacaagttcctttcccgatcaggagatcagaaaggtcgctgttcaacagctcgacaatttactgaatgatgagttgctcgagtatctgcctcagctggttcaagcagtcaagttcgaatggaatcttgaatccccgctggtccagctgctcctgcatagatctctgcaatccattcaagtagcacaccgactctattggctgctcaagaacgccgaaaacgaagcttattttaaaagctggtaccagaagcttctggcagccctgcaattttgcgccggtaaagctctgaacgacgagttttccaaagaacagaaattgatcaaaatcttgggggacataggcgaacgcgtaaaatcggcctcggatcaccaaaggcaggaggtgctgaaaaaagaaattggacgcctcgaggagttttttcaggatgtgaacacttgtcatttacctctgaatcccgcgttgtgtataaaaggtatcgatcatgacgcatgctcctacttcacatctaatgccttacccctgaagataaccttcatcaatgctaatcctatgggcaaaaatatatctattatcttcaaggcaggcgacgatctcaggcaagacatgctggtgttgcaactcatccaggtgatggacaatatttggctacaagaaggcttggatatgcaaatgatcatttaccggtgcctgtctacagggaaagatcaggggctggttcagatggtccccgatgctgtgaccctcgcaaagattcacaggcactctgggctgattggtcctttgaaggagaacacaattaaaaagtggttcagtcagcacaaccatctaaaggctgattacgagaaagcacttagaaatttcttttactcttgcgccgggtggtgtgtggtgacatttatactgggcgtctgcgatcgccataatgataatataatgcttacaaagagtggtcacatgttccatatcgattttggtaaattcctcgggcacgctcagacatttggaggcatcaagcgtgacagagctccctttatttttacaagcgagatggagtacttcatcactgagggaggaaaaaatcctcaacactttcaggatttcgttgagctatgctgtcgcgcttataatattatccggaagcacagccagctgctattaaatctactggaaatgatgctgtacgcgggacttccagaactttctggcatccaagatctgaaatacgtttataataacctgaggcctcaggacacggacctggaggcaacaagccacttcactaagaagattaaagagagtttagagtgttttcctgtgaagctgaataatttgattcatacactcgctcagatgagtgccattagtcccgctaagagtacaagtcagacattcccccaggaatcttgcttgctaagtacaaccaggtctattgaaagagccacaatattgggatttagcaaaaaaagcagcaatctttacctgatccaggttacccatagcaataacgagactagcctgacagagaagagttttgagcagttttctaaactgcattctcagcttcaaaagcagttcgcgagtctgactctgcctgagtttcctcattggtggcatctgcccttcacaaactcagatcatagaagatttagagatttaaaccactatatggaacagatactcaacgtatcccacgaggttaccaactccgattgtgtgctttcctttttcttgtcggaggccgttcagcagacagtggaagagtcctcccctgtgtatttaggcgaaaagtttccagacaagaaacctaaggttcagctggtgatctcttacgaagatgtcaagctgaccatccttgtgaaacacatgaaaaacattcatttgcccgacgggtctgccccctcagcccacgtggaattttacctgctcccgtacccctcagaagtgagaagaagaaaaacaaaaagtgtgcccaaatgtacagacccgacatataacgaaattgtggtgtacgacgaggtcactgagctgcaggggcacgtcctgatgctgatcgtgaagtcaaagacagtgtttgtgggtgctatcaacattaggctgtgctccgttcccctggataaagagaagtggtatcccctcggtaacagcatcatatag

SEQ ID NO: 199464 - DNA, 414 bp, synthetic construct
  misc_feature 1..414: note = Description of Artificial Sequence: Synthetic coding sequence
  source 1..414: mol_type = other DNA
atgaccatggagaccctgcccaaggtgctggaggtggacgagaagagcccagaagccaaggatctcttgcccagccagacggcctcttccctgtgtattagctcccgcagcgagtcagtctggacaacaaccccaagatccaactgggagatctatcgcaagccaatcgtgattatgagtgtcgggggagccatcttactgtttggggtggttattacatgtctggcatatacactcaagcttagtgacaagtctctaagtatactgaagatggttgggcctggctttctgtcccttggactgatgatgcttgtctgcggtctcgtgtgggtgcccataatcaagaagaagcagaagcatcggcagaagtcaaactttctacggagtctgaagtctttttttcttacacggtag

SEQ ID NO: 199465 - DNA, 414 bp, synthetic construct
  misc_feature 1..414: note = Description of Artificial Sequence: Synthetic coding sequence
  source 1..414: mol_type = other DNA
atgaccatggagaccctgcccaaggtgctggaggtggacgagaagtcacctgaagcgaaggaccttcttccctcccaaacagcctcctctctgtgcatcagctctcgttcagaatctgtgtggactacaaccccgcgttccaactgggagatctaccgaaagccgatcgtgattatgagtgtgggcggcgcaattctgctgttcggcgtcgtcatcacatgcctcgcctacactctcaagctatcagacaaatcgctgagtatccttaagatggtcgggcctggattcctgagcctggggttgatgatgctggtttgcggactcgtatgggttccgattataaagaaaaaacagaagcaccgccagaagtccaacttcctgcgttcactcaaatccttcttcttaacccgctag

SEQ ID NO: 199466 - DNA, 159 bp, synthetic construct
  misc_feature 1..159: note = Description of Artificial Sequence: Synthetic coding sequence
  source 1..159: mol_type = other DNA
atggagaaggtgcagtacctgacccggagcgccatccggcgggccagtactattgagatgccacaacaggctcgccaaaagctacaaaacctcttcatcaacttttgtctgatactcatatgcctcttgctgatttgcattatcgtcatgctgctctag

SEQ ID NO: 199467 - DNA, 1371 bp, synthetic construct
  misc_feature 1..1371: note = Description of Artificial Sequence: Synthetic coding sequence
  source 1..1371: mol_type = other DNA
atgccccccggcccctgggagagctgcttctgggtgggcggcctgatcttatggctgtccgtggggagttcaggagacgctccacctactcctcaaccaaagtgcgcagatttccaaagtgctaacttgttcgaaggaacagacctgaaagtccagttccttctgttcgtgccttctaatccatcgtgcggtcagctcgtagagggcagttcagacttgcagaacagcggcttcaatgctaccttggggacaaaactaataattcatggctttcgagtgctggggaccaagccttcttggattgacacatttatcaggactctgctgagagcaacaaacgccaacgtcattgccgttgattggatctatggttccacgggcgtctatttttctgccgtaaagaatgttattaaactttctctggaaataagcctcttcctgaataagcttctcgttctcggggtgtcagagtccagcatccacataattggcgtgtcactgggggctcacgtgggagggatggtgggccagttgttcggcggccagctgggacagattaccgggcttgaccccgcggggccagagtacacaagggcctctgtggaggagcggcttgacgcgggggacgctcttttcgtcgaggcaatccataccgatacagataacttggggatacggatccctgtcggccacgtcgattatttcgtgaatggcggtcaggatcaacccggttgcccgactttcttttacgcaggttattcatacctcatctgtgatcacatgcgcgcagtccacttgtacatttcagctctggagaacagctgtcctctaatggctttcccttgtgcatcgtacaaagcctttcttgccgggcgctgtcttgattgctttaaccctttcctgctgtcgtgtcctcggataggactggtggagcaggggggagtgaagattgaaccactaccaaaagaggtgaaggtgtacttgctcactacatcttctgcgccatactgtatgcaccattcattggtcgagtttcacctgaaagagctgcggaataaagatacgaacatagaggtaacctttctctccagcaatatcacgtcttcctctaagataactatcccaaaacagcagcggtatggcaagggaatcatcgcccacgcaactccccagtgccagatcaaccaggtgaagttcaagttccaatcctccaatcgggtgtggaaaaaggaccgtaccacgatcattgggaagttctgtaccgcccttttgcccgtgaatgatcgggagaagatggtctgcctgccagagccagtgaatctccaggccagcgtcaccgtcagctgcgatctaaagattgcctgcgtgtag

SEQ ID NO: 199468 - DNA, 1323 bp, synthetic construct
  misc_feature 1..1323: note = Description of Artificial Sequence: Synthetic coding sequence
  source 1..1323: mol_type = other DNA
atgccccccggcccctgggagagctgcttctgggtgggcggcctgattttatggctcagcgtgggttccagcggagacgccccacccacgccgcagccaaagtgcgccgattttcagtccgccaatttgtttgaaggaacagatctcaaggtgcagtttttgctgtttgtgccaagcaacccttcttgtggacaactcgtggagggctcaagtgacctacagaattccggcttcaacgctaccttaggtactaaactcataattcatgggtttcgggtgttgggtaccaagccttcttggatcgataccttcattaggaccctgctgcgcgccactaacgctaatgtgattgccgtggattggatttatgggagtacgggtgtgtacttctctgcagttaaaaatgtgcttggggtctcagagtcatccatccatatcattggcgtttccctgggagcgcacgtgggggggatggtgggccagttgttcggtggccagctgggacagatcaccggcctggaccctgcaggccctgagtatacccgagcgtctgttgaagagaggttggatgcaggcgatgcactgtttgttgaggccatccataccgatacagataatctcggcatcagaataccagtcggccacgtagactactttgtcaacggaggacaagaccaacctggctgtccaactttcttctacgccggctactcctatctgatttgtgaccacatgagagcagtgcacttgtatatcagtgccctggaaaattcctgcccactaatggcttttccatgtgcaagttacaaagcatttttggccggccgttgtctggattgttttaatccctttttactgtcgtgcccaagaatcgggctggtggaacagggaggcgtcaaaatcgaacccttgcccaaggaggtaaaggtgtatttactgacaacatcatccgctccttactgcatgcaccacagtctggttgagtttcacctcaaggaactgcgaaacaaggataccaatattgaagtgacgtttctgtccagtaatatcactagctccagcaaaattacaatccctaaacaacagcgatacgggaaaggcatcattgcacatgctaccccccagtgccagataaaccaggtgaagttcaagttccaaagttccaaccgggtatggaaaaaagaccggaccacgattatcggcaagttctgcaccgcattactccccgtgaatgacagggaaaaaatggtctgcctgcctgaacccgtgaatttacaggcctctgtgaccgtgagttgcgatttaaaaatcgcatgcgtatag

SEQ ID NO: 199469 - DNA, 852 bp, synthetic construct
  misc_feature 1..852: note = Description of Artificial Sequence: Synthetic coding sequence
  source 1..852: mol_type = other DNA
atggtgggccagctgttcggcggccagctgggccagatcaccggcctggacccagccgggcccgaatacaccagagcatcagttgaggagcgactagacgcaggcgatgcgctgttcgtggaagcgatccataccgatacagacaacctagggattcgtattcctgttggccacgtagattattttgttaacggggggcaggaccagccaggctgtccgaccttcttctatgctggctacagctacctgatctgcgaccacatgcgcgcagtacatttatacatttccgccttagagaactcgtgccccctgatggcctttccttgtgcttcctacaaagccttcctggccgggcggtgcctggactgttttaatccattcttgctctcttgtccgcggatcggcttagtggaacagggtggcgtgaagattgagcctctcccgaaggaagtcaaggtatacttgctgacgacgtcctcagctccatattgtatgcaccactccttagtcgaatttcatctgaaagagctgagaaataaggacacaaacatagaggttacattcctctcctctaatatcacaagttcctccaaaatcacgatcccaaagcagcagcgctatggcaagggaatcatcgcccatgccactccacagtgccaaatcaatcaggttaaatttaaattccaatcatctaatagggtatggaaaaaggaccgaacaactattatcggcaaattttgtacggccttactacctgtaaacgacagggaaaagatggtctgtctcccagagcccgtcaatctacaagcaagcgtgactgtatcatgcgacctcaaaatagcctgcgtctag

SEQ ID NO: 199470 - DNA, 1656 bp, synthetic construct
  misc_feature 1..1656: note = Description of Artificial Sequence: Synthetic coding sequence
  source 1..1656: mol_type = other DNA
atgcggacccggccccggccccggctgcggcggaccgagaacttcctgactgctgtgcatcacgggaagaaggaggagaaggccgcagtggagcggcggcgtctccacgtccttaaagccctcaagaagctgcggatcgaagcagacgaagcgcccgtcgtggcagtgctcggatcaggcggtgggttgagagctcacattgcttgcctgggagtgctgtcagaaatgaaggagcagggccttctcgacgctgttacctatctagctggggtttctgggagtacatgggccatctcaagcctgtacacaaacgatggtgacatggaagcgctggaggccgacttgaagcatcgcttcacgagacaggagtgggacctggccaagtctttgcagaagaccatccaggcagctcggagcgaaaactatagcctgacggacttttgggcttatatggtgattagcaagcagacccgggagctcccagagagccatctctcaaacatgaaaaagccagtggaagagggcactcttccgtaccccatttttgcggcaatagataacgatctccaaccttcctggcaagaagcgcgcgctcccgagacttggttcgagtttactccacatcatgcgggcttttccgccctaggagcattcgtgtctataacacactttgggagcaaatttaaaaaaggcagactagtgcgcacgcatccagaacgtgatttgacatttctgcgcggcctctggggtagtgccctgggtaacactgaggttattagggaatatattttcgatcagttgcgcaatctaacgctgaaaggtctatggaggcgcgctgtcgccaacgcaaagagcatcggccaccttatttttgctcgtcttctccggctgcaggaaagctcccagggagaacatccacccccagaggatgaggggggggaacctgagcacacatggctgaccgagatgctggagaactggactcgcaccagccttgagaagcaggagcagcctcatgaggaccccgagaggaaaggatccctgtcaaacttgatggatttcgtcaaaaaaaccggaatctgcgcttctaagtgggagtggggtaccacccataatttcttatacaagcacggtggtatacgagataagattatgtctagcaggaagcaccttcatctcgtagatgctggactcgcaatcaacaccccgtttccgctagtattgccaccaacaagggaagtacatctgattctgagcttcgacttttccgcaggagatcccttcgagaccatcagagcaaccaccgactattgtcgccggcataaaatcccttttccccaggtggaagaagcagaacttgacctgtggtcaaaggctccggccagttgttacattctaaaaggcgaaacgggaccagtggttatgcatttccctctcttcaatatcgacgcttgtggaggagatattgaagcttggtctgacacctatgacactttcaagttagccgacacatacacactggacgtggtggtgctcctgctcgcacttgccaagaaaaacgtcagggaaaataaaaaaaagatcctgcgagagttgatgaacgtcgctggactgtactaccccaaggactccgcccggtcatgttgcctggcatag

SEQ ID NO: 199471 - DNA, 4392 bp, synthetic construct
  misc_feature 1..4392: note = Description of Artificial Sequence: Synthetic coding sequence
  source 1..4392: mol_type = other DNA
atgctgctgagccccagcctgctgctgctgctgctgctgggcgcccccagaggatgcgcagagggagtggcggccgctttaacacctgaaaggctgttagagtggcaggacaaagggatcttcgtgatacagagtgaatcactgaagaagtgcattcaggcggggaaaagcgtattgactttggaaaactgtaagcaagccaataaacacatgctgtggaaatgggtgagtaaccatggattgttcaacattggaggttctggctgcctcggactgaatttttctgcccctgaacagccgctgtcactgtacgagtgtgatagcactctggtgtccctgagatggcggtgtaataggaagatgatcaccggacccctgcagtatagtgttcaggtggcccacgacaataccgtggtcgcaagccgaaagtatattcataagtggatttcatacggctcaggcggaggcgacatttgcgaatacctgcataaggatctgcataccatcaaggggaatacacacggaatgccttgcatgttcccatttcagtataatcatcagtggcaccacgagtgcacaagagagggtcgtgaagacgacctcctttggtgtgcgacgaccagtaggtatgaaagagacgagaagtgggggttctgtcccgatcccacctcagccgaggtaggatgcgacacaatctgggaaaaagacttgaactcccacatctgttaccagtttaacttactctcatcactttcttggtctgaagcccacagtagctgtcagatgcaaggcgggaccctgctcagcatcacagatgaaactgaagagaacttcatccgagagcatatgagcagcaaaaccgttgaagtatggatgggtctaaaccagttggatgaacatgccggctggcagtggtcggacggtacaccgctgaactatctgaactggtcacctgaagtgaactttgagccattcgtcgaggaccactgtgggaccttctccagctttatgccctcagcgtggcgaagccgtgattgcgaatccactctcccatatatatgtaaaaagtatttaaatcatattgaccacgaaatcgtagagaaagatgcctggaagtactacgctacgcattgcgagccaggctggaatccttacaacaggaactgttacaagctgcaaaaggaagaaaaaacctggcacgaagctctgcggtcgtgccaggctgacaactctgcccttattgatatcactagccttgccgaggtcgagttcctggtcacactgcttggagatgagaatgcttcagaaacctggattggactgtcatctaataaaattcctgtaagcttcgagtggtctaacgatagttcagttatcttcaccaactggcataccctggagccacatatattccctaatcgcagccaactgtgcgtcagtgctgagcagagcgagggacattggaaagtgaagaactgtgaagagagattgttttacatttgtaaaaaagcgggtcacgttctctcagacgctgagtcagggtgtcaggaagggtgggaacggcacgggggcttttgttacaagatcgacacagtgctcagatctttcgatcaagcatccagcggatattattgtcctccggctctggtaacgataacgaatagattcgagcaagcgtttattaccagcctgatctcgtccgttgtgaaaatgaaggactcctacttctggatcgcactacaagatcagaacgacaccggggagtatacatggaaaccagtcggacagaagcccgagccagtccagtacacccattggaatactcatcagccgagatatagtggaggctgtgtggcaatgcggggaagacatcctttgggccgatgggaggtcaagcactgccggcactttaaggccatgagcctgtgtaaacagccagtggagaaccaagagaaagccgagtacgaggaaagatggccttttcacccctgttacttggactgggaatctgagcctggcctggcctcctgttttaaggtcttccactccgaaaaggtgctgatgaaacggacttggcgggaagccgaagcgttctgcgaggaattcggtgcccatctcgccagctttgcacatattgaagaggaaaacttcgttaatgagttactccacagtaagttcaattggacagaggaacgacaattctggatcggattcaacaaacgtaacccgctaaatgccggatcctgggagtggagtgaccgaacacccgtcgtcagttccttcctggataacacctatttcggtgaggacgcccgcaattgtgccgtatataaagcaaacaagacactgctgcccctacactgtggctctaagagggagtggatctgcaaaataccccgggacgtgaaaccaaagattccattctggtatcagtatgatgtaccctggctgttttatcaggatgcggaatatttgtttcacaccttcgcctctgagtggctcaactttgaattcgtttgctcttggctccacagtgacctcctaacaatccacagtgcccacgagcaggaatttatccattcaaaaataaaggcccttagtaaatacggggcctcctggtggatcggactacaggaagagagagccaacgacgaattccgctggcgcgatggtacaccagtgatttatcaaaattgggacactggacgggagcgaacagtgaataaccagagtcaaagatgtggcttcataagctcgatcacagggctgtggggctcagaggaatgctccgtgagcatgcctagcatctgcaaacggaagaaagtatggctgatcgagaagaagaaggacaccccaaagcagcacggaacttgccccaagggatggctatacttcaattataaatgccttcttcttaacattccaaaagaccccagttcctggaaaaattggactcatgctcagcacttctgcgctgaggagggcggtacattagttgccatcgagtccgaagtggagcaggccttcattactatgaatctcttcggacagaccacaagcgtttggattgggctgcaaaacgatgactacgaaacttggttgaatggtaagcctgtggtgtattcgaactggtctccattcgatataatcaacatccctagtcacaatacaactgaggtgcagaaacacatcccactgtgcgctcttctgagcagtaatcctaactttcatttcaccggaaaatggtatttcgaggactgcgggaaagaaggctatggattcgtttgcgagaagatgcaggacacgtcaggccacggggttaacacctctgacatgtatcccatgcccaacaccctggagtacgggaatcgcacttataagataatcaacgcgaacatgacttggtatgcggccattaagacttgtcttatgcacaaagcccagttggttagcattacagatcaataccaccaaagcttccttacagtggtgctgaaccggctgggatatgctcactggatcggcctgtttacaaccgacaacggccttaattttgactggtcggacggaaccaagagctcttttaccttctggaaggacgaagagtcctcactgctgggagattgcgtttttgccgattccaacggccgttggcactctacagcctgcgagtctttcctacagggggcaatttgccacgtgcccccagaaacccggcagtcagaacaccctgagctgtgcagtgagacgtccatcccatggattaagttcaaatctaattgctactctttctcaacagtgctggattcaatgtcctttgaagctgcccacgaattctgtaagaaagaggggagcaatctgcttaccattaaggatgaggccgagaatgccttcctcttagaagagttgtttgcctttggtagttccgttcaaatggtttggctgaacgcccaattcgacggcaacaatgaaaccattaagtggtttgatggtaccccaaccgatcaatcaaactggggcatccggaaaccagacaccgattacttcaagccccaccattgcgtggcgctgcgcatacccgagggactctggcagctctctccctgccaagagaagaaaggctttatctgtaaaatggaagccgacattcataccgctgaagcgttacctgagaaaggccctagccattccattatccccctcgccgtagtcctcaccttgatagtcatagtcgctatttgtactttaagcttttgtatttacaaacataacggtgggtttttcagaaggctcgcagggtttaggaacccatactatcccgcaactaacttctcgaccgtgtaccttgaagagaacattctaatcagtgatcttgagaaatccgaccagtag

SEQ ID NO: 199472 - DNA, 3975 bp, synthetic construct
  misc_feature 1..3975: note = Description of Artificial Sequence: Synthetic coding sequence
  source 1..3975: mol_type = other DNA
atgctgctgagccccagcctgctgctgctgctgctgctgggcgcccccaggggctgcgccgagggagtcgccgctgccctgaccccggaacgactgctagagtggcaggataagggcatctttgttattcagtctgaaagcctaaaaaaatgtattcaggccgggaaatccgtgcttacactcgaaaattgcaagcaagccaacaaacatatgctctggaaatgggtaagcaaccatggtctgttcaatattggagggtctggctgtttaggcctcaacttttcggctcctgaacagccgctgagcctctacgaatgtgacagcaccctggtgtctctgaggtggcgctgtaataggaaaatgattactggaccactgcagtattccgtgcaggtcgcccatgacaacacagttgtcgcaagccggaagtacatccataaatggatttcctacggaagcggcggaggcgacatatgtgaatatctgcataaagaccttcacactattaagggaaatacacacggcatgccttgtatgttcccattccaatacaatcaccagtggcaccacgagtgcacacgggaggggcgtgaggacgatctcttatggtgcgccacaacctcgcggtatgaacgtgatgaaaaatgggggttttgtcctgatcccacctcggcggaagtgggatgtgacaccatctgggagaaagatctaaacagccacatatgctaccagtttaatctcctgagctcactcagctggagcgaagcccacagcagttgtcaaatgcagggaggtaccctcttgtcaattaccgacgaaaccgaagagaactttatccgcgagcacatgagttcaaagactgtggaagtgtggatgggcctcaaccaactggacgagcatgccggttggcagtggtcagacggaacgcctctgaattatttaaactggtctccggaagttaatttcgagccgttcgtggaagaccattgcgggacctttagtagcttcatgccctcggcctggagatcaagagactgtgagagtaccctgccctacatttgtaagaaatacctgaaccacattgaccacgagatcgtagagaaagacgcttggaagtattacgctactcattgtgagcctggatggaatccatataatcgcaattgctacaaactgcagaaggaagaaaagacgtggcacgaggcactaaggtcatgccaggcagataactccgctctgatcgacataaccagcctggctgaggtggagtttcttgttactctgttgggcgatgagaatgcttcagagacttggattggcctatcatccaataaaatacccgtgtcgtttgagtggtccaatgattccagtgtgatctttacaaattggcatactctggaaccccatatcttccccaatcggagccaactatgtgtgtctgccgaacaatcggaaggccactggaaggtaaaaaattgcgaggagaggctgttttatatctgtaagaaggcagggcacgtactgtcagatgccgagtctggatgtcaggaaggatgggagcggcatggcggattctgctacaaaattgacaccgtcctgaggtcctttgatcaagcgtcctctggatactattgcccgcctgctctggtcacaattaccaaccgattcgagcaggcctttatcaccagccttatcagcagcgtcgtcaagatgaaagactcatacttttggatcgccctccaagatcaaaatgacacaggagagtacacttggaagcccgtgggccagaaacccgaacccgtgcagtatacacactggaacactcatcagcctcgatatagcggaggctgtgtcgctatgcgcggccgacaccctctcgggcgctgggaggtcaagcactgtcggcactttaaggccatgtctctgtgtaagcagcccgtggaaaaccaggagaaagcagaatacgaagaaagatggccctttcacccatgctacctagactgggagtctgaacctggcctggcatcttgcttcaaggtttttcatagtgagaaggtgctaatgaaacggacttggagggaagcggaagccttttgcgaagaattcggagcacaccttgcttcatttgcgcacatcgaggaggaaaatttcgtgaacgagcttttgcattcaaagttcaattggacagaagagaggcagttttggattggctttaataaacgcaatccccttaacgctggaagctgggaatggtccgacaggactcctgttgtctcatcctttctggacaatacttattttggtgaagacgcaagaaattgtgccgtgtacaaggccaacaagacattgctgcccttgcactgtggtagcaaacgcgagtggatatgcaagattccccgcgacgtgaaacccaagatccccttttggtaccagtacgatgtcccttggctgttctaccaagatgcggaatacctctttcatactttcgccagcgaatggttaaattttgagttcgtgtgctcgtggctgcactccgatctgcttacaatccacagcgcacatgagcaagaattcattcacagcaaaatcaaagccctttccaaatatggggcaagttggtggatcggcctgcaggaagaaagagccaatgacgagtttcgctggcgcgatggcacacctgtgatctatcagaactgggacaccggccgggaacggacggttaataatcagtcacagcggtgtggcttcatatcgagtatcactgggctgtggggtagcgaggagtgttcggtctccatgccatctatttgtaagcggaagaaggtgtggttgattgagaagaagaaggacacgcctaagcagcacgggacctgtcctaaaggatggctttactttaattacaagtgtcttcttttaaatatccccaaagacccctcttcctggaagaactggactcatgcccagcatttttgcgccgaagaggggggcacactggtggccattgagagtgaagtcgagcaggcctttataacaatgaacctgttcggccagaccacctctgtttggatcggcctccagaatgacgactatgaaacctggctaaacgggaaaccggtcgtctactcaaattggagccctttcgatatcattaatattccatcccacaataccacagaggtccaaaaacacatacctttatgcgccctgctgagttccaaccccaattttcactttactggcaaatggtacttcgaagattgtgggaaagagggatacggctttgtgtgcgaaaaaatgcaagacacgagcggccacggcgtcaatacatccgatatgtatcctatgccaaataccttggagtacggcaatcgaacctacaagattatcaatgctaatatgacatggtatgcggcaatcaagacttgcctgatgcataaggctcaacttgtctccattaccgaccaataccatcaaagcttcctgacagttgtgctcaatagactcgggtacgcccactggatcggactttttacaacggacaacggtctgaacttcgattggtccgatggcaccaagagctccttcaccttttggaaggacgaagagagcagtcttctgggggattgtgtgttcgctgacagtaacggccgatggcatagcaccgcctgtgaatcctttctccagggagctatttgtcacgtccccccggagactcgccagtccgaacatcctgagctttgctcagaaacaagcattccttggatcaaattcaagtccaattgctacagtttctcaaccgtactcgattccatgtccttcgaagctgcgcatgagttttgcaaaaaagagggctcaaacctgctgacaatcaaagatgaggccgaaaacgccttcttgcttgaagagttatttgctttcggatcctccgtgcaaatggtgtggctgaacgcccaatttgatggaaatagtaaatag

SEQ ID NO: 199473 - DNA, 1584 bp, synthetic construct
  misc_feature 1..1584: note = Description of Artificial Sequence: Synthetic coding sequence
  source 1..1584: mol_type = other DNA
atgggcagcagcgaggtgagcatcatccccggcctgcagaaggaggaaaaagctgccgttgagcgacgtcggctacatgtgttaaaggctctgaaaaaactgaggattgaagccgatgaagcaccagttgtcgctgttttgggttcaggtggagggctgagagcacatattgcctgtctgggcgttctttccgagatgaaggaacagggcctgctagatgcggtcacatacctcgctggcgtgagtggctcaacatgggcaattagcagcttgtatacaaacgacggtgacatggaagcgcttgaggctgatctgaaacacagattcacaagacaggagtgggacctggcaaagtctctccagaaaaccatccaagccgcaagatctgagaactactcgctgaccgatttttgggcatatatggtcatatctaaacagaccagggagctgcccgagtcccatctctcaaacatgaaaaagcccgtcgaggagggcacactcccctacccgatttttgcagcaattgataacgatttacaaccatcttggcaggaggcccgcgcccccgagacttggtttgagtttaccccacaccacgcagggttttccgccctgggagccttcgtatccataacccactttgggtccaaatttaaaaaaggaaggctcgttagaactcacccagagcgggatttgacattcctgagagggctttggggctctgcacttgggaatacagaggtaattagggagtacatcttcgatcagctgagaaatctgactcttaaggggctttggcgaagggcagtcgccaatgctaagtccattgggcacctgatctttgcccgtcttctgcgtctgcaggagagctcgcagggtgagcaccccccacctgaggacgagggcggcgaacccgagcacacctggctgacagagatgctggagaactggacccggacatctctggagaagcaggagcagccgcatgaggacccggagagaaaaggaagtctgtccaatctgatggactttgtcaaaaaaaccggaatttgcgcaagcaagtgggaatggggcacaactcataatttcctttataagcatggaggaatccgtgataaaatcatgtcatcccgcaagcaccttcacttagtggatgccgggcttgctatcaacaccccctttccactagtgcttcctcctacacgtgaggttcatcttattctcagtttcgacttctctgcaggggacccgtttgagactattagagctaccacggactactgtaggaggcacaaaatccctttccctcaggtagaggaagctgaactagacttgtggagcaaggcccccgcaagctgttacatcctcaagggcgagaccggccccgtcgtcatgcattttcctctttttaacatcgatgcctgtggtggggacatcgaggcttggagcgatacttacgatacatttaagctcgcagacacctatacactcgatgtcgtcgtcttgctgctggcgcttgccaagaaaaacgtacgcgagaataaaaagaaaattcttcgcgagcttatgaacgtggccggatag

SEQ ID NO: 199474 - DNA, 1626 bp, synthetic construct
  misc_feature 1..1626: note = Description of Artificial Sequence: Synthetic coding sequence
  source 1..1626: mol_type = other DNA
atgggcagcagcgaggtgagcatcatccccggcctgcagaaggaggagaaagctgcagtggaaagacgcagattgcatgtgttgaaagctctgaaaaagctgcgaatcgaggccgacgaggctcctgtggtcgcagtgctcggatccggcggcggactgagggcacatattgcctgcctgggagtgctgtcagaaatgaaggaacaggggctgctagacgctgtgacctatctggcaggcgtgtccggctccacctgggccatttcgtccctgtataccaacgatggagacatggaagccttggaggccgacttgaagcatcgattcacacgtcaagaatgggacctggccaagtccctgcagaagaccattcaggcagctcggagcgagaactatagcctcactgatttctgggcgtacatggtgatatcaaaacagacccgagagcttccagaatctcacctgagcaatatgaagaagcccgtcgaggagggcactttgccttaccccatctttgctgctatcgataatgatctgcaacctagctggcaggaggcccgggcgcctgagacctggttcgagtttacgccccaccacgcagggttctccgccctcggagctttcgtgtctataactcacttcggctcgaagttcaagaagggcaggctggttaggacacacccagaaagggatctgacattccttaggggcctttggggtagcgccttaggaaacaccgaggtcatccgcgaatatatattcgaccagctgcggaaccttaccctcaagggactctggcgccgggcggtagccaatgctaaaagcatcggccatctcatctttgcacgccttctgcggctccaggagtccagtcagggggagcatccacccccggaggacgagggcggagagcctgagcatacatggcttacagaaatgctagaaaactggacaaggacctcactcgagaagcaggagcagccacatgaggaccctgaacggaagggctcccttagcaacctgatggattttgtgaagaagaccggcatctgtgcaagcaaatgggaatgggggactacccataactttctttataaacatggagggattagagacaaaatcatgagttcacgcaagcacttgcacctggtagacgccgggctggcaatcaatacacctttccccctggtgctgccacctacccgggaggtgcacctgattttaagctttgacttctcagcaggagacccatttgagactattcgggcgacaactgattactgcagacgtcacaagatcccctttccgcaggttgaagaggcagagctggatctgtggtctaaggcaccagcttcatgctatatcctcaaaggcgagaccgggcctgtcgtcatgcatttccctctgttcaatatagatgcatgcgggggggacatcgaggcgtggtctgatacgtacgacactttcaagctggctgacacatacaccctggacgtggtcgtgcttctcctggccctcgctaaaaaaaatgtacgcgaaaataagaaaaaaattttacgagaactgatgaatgtggctggcctctattaccctaaagattcagcgcggtcatgctgccttgcatag

SEQ ID NO: 199475 - DNA, 2457 bp, synthetic construct
  misc_feature 1..2457: note = Description of Artificial Sequence: Synthetic coding sequence
  source 1..2457: mol_type = other DNA
atggagagcctgagccccggcggcccccccggccacccctaccagggcgaggccagcacttgctggcagttaacggtccgggtgctggaagctcgcaatctgcgatgggcagacctgctttcggaggccgatccgtacgtcatccttcagttgtccaccgcgcccggaatgaagttcaaaactaaaacactgactgatacatcccatccagtgtggaacgaagctttccgcttccttatccaaagtcaagtgaaaaacgtgttggagctcagtatctatgacgaggacagcgtcacagaggacgacatttgcttcaaggtcctgtatgacatctctgaggtgctgcctggaaagctcctgcggaagacctttagtcagagtccccaaggcgaggaagaactggacgttgagttccttatggaagagaccagcgaccgaccggaaaacctgataaccaataaagtgatcgtcgccagagagctctcttgcctcgatgtccatctggattccactggtagcacggccgtggtggctgatcaggacaaactggagttagaactggtgctcaagggtagctatgaggacacccagactagtttcctgggcactgcctctgccttccgtttccactacatggctgctctggagacggagctttcagggaggttgcgtagctctcgcagcaacggatggaacggcgacaatagcgccgggtaccttactgtccctttacgcccactgacaatcggaaaagaggtaactatggatgtgcctgcaccgaatgcacccggggtgcgcttacagctgaaggctgaggggtgcccagaggaattggcggtccatctggggttcaatctctgcgctgaggaacaagcattcttaagtcgtcggaaacaggtggtggccaaggccctgaagcaggcactgcaactcgaccgcgatctccaggaggatgaagtgccagtcgtgggtattatggccaccggcggcggcgcccgggccatgacctctctttatggccatttgctggctttgcagaaattggggctcttggactgtgtcacttattttagtgggattagtgggagcacctggaccatggcccatttgtacggggatcccgaatggtcccagagagacctggagggccctatcagatacgcccgtgagcacctcgcaaagtctaaactcgaggtcttctctcccgaaagactagccagctaccggcgagaactggaactgagagctgagcagggacatccaacaacatttgtggatctgtgggctcttgttttagagtctatgctgcatggccaggtgatggaccaaaagctgtctggccagcgagctgctcttgagagaggccagaatccgctaccattatatctgtccctgaacgttaaggaaaacaatctcgaaacccttgatttcaaagagtgggttgagttctccccctatgaggttggatttcttaagtacggggctttcgtacctccagaactcttcggctccgagtttttcatggggaggcttatgcggcgcatccccgaacctagaatctgcttcctggaagctatctggagcaacattttctccctgaacctcctggacgcatggtatgatctgacctccagcggtgaatcttggaaacagcatataaaggacaaaacccggagcctcgaaaaagagcctctgacaacttctggaacttcttcaaggctcgaggcctcctggctgcaaccaggcacagccttggcacaggcctttaagggctttctaacgggccgccccctccaccaacgtagccccaactttttgcaaggtctgcagcttcaccaggattactgctcccacaaagacttctcaacctgggctgactatcagctggattccatgccatctcaattgacccctaaggagccccgcctatgtctggtggatgctgcatatttcatcaacacatccagcccgtcaatgtttcgccctggtcgccggctagacctgattctgtccttcgactactctctttcagctccttttgaagcactgcagcaaaccgaactgtattgtagagcacgcggccttccattccccagagttgagccttctccacaagaccagcatcaacctcgcgagtgccacctcttctctgaccccgcttgccctgaggccccaatcctgctgcactttccactggttaacgcatctttcaaggaccatagcgctccaggtgtgcagcgtagccccgctgagttacagggcggccaggtcgacctgaccggcgctacctgcccttataccttatctaatatgacatacaaggaagaagattttgaacgtctattgaggctctcagattacaacgtccaaacgtcccagggtgccatcctgcaggcattgcgaaccgctctcaaacaccgcacattggaggcacggcctccccgtgcacagacttag

SEQ ID NO: 199476 - DNA, 1326 bp, synthetic construct
  misc_feature 1..1326: note = Description of Artificial Sequence: Synthetic coding sequence
  source 1..1326: mol_type = other DNA
atggtgccccccaagctgcacgtgctgttctgcctgtgcggctgcctggcggtcgtctatccttttgactggcagtacatcaacccagtcgcccatatgaagagcagcgcatgggtgaacaagatccaagtactcatggcggcggcatcattcggccagaccaagattcctcggggaaacggaccgtattctgttgggtgcacagatttgatgtttgatcacactaacaagggcactttcctcagactgtactacccgtcccaggataacgacagactcgatacgttgtggatccccaacaaggagtacttttggggcctctcaaaattcttgggtacgcattggctgatgggaaatatactgagattgctgttcggtagtatgacaacacccgcaaactggaattccccgcttcggccaggcgagaaatatcccctggtcgtgttttcacacggcctgggcgctttccgcactctgtacagcgccataggcatcgatctcgcctcccacggattcatagtggccgcggtagagcaccgggacaggtccgcctctgcaacctactattttaaggatcagagcgcagcagagattggcgacaaatcatggttgtacttgcggacattgaagcaggaagaggagacgcacatccggaatgaacaggtgcggcagcgggccaaagagtgttcccaagccctctctctgattttggacatcgaccatgggaagcccgtcaaaaatgccctcgacttgaagtttgatatggagcagttgaaggacagcattgaccgggaaaagatcgccgtgatcgggcattcctttggtggggccacagtcattcagactctgtcagaagaccagagattccgctgcgggatagctttggacgcgtggatgtttccactgggagacgaggtgtatagtaggatcccccagcccctcttcttcatcaattctgagtattttcagtaccccgctaatatcattaagatgaagaaatgttactcccctgacaaagaaaggaagatgatcaccatacgaggcagtgtgcaccagaactttgctgattttacctttgcaactgggaagatcataggccacatgctcaagttaaagggcgatatcgacagcaatgtggcaatcgatctcagcaacaaagccagcctagcatttttgcagaagcatttggggctccataaggacttcgaccagtgggactgcctgattgaaggcgacgacgagaatctgatcccaggaactaatatcaatacaacaaatcagcatataatgctccagaactcctccgggatcgagaaatacaactag

SEQ ID NO: 199477 - DNA, 1326 bp, synthetic construct
  misc_feature 1..1326: note = Description of Artificial Sequence: Synthetic coding sequence
  source 1..1326: mol_type = other DNA
atggtgccccccaagctgcacgtgctgttctgcctgtgcggctgcttggcagtagtttatccttttgactggcaatacatcaaccctgtagcccacatgaagtcatcagcttgggtgaacaagatccaggtgttgatggctgctgcaagcttcggccagacaaagattccgagaggaaacggcccttactccgtgggctgcacagatcttatgttcgatcacaccaacaaagggaccttcctgaggttgtactacccttcccaggacaacgacaggctcgataccctgtggatccccaacaaagagtatttctggggtctcagcaagttcttaggtacccattggctgatggggaacattctgcggctgctgttcggatcaatgacaactcccgctaactggaactcgcctctacgacccggtgagaagtacccactggtcgtattcagccatgggctgggagcgtttcgtaccctatactcagcaataggcatcgatctggcttctcatggcttcatcgtagccgcggtcgagcaccgagaccggagtgcttccgccacctattacttcaaggaccaaagcgcagccgaaattggagacaagagctggctgtaccttcggacgctcaaacaagaagaggaaactcacatccgcaatgaacaggtcagacagagggcgaaagaatgctcccaggcactgtcgcttattctggacattgaccatggaaaacccgtgaagaacgccttagatctcaagttcgatatggaacagctgaaagattccatcgacagagaaaaaattgccgtgattggccactcgtttggtggcgccacagttattcagactctgtcagaggaccaacgctttcgatgcggcattgcactggacgcctggatgtttccgctgggcgatgaggtttacagcagaatcccacagcctctgtttttcattaattccgagtatttccaataccctgccaatataatcaaaatgaagaaatgctactcacctgacaaagagcgcaagatgatcacaattcgcggttcagtgcaccagaattttgcagactttacctttgcaacgggcaaaataataggacacatgttgaagttaaaaggcgatatcgactctaatgtcgccatcgatctgtccaacaaagcctctttggcctttttgcaaaagcaccttgggcttcataaagatttcgatcaatgggattgccttattgagggtgacgacgagaacttgatccctggcacaaatattaacactacaaatcagcatatcatgctgcaaaactcatccggtatcgagaagtataactag

SEQ ID NO: 199478 - DNA, 660 bp, synthetic construct
  misc_feature 1..660: note = Description of Artificial Sequence: Synthetic coding sequence
  source 1..660: mol_type = other DNA
atggccgccgccagcttcggccagaccaagatcccccggggcaacggtccatactctgtcggttgtactgacctgatgttcgatcatactaacaaaggaaccttcctgcgactctactatccttcacaagataatgatcggctggacacactctggataccgaataaagagtacttttggggactttcgaaatttctgggaactcactggttgatgggcaatatcctgagactactgtttgggagcatgactacgccagcaaactggaactcgcctcttaggcctggtgaaaagtatcctctggtagtattttcccacgggctcggcgcctttagaacattgtactccgccattggcatagacctcgccagccacggttttattgtggctgccgtcgaacatcgagatcggagcgcctcggcgacctattacttcaaagatcaatccgctgccgaaatcggcgacaagtcgtggctctacttaagaaccctgaaacaagaagaagagacacatattcgtaatgagcaggtgcgacagcgggccaaagagtgttcccaggcgctgtccctaattctcgacattgatcacggcaagcccgtgaaaaacgcgctggacttaaagttcgatatggagcagctcaaagtgagctacaagaagtag

SEQ ID NO: 199479 - DNA, 414 bp, synthetic construct
  misc_feature 1..414: note = Description of Artificial Sequence: Synthetic coding sequence
  source 1..414: mol_type = other DNA
atgaccacccccgccaactggaacagccccctgcggcccggcgagaagtatccactggtggtgttctcacacgggctcggagcctttagaaccctttactcagctatcgggatcgacctggcatcacacggattcatcgtggctgcggttgaacatagggatcgctccgccagcgcaacttattattttaaggatcaaagcgcagccgaaatcggagacaagagctggctctacctgaggactttgaaacaagaggaggaaacgcatattcgcaatgagcaggtgcgccagcgagccaaggagtgtagccaggcactgtcactgattttggatatagaccacggtaaacccgtgaagaatgctttggatctgaagttcgatatggagcaacttaaggtgtcttataagaagtag

SEQ ID NO: 199480 - DNA, 489 bp, synthetic construct
  misc_feature 1..489: note = Description of Artificial Sequence: Synthetic coding sequence
  source 1..489: mol_type = other DNA
atgcgggcccccatccccgagcccaagcccggcgacctgatcgagatatttcgtccattttatcgccactgggcgatctacgttggcgatggctatgttgtacatctagcccccccatccgaggtcgccggagctggggccgcctccgttatgagtgccctgaccgacaaagccatagtgaagaaggagctgctgtatgatgtggcgggaagcgataagtaccaggtgaataataaacacgatgataagtattcccccctgccttgtagcaagatcattcaacgggccgaggagcttgtgggtcaggaagtcctctataaattaacaagcgagaattgtgaacatttcgtcaacgaacttcgttacggagtcgcaaggtctgaccaagtgagagatgttatcatagccgcctcagtcgctggaatgggacttgcagccatgagcttgatcggcgtcatgttctcccgaaataaaaggcaaaagcagtag

SEQ ID NO: 199481 - DNA, 489 bp, synthetic construct
  misc_feature 1..489: note = Description of Artificial Sequence: Synthetic coding sequence
  source 1..489: mol_type = other DNA
atgcgggcccccatccccgagcccaagcccggcgacctgatcgagatcttcagacctttctatcgacactgggctatctatgtgggtgatgggtatgtcgtgcacctggctcctccctcagaggttgcaggggcgggagccgcctccgtgatgagcgcgttgacggacaaggccatagtgaagaaggagttactgtatgatgtggccggtagcgacaaataccaggtgaataacaagcacgatgataaatactcacctctgccttgttccaaaatcatccagagggccgaggagctagttggtcaggaggtgttgtacaagctgacgagcgagaactgtgaacactttgttaatgagctgcgttacggagtggcccgcagtgaccaggtgcgagatgtcattatcgccgctagcgtcgccgggatgggtctcgcggccatgtcactgatcggcgtgatgtttagtcgaaataagagacagaagcaatag

SEQ ID NO: 199482 - DNA, 4377 bp, synthetic construct
  misc_feature 1..4377: note = Description of Artificial Sequence: Synthetic coding sequence
  source 1..4377: mol_type = other DNA
atgggcctgcggcccggcatcttcctgctggagctgctgctgctgctgggacaggggaccccccagatccacaccagccctaggaaaagcaccctggagggacagttgtggcctgaaactctgaaaaactcaccatttccctgcaacccaaataaacttggcgtgaacatgcccagtaaaagcgtacacagcctgaaaccctccgatatcaaatttgtagccgccattggaaatctcgaaatccctcccgaccctggtactggcgacctggaaaagcaggattggactgaacggcctcagcaggtctgtatgggagttatgaccgtgctgtccgacatcatccgctacttttctcctagtgttcccatgccagtttgtcacactgggaagagagtcattcctcacgacggggcagaggatttgtggattcaggcacaggaactggtgcgcaatatgaaggagaacttacagcttgactttcaattcgattggaaacttatcaatgtgtttttcagtaacgcatcgcagtgttatctgtgcccgagcgcccagcaaaacggactggccgcaggaggtgtagacgagctcatgggggtgttggattacctgcagcaggaggtccccagagcgttcgttaaccttgtggatttgtccgaggtcgccgaggtttcccgtcagtatcatgggacttggctgtcgcccgctcctgagccatgcaattgcagcgaggagacaacgcgcttagctaaggtggtgatgcagtggtcttaccaggaagcgtggaatagtctccttgctagcagccggtattccgagcaggaatcctttactgtggtgtttcagccctttttctatgaaaccacacctagcctccattctgaggacccgagattacaggatagcaccaccttagcctggcacctgtggaacaggatgatggaaccagcgggggaaaaagacgagcccctgtctgtcaagcacggcagaccgatgaaatgtccttcacaggagtctccttacctcttcagctatagaaacagcaattatctgacccgtttgcaaaagccacaagataaactggaggttagggaaggtgccgagattagatgtccggacaaagatccgagcgatacagtgcctaccagtgtccacaggctgaaaccagcagatatcaatgtgataggggcactgggtgatagcctaaccgccgggaatggcgctggatctaccccagggaatgtcctggatgtgctgacacaatacagaggacttagttggagcgtgggtggcgatgaaaatatcggcaccgtgaccacactcgctaacatcttgcgcgaatttaaccccagcctgaaggggttctctgtggggaccgggaaggaaacatcccccaatgcctttctaaaccaggctgttgctggcggacgggctgaagacctacctgttcaggctaggaggctggtagatcttatgaagaatgacacacgcatacacttccaggaggattggaagatcattacattgttcattggcggaaacgacctgtgcgacttctgtaatgacctggtgcactatagtccgcagaatttcacggataacataggaaaagccttagacatcttgcacgcggaggttccacgggcatttgtgaacctggtcactgtgctagagatcgtgaacctccgggaactttaccaggaaaagaaggtttactgccccaggatgatacttaggtctctgtgtccatgcgtcttaaagttcgacgacaattcaactgagcttgccacactcattgaattcaacaagaaattccaggaaaagacacaccagctgatcgaatccggaagatatgatacacgagaagactttacggtggtcgttcagccctttttcgaaaacgtggatatgcccaagacatcagaaggactgcctgataattcattttttgctccagactgcttccacttcagcagtaaatcccactcacgtgcagccagtgccctgtggaacaacatgctagagccagtcggccagaaaacaacccgtcacaagttcgagaacaaaatcaacatcacatgccccaatcaggtgcagccattcctgaggacttataaaaacagcatgcaggggcacgggacctggcttccctgccgcgatcgggcccctagcgctctgcaccctacgagtgtgcacgccttgcgccctgccgatattcaggtggtggcggccctgggggactccttgacagccggcaatggcatcgggtccaaacccgacgacctgcccgacgtgaccacacaatacaggggcctgagttacagcgccggtggggatgggtctctcgaaaacgtgaccacactgccgaatatcttacgtgaatttaataggaatttgaccggctacgcagtcggcactggggatgccaacgacactaatgcgttcttgaatcaggccgtgccaggggctaaggcagaagatctgatgtcccaagtccagaccttaatgcaaaaaatgaaggatgaccatcgcgttaattttcacgaggactggaaagtgatcacagttttgataggggggtccgacttgtgcgactactgtacagactcgaatctgtactctgcagccaactttgtccaccacctgagaaacgctttagacgtccttcatcgtgaggttccccgggtactcgttaatctcgtcgattttctcaatcctacaatcatgcggcaggtttttctggggaatcccgacaagtgccctgtgcaacaggcaagtgttttgtgcaactgtgttcttactctccgggagaactcacaggagcttgctcggctcgaggccttcagccgcgcctatcggtctagcatgagagagttggtaggcagcggcagatacgatacacaggaggatttcagtgtcgtgctgcagccgttcttccagaacatccagctacccgtgctggctgacggtctccctgacacatcctttttcgcgcccgactgtattcatcctaaccaaaagtttcattctcagcttgctcgcgccctgtggaccaatatgcttgaacctctcggtagcaaaaccgagaccctcgacctacgcgccgaaatgccaattacctgtccgacccagaacgaaccgtttctgagaaccccgagaaacagtaactatacttaccctattaagcccgcaatcgagaattggggaagtgacttcctatgtacagaatggaaagccagcaactccgtgcccacgtctgtgcaccagttacggccagcagacatcaaagttgtggccgctttaggggactccttaaccactgctgttggcgcccgaccgaacaacagttcagaccttccaactagctggcgcggtctctcctggtccatcggtggagatggaaatctggaaacccacacaactctgccaaatatcctgaagaaatttaacccctaccttttgggattctccacctccacttgggagggcaccgctggcttgaacgttgccgctgaaggggcacgagcccgcgacatgcctgcacaggcttgggatttggttgagaggatgaaaaactcacctgacatcaatttagagaaagattggaaattggttacactgttcatcggagtcaatgatttgtgtcattattgtgaaaacccagaggcacacttagctacagagtacgtgcagcatattcagcaggcactggatatcctgtccgaagagctgccacgtgcctttgtcaatgtggtggaggtaatggaactggccagcttgtatcagggacaggggggcaagtgcgctatgttggctgctcaaaataattgtacctgtctgagacacagccagtcgtcactcgagaaacaggagttaaagaaggtaaactggaatctccagcacgggatatcctccttttcctactggcaccaatatactcagcgtgaggattttgcagtagttgtacagcctttttttcagaatacattaacacctttgaacgaacgcggggatacggacctcactttttttagcgaggactgcttccatttctccgacagagggcacgccgagatggcaatcgccttgtggaataatatgctagagccggtgggtagaaagactactagcaataattttacccactcccgggctaagctcaaatgcccatctccggagagcccctatctgtatacgctaagaaacagcagactgctgcccgaccaggcagaggaagcccccgaggtgctctactgggcggtgcctgtcgctgcaggtgttggacttgtcgttggtataataggaacagtggtttggagatgcagaaggggtgggcggcgggaggacccacctatgtcacttcggacagtcgccctatag

SEQ ID NO: 199483 - DNA, 1467 bp, synthetic construct
  misc_feature 1..1467: note = Description of Artificial Sequence: Synthetic coding sequence
  source 1..1467: mol_type = other DNA
atggagcccgccggcgagaaggacgagcccctgagcgtgaagcacggtagacccatgaagtgtccctcacaagaaagcccttatctgtttagttatagaaacagtaattatctgactaggctccagaagccgcaggacaaattggaagtcagggaaggcgcagagatcagatgtcctgacaaggacccctctgacacagtgcctacttctgtccacaggttgaagcccgccgatattaacgtgatcggcgctcttggtgacagcttgacggcaggtaacggagctggaagcaccccgggaaatgtgctggatgtactgacccagtaccgggggctaagctggagcgttgggggggacgaaaatatcggtacagttacaaccctcgccaatatcctcagagagtttaatccctccttaaagggatttagtgtgggaaccggaaaggagaccagcccgaatgcattcctgaaccaggccgtagctggtggcagagccgaggatctgcctgttcaagcgaggcggctggtggatctcatgaagaatgatacgaggattcacttccaggaggactggaaaatcatcactctcttcataggcgggaatgacctgtgtgacttctgtaacgacctcgtgcattattcaccccagaacttcaccgataatatcgggaaggccctcgacattttgcacgctgaagtgccgagggcctttgtcaaccttgtgacagtcctggagatagtgaacctgagggagctgtaccaagagaaaaaggtatactgtcctaggatgattcttagatccctgtgtccctgtgtgctcaagtttgacgataactcaaccgagctggcaaccctgattgaatttaacaagaaattccaggagaagacgcatcaactgatcgagagcggcaggtacgatacccgcgaggatttcaccgttgtagtacagcccttttttgaaaacgttgatatgccgaagacaagcgagggtctgccggacaattcattttttgcgcctgattgcttccatttcagcagcaagtcccacagcagggccgcatcagccttgtggaacaatatgctcgagcccgtagggcaaaagaccactcggcataagtttgaaaacaagatcaatatcacatgtcccaatcaggttcagccatttctcaggacctacaagaatagtatgcagggacacggcacctggttgccatgcagagatagagcaccaagcgcacttcatcccacctcagttcatgccttgcggccagctgatatccaggtcgtggccgcgctgggagattcccttaccgctggtaacggaattggtagtaagcccgacgacctcccagacgtgaccacacagtaccgtggactttcttatagggagagcaaaccaggtttcctcagcgactcctgggtcagcaagagcaatcgcaagtgcactcggaaggccccaaacccatag

SEQ ID NO: 199484 - DNA, 4344 bp, synthetic construct
  misc_feature 1..4344: note = Description of Artificial Sequence: Synthetic coding sequence
  source 1..4344: mol_type = other DNA
atgggcctgcggcccggcatcttcctgctggagctgctgctgctgcttggtcagggcacgccacagatccacacgagtccgaggaaaagcacactcgagggtcagttgtggccagagacccttaaaaacagtccatttccatgtaatcccaataaactgggggttaatatgccgtcaaagagcgtgcactctctgaagccttccgacatcaaatttgtagccgctattggcaacttagagatcccacctgaccctgggaccggtgacctggaaaaacaagattggacagagaggcctcagcaggtgtgcatgggcgttatgaccgtgctgagcgatattattcgatacttcagcccaagcgtgcctatgcccgtgtgccatactggcaaacgtgttattccacacgatggggccgaggacctgtggattcaggcccaggaactggtaagaaatatgaaggagaacttacagctagattttcagtttgactggaagctgatcaatgtgttttttagtaatgcctcacaatgttatctttgtccttcggctcagcaggctccatccctgtctactgtgctcctctcacaaaacgggttggccgctggcggagttgacgagttgatgggcgtcctagactacctgcagcaggaggtgcctagagctttcgtcaacctggtcgacctaagcgaagtcgcagaggtgtcgcgccagtatcacggtacatggctgtcaccagctcccgagccttgtaactgtagcgaggaaactacacgactggcaaaggttgttatgcagtggtcctatcaggaggcatggaacagtttacttgcctccagccgttattccgagcaggagtcattcacagtagttttccagcctttcttttacgaaaccacaccgtcattacactccgaagatcctagattacaggattccacaaccctcgcttggcacttatggaaccgcatgatggagccagctggagagaaggacgagccattatctgtgaagcatggccgtcccatgaaatgtcctagccaggaaagcccctatttgtttagctataggaattcaaactacctcaccagattgcagaagccccaggataaactcgaagttagggaaggcgcagaaattcgctgtccagacaaggacccatctgatacagttcctacaagtgttcaccgcctgaaacccgctgatattaacgtcatcggggccttgggtgactccctcactgcagggaacggcgcaggatctaccccggggaatgttttggacgtgctcacccagtaccgaggcctgagctggagtgtgggcggagatgagaacattggcaccgtgaccacgttggccaatattctgcgcgagtttaatccttcccttaaaggttttagtgtaggtaccggaaaagaaacatctcctaacgctttcttgaatcaggccgtcgccgggggtagagccgaggatctgcctgtgcaggcacgacggctcgtggatctcatgaagaatgatactcgcatacactttcaggaggattggaagataattaccttattcatcggaggaaacgacctctgcgacttctgcaacgacctggtgccccgcgcgtttgtgaacctggtgaccgtgctggagatcgttaatctgcgcgaactttatcaagagaagaaagtctattgccctcggatgatactgcgcagcctatgcccctgcgtgctcaagttcgacgacaactctaccgagctggctaccttgatcgaatttaacaaaaaattccaggaaaagactcaccagctgatcgagtctggccggtatgatacaagagaagacttcacggtggtcgtgcagcccttcttcgaaaatgtggacatgcctaagacatctgaagggttgccggacaactcattcttcgcaccagactgctttcacttttcttccaagtctcacagccgagctgcgagcgcgctctggaacaacatgttggaacctgtgggccagaaaacaactcgccataagtttgagaacaagatcaacattacctgtccaaatcaagtacaacccttccttcgaacctacaagaacagcatgcaaggccatggtacctggcttccatgtcgggatcgcgctccttcagccttacacccaacctctgtccacgccttaaggccggcagacattcaagtggtcgccgctctcggagattccctgaccgctgggaacgggataggttcaaagccagacgatttaccagatgtgactactcagtacaggggactgtcgtactcagccgggggagatggttccctggaaaacgtgaccacactccctaatattctgcgggaattcaatcgcaacttgaccggatacgctgtcggaacaggggatgctaatgatacgaatgcttttttgaaccaggctgtacctggtgcgaaggccgaagatctgatgtcacaggtccagacgctcatgcaaaagatgaaggacgaccaccgcgtgaatttccacgaagactggaaagtgatcactgtcctgatcgggggatctgacctttgcgattattgcaccgattcaaacctgtactctgctgcgaattttgtccaccacctgcgcaatgcccttgatgtcctgcatagagaggtcccccgcgttctggtgaacctcgtcgattttcttaatccaacaataatgagacaggtgttcctggggaacccagacaagtgccctgtgcagcaagccagtgtcttgtgcaactgcgtcctgaccttaagagagaactcgcaagaactcgccagactggaagcctttagcagggcgtacagatcaagcatgagagaactggttggcagtggccgatacgatactcaggaagatttctccgtagtcctacagccgttcttccagaatatccaactacctgttctggctgacgggctgccagatacctctttctttgctcccgattgcatccaccccaatcagaagtttcactcacaacttgcgagggccctttggacaaacatgctcgagccactgggctctaagactgaaacgcttgatctcagagccgaaatgcctatcacctgtccaacccagaacgagccctttctgcgcacccccaggaattctaattacacctatcctatcaaacccgcgatcgaaaactggggcagtgactttctgtgtaccgagtggaaggcgagtaattctgtgccaacctccgtgcaccagcttcgacctgcagatattaaggtagtcgcggctctgggagatagcttgaccacagctgtgggagcccggcccaacaactcgagcgatctgccaacatcctggcggggactttcctggtctatcggtggcgatgggaacctggagacgcatactaccttgcctaacatactgaagaagtttaacccatacctgcttggctttagcaccagcacctgggaagggactgctggcctgaacgttgcagccgaaggagcccgagccagggacatgcctgctcaggcgtgggacttagtggagcgcatgaagaactcaccagacataaacctggaaaaggactggaagctggttactctgttcatcggtgtcaatgacctgtgtcactactgtgaaaaccctgaggctcacctggcaaccgaatacgtgcaacatatccagcaggctctcgatattcttagtgaagaacttccacgagctttcgtcaatgtggtggaggtgatggagttggctagcctgtatcaaggccagggcgggaagtgcgctatgctcgccgcgcagaacaactgtacctgtctgcggcatagtcagtccagcctggagaagcaggagctgaaaaaagtaaactggaatctccagcatgggatctcaagtttttcctactggcatcagtacactcagagagaggactttgctgtggtggtacagccattcttccaaaacactctcacacctctgaacgagagaggtgacacagacctaactttcttttctgaagactgtttccacttctctgatagagggcacgctgagatggctatcgctctgtggaacaatatgcttgagcccgttgggcgcaaaacgacatcgaacaatttcactcactccagggccaaactgaagtgtccctctccagaatcaccatatctctatacgctcaggaactctagactcctacccgaccaggcagaagaggcccctgaagtgctttactgggctgtacccgtcgctgccggcgtcggcctggtcgtgggcattatcggtactgtggtgtggcgatgcaggcggggagggagacgtgaagatcctcctatgtcgcttagaactgtggcgctctag

SEQ ID NO: 199485 - DNA, 1272 bp, synthetic construct
  misc_feature 1..1272: note = Description of Artificial Sequence: Synthetic coding sequence
  source 1..1272: mol_type = other DNA
atgcccatcacctgccccacccagaacgagcccttcctgcggaccccgaggaatagcaattacacttatcctatcaagccagccattgagaactggggctctgattttttgtgtacagagtggaaagccagtaactccgttccaacatcagtgcaccaactgcgtcccgctgatatcaaagttgtcgcggcgctaggcgacagcttgacaaccgccgtcggagccaggcctaataactccagtgatcttcctacgagctggagagggttgagctggagcatcggaggcgacggcaacttagaaactcacactaccctgcccaacattctgaagaagtttaatccatatctgctgggattttcaacttccacctgggaaggaacagccgggttgaatgtcgcagcagagggtgcccgggcgcgcgatatgccggcccaggcttgggatctggtagagaggatgaagaattcccctgacattaatctcgagaaagattggaagctggtgacactgtttataggagtcaatgacctgtgccactattgtgagaatcctgaggcacatctcgccaccgagtacgtgcagcatattcagcaggcacttgacatactttccgaagagctgccacgagctttcgtgaatgtggtcgaagttatggagctggcaagtctgtatcaaggtcagggaggaaagtgtgccatgctcgccgctcaaaacaactgtacttgcttacgacactcccagtcttctctggaaaagcaagaactgaagaaagtcaactggaatttgcagcacgggattagctcgttctcctactggcaccaatacacgcaacgggaggattttgctgtggtcgtccagcctttcttccagaacaccctgacaccactgaatgaaaggggagatacagacctaacattcttttcagaggactgttttcatttcagtgatagaggacacgccgaaatggccatagctctctggaataacatgctggagcccgtgggcaggaagactacaagtaacaactttactcacagccgcgcgaaattgaagtgtccatcccctgaaagcccctatctgtacaccctcagaaattctagactgctgccagatcaggcagaagaggccccggaggtgctctattgggccgtacccgtggctgccggggtaggcctcgtggtaggcattatcggcacagtggtctggaggtgccgcagggggggacgtcgtgaggatccccctatgtcactgaggaccgttgcactatag

SEQ ID NO: 199486 - DNA, 3504 bp, synthetic construct
  misc_feature 1..3504: note = Description of Artificial Sequence: Synthetic coding sequence
  source 1..3504: mol_type = other DNA
atggccggcgcccagcccggcgtgcacgccctgcagctggagcccccgacagttgtcgagactctgaggcggggatcaaaatttattaagtgggacgaagaaaaactgatgactgtggtcagcgggcctgacccagtgaataccgtattcctgaatttcatggctgtgcaggacgataccgctaaagtgtggtctgaggaattgttcaagctcgccatgaatatcctggcccagaatgcgagtcggaacactttcctaagaaaggcttacactaagctgaagttacaagtgaatcaggatgggcgcatccctgttaagaatatcctgaaaatgttctcagctgataagaaacgagtcgagactgccttggagagctgcggcttgaagttcaaccgaagtgaaagcatcaggcccgatgagtttagcctggagatctttgagcggttcttaaacaagttgtgcctccgacccgacatcgataaaatactgttggagatcggggcaaagggtaaaccctatttaaccttagagcagcttatggactttataaaccagaaacagcgcgaccctcgcctcaatgaagttctataccctccgttacggccaagtcaggcacggctcctaattgagaaatacgagcctaatcaacagtttctagagagggaccagatgtccatggaaggattttccagatacctcggcggagaggagaacgggatcctgcctcttgaagcgctggatctctccaccgacatgactcagcccctctctgcctacttcataaattcctcacacaacacttatctgacagctgggcagttagctggcacatcatccgtggaaatgtatcggcaagccctattatgggggtgccgatgcgtcgaattagacgtgtggaagggacgacctccagaggaggagccattcatcactcacggctttaccatgaccaccgaagtcccactgagggatgtcctggaagcgatcgccgaaaccgcattcaaaacctcaccataccccgtgatcctctccttcgaaaaccatgtggacagcgcgaagcagcaggctaagatggccgagtactgtcggagcattttcggcgacgctctgcttatcgaacccctagacaaatacccgttagctcccggcgtgcccctccctagtccccaagatcttatgggacggattctggtcaagaataagaagagacatcgaccttccgctggaggccctgactccgcaggtcggaagaggccgctcgaacagtcaaatagcgccctctcggagagttccgccgccaccgaacccagctcccctcagctgggtagtccaagttccgattcctgccctggactgtctaatggggaggaagttggcctggaaaaaccaagtctggagcctcagaagtcattaggcgacgaaggtcttaaccgcggaccttatgttctgggcccagctgatcgggaggacgaggaagaggacgaggaggaggaggagcagaccgatcccaaaaaacctactactgacgagggcacagcgtcatccgaagtgaacgccacggaagaaatgagcaccctggtaaattacattgaacctgtgaaattcaagagcttcgaagcagcaaggaagcgcaataaatgttttgaaatgagcagtttcgtagaaactaaggccatggaacagctgacaaagtcccccatggagttcgtcgagtataacaagcagcaacttagccggatataccccaagggcactagggtcgactcgtccaattacatgcctcagctcttttggaacgtcgggtgccagctggtagccctgaacttccagactctcgatgtggcaatgcaattgaacgccggtgtattcgagtacaacggcaggtctggctatctgctgaaacccgagttcatgcgccgtccggataagtcatttgacccgtttaccgaagtaatcgtcgatggcatagtggccaatgcactcagagttaaagtgatttctgggcagttcctcagcgatagaaaggtcggcatctacgtggaggtggacatgtttggcctgcccgtggacacaaggaggaaataccgtactaggaccagccagggaaactcctttaaccccgtatgggacgaagagccctttgatttccctaaggttgtcctacccactcttgcaagcttgcgcatagccgccttcgaagaggggggtaagtttgtaggccatcgcatactgcctgtttccgccattagatctggctatcactacgtctgtctccgaaacgaagccaaccaaccactgtgtctgccagctctgcttatctacaccgaagccagcgactatatcccggacgaccatcaggattacgcggaggcattaattaatcccattaagcacgtgagtttgatggatcagcgcgcaagacaacttgcagcccttattggagaatctgaagcccaagccggccaagaaacctgtcaggacacccagtcccaacagctcggatcgcagccttcctctaatcctacacccagtcccctagacgccagccccagacgtccaccgggaccaacaaccagccccgccagcacttctctgagctcccccggccaaagggatgatttgatcgcatcaatactcagcgaagttgcccctaccccacttgatgagttgcgtggccacaaggcgctagtaaaactcagaagcagacaggagcgtgaccttcgagagctgagaaaaaagcaccagcggaaggcagtcacattgacgaggaggctgctcgatggcctcgcccaggcgcaagcagagggccgctgtcgcctacgcccgggagcactcgggggagccgctgacgttgaggataccaaggaaggagaggatgaagctaagaggtatcaagaattccagaaccgtcaagtgcagtctctactggaactccgagaggcccaggttgatgctgaggctcaacgaaggcttgagcatctcagacaggccctgcagagacttcgcgaggtggtcctggacgcaaacacaacccagttcaaaagactgaaggaaatgaacgaaagggaaaaaaaggagctacagaaaatcctcgaccggaaacggcacaatagcatttccgaagccaagatgagggacaagcacaagaaagaagccgaattgacggagatcaacagaagacatattaccgagagtgttaatagcattagacgtctcgaagaagcgcagaagcagaggcacgatcgcctggtcgccgggcaacagcaggtgcttcagcagcttgccgaggaggagccaaagctactggcccaactggctcaggaatgccaggaacaacgcgcgcgtctgcctcaagagatcagaaggtctctcttaggcgagatgcctgaaggcttgggagatggcccccttgtcgcttgcgccagtaatggacatgcccccggatcaagtggccatctgtcaggcgctgacagcgagagccaggaggagaatacccagctgtag

SEQ ID NO: 199487 - DNA, 3651 bp, synthetic construct
  misc_feature 1..3651: note = Description of Artificial Sequence: Synthetic coding sequence
  source 1..3651: mol_type = other DNA
atggccggcgcccagcccggcgtgcacgccctgcagctgaagcccgtatgcgtgtccgacagtctgaagaaggggactaaattcgttaagtgggatgatgattcaaccatcgttaccccgattatcttaagaactgaccctcaggggttcttcttttactggacagatcagaataaggagaccgaattgttggatttatcgctggtcaaagacgcccgctgtgggcggcacgccaaggccccaaaggatcctaagttaagagaactgttggatgtcggcaatattggcagactcgaacagagaatgattacagtcgtgtatggacctgatttagttaacattagccatctcaatctggtggcctttcaggaggaggtggctaaagaatggaccaatgaggttttcagcttagccacaaatctactagctcagaatatgtcaagagatgcattcctcgaaaaggcctacactaagctaaaactccaggtaacacctgagggtagaataccgcttaagaatatttatagactgtttagcgcagaccgcaaaagggtggaaacagccctggaggcctgcagcttaccgagtagcagaaatgactctataccccaggaagatttcaccccagaagtgtatagggtgttcctaaacaatctttgcccgagaccggaaattgacaacatcttctccgagttcggagctaagtcaaaaccctatttgaccgtggatcagatgatggattttatcaatctgaagcagagagaccctcggctgaacgagattctttatcctccgctgaagcaggagcaggtgcaggtcctgatcgaaaaatatgaacccaataactctctggctagaaaaggacaaatttccgtggatggttttatgcgatacttgagcggtgaagagaatggtgtggtgtccccagaaaaactggatctcaacgaggacatgtcgcagcctctcagccactactttattaatagttcccacaatacctacctgactgctgggcagctggccgggaattctagcgttgaaatgtatcggcaagtgctgctgtcaggttgtcggtgtgttgagctggactgttggaaaggacggactgcggaagaagaacctgtgatcacacacgggttcacgatgacgacagagatctcatttaaagaagtgatcgaggcaatcgccgagtgcgcctttaaaacaagccctttccccatcttgctctctttcgagaaccatgtggattcccctaaacagcaggctaagatggccgagtattgtcgtctaattttcggcgatgctttgctcatggagccactggagaagtatcccctggaatccggtgtgccgcttccttcccccatggacctgatgtacaaaatcctcgtgaaaaacaagaagaagtcccataaatcctccgaaggatcaggtaaaaaaaagctgtcagagcaggctagcaacacttatagtgactccagcagcatgttcgaaccgagtagccccggcgcaggggaggccgacactgagtcagacgacgacgacgatgatgacgattgtaaaaagagtagcatggacgaaggtactgccggatctgaagcgatggcaactgaagagatgtccaatctggtgaactacatccaacctgtgaaattcgaatctttcgaaataagcaagaagcggaataaaagctttgaaatgtctagttttgtcgagaccaaaggcctcgaacagttgactaagtcccctgtggagttcgtcgagtacaacaagatgcagctgtctcgaatataccctaaaggcacccgcgtggatagctcgaattacatgccccagctgttctggaatgctggatgtcagatggtggctctaaactttcagactatggatctcgccatgcaaatcaatatgggtatgtatgaatataacgggaaatcaggctacaggctgaagcctgagtttatgcgccgtcctgataagcatttcgacccctttacagaggggatcgttgacggcattgtcgccaacactttgagtgtaaagattatttcgggccagtttctatcagataagaaggtgggcacctatgtggaggtagacatgttcgggttgccagtcgatacccgtaggaaggcatttaaaaccaaaacctcccagggcaatgcagtcaacccggtttgggaggaagagccaatcgtattcaagaaggtggtcctgcctaccctggcgtgtctgaggattgcagtgtacgaagagggtggcaagtttatcggtcatcggattttaccagtgcaagctattcgccctggctatcactacatatgtttgaggaatgagcggaaccaacctttaacactgcccgcggtgtttgtttacatcgaagtgaaagactacgtccctgacacctacgccgacgttattgaggccctgtctaatccaattaggtacgtcaatttaatggagcaaagagctaagcaactggcagcattaacattggaagacgaggaggaggtgaagaaggaagccgaccccggagagacaccctctgaggcaccatcagaggcacgtaccacacccgctgaaaatggtgttaatcacactacaacactgacccccaagcccccctcccaggccctacattctcagcctgcccccgggtccgttaaggcccccgcaaagaccgaagatctgattcagagcgtgctgacggaggttgaggcccaaactattgaggagctgaaacagcagaaaagttttgtgaaactccaaaagaagcactacaaggagatgaaagacctggtgaagaggcaccataaaaagaccactgatctgatcaaggaacacactacaaaatacaacgagatccagaacgattatcttaggagacgcgccgcattagaaaagtccgcaaaaaaggattccaagaaaaagagcgaaccttcctctccagaccatggctcttcaaccatcgagcaagacttggctgccctcgatgcggaaatgactcagaagctgatcgatctgaaagataaacagcagcagcaactgctcaatcttcggcaagagcagtattatagcgagaaatatcaaaagagagagcatatcaaattgcttattcaaaagctgaccgatgttgctgaggaatgtcagaataaccaactgaagaaactgaaggaaatctgcgaaaaagaaaaaaaggaactaaaaaagaagatggataagaaacggcaagagaagataactgaagcgaaatccaaggacaaatcccagatggaagaggagaaaaccgagatgatccggtcttacattcaagaggtggtgcaatacatcaagaggctggaagaggcccaaagcaaacggcaagaaaaattagtcgagaaacataaagagattcggcagcaaattctcgacgaaaaaccaaaactgcaggttgaactggaacaggagtaccaagacaaatttaagaggttgcccctggaaatactggaatttgtgcaggaggccatgaaaggaaaaatctctgaagactctaatcatggctctgcccctctctccctgtccagcgatccaggaaaggttaatcataagacacccagttctgaggagctcgggggagatataccaggcaaggaatttgacacacccctttag

SEQ ID NO: 199488 - DNA, 672 bp, synthetic construct
  misc_feature 1..672: note = Description of Artificial Sequence: Synthetic coding sequence
  source 1..672: mol_type = other DNA
atgcggcggcccgacaagcacttcgaccccttcaccgagggcatcgtcgacgggatcgtggccaatactctgtcagtgaagatcatctccgggcagtttctcagcgacaaaaaggtcggcacatacgtcgaggtggacatgtttggattgcccgtggacacaaggagaaaagcctttaaaaccaagaccagccagggcaatgccgtaaaccccgtatgggaggaagagccaatcgtctttaagaaagtggtattgcccactttggcctgcctcagaattgcagtgtatgaggagggaggaaaatttatcggccatcgcatactgcccgttcaggcaattcggccagggtatcattatatttgtttgagaaatgagagaaaccagccgctcacacttcctgcagtgtttgtgtacatcgaagtcaaagactacgtcccagacacttacgcagacgtgatcgaagcactgtctaatccaatccgctacgtgaacctgatggaacaacgagccaagcagctcgcagccttaacattggaagatgaagaggaggtcaagaaggaagggggcttcctgcatgacgagatcatgcgccttacacgcaacacactcgaaaagttaatggctctcccccttacacacgtcgttccgattcagtctaaaatgctgtcctag

SEQ ID NO: 199489 - DNA, 3522 bp, synthetic construct
  misc_feature 1..3522: note = Description of Artificial Sequence: Synthetic coding sequence
  source 1..3522: mol_type = other DNA
atggccggcgcccagcccggcgtgcacgccctgcagctgaagcccgtgtgtgtttccgactcacttaaaaaagggaccaaattcgttaagtgggacgacgactctacgatcgtcacacctataatcctccgcaccgaccctcagggattctttttctactggacagaccaaaacaaagagaccgagctgttagatttgtcactcgtcaaggatgctaggtgtggcaggcacgccaaggcacccaaagacccaaagctcagagagctcctggatgtcggaaatataggcagactggagcaacggatgattactgtggtgtacgggccagacttggttaacatttcccacctaaatctggttgccttccaggaagaagtagcaaaagagtggacaaatgaagtgttttctctcgccacgaacctgttagcccagaacatgagccgagatgcatttctcgagaaggcgtacacaaaactgaagctgcaggtgacaccagagggccggattcctttgaaaaacatataccgtttgttttcggctgatcgcaagcgtgttgagaccgcattagaggcctgttcacttcctagtagtcggaatgactcaataccgcaggaagatttcaccccagaagtgtatagagtatttcttaacaatctttgtcccaggcccgaaatagataatatcttttctgagttcggcgctaagagcaaaccttacctaaccgttgaccaaatgatggattttatcaatctaaagcagagggacccacgactcaatgagatcctctaccctcccctcaagcaggaacaggtgcaggtcctgatagagaagtatgagcccaacaactcactcgccaggaaagggcagatctccgtcgatggcttcatgcggtatcttagcggagaggaaaacggagtcgtgtcaccagagaaactcgaccttaacgaagatatgtctcagccgcttagccattatttcattaatagctcacataatacctacttaactgccggccagttagctggtaactcgagcgtggagatgtatcgccaagttctcttatccggatgtcgctgtgtggagctggactgctggaaaggacggaccgccgaagaagaaccagtcataacacatgggttcacgatgactaccgagatctctttcaaagaagtcatcgaggccattgccgagtgtgctttcaagactagcccttttccaattttgctgagttttgaaaaccacgtggattcacccaagcagcaggctaagatggccgaatactgcaggctgatcttcggcgacgctctcctgatggaaccactcgagaagtacccacttgaatctggtgtacccctccccagcccaatggacctgatgtacaagatcctggtgaaaaataagaaaaaaagccacaaaagcagcgaggggagtgggaaaaagaagttatcggagcaggcttctaatacttattccgacagctcctctatgtttgaaccaagtagccccggtgccggagaggccgataccgagtctgatgatgacgacgatgatgatgattgtaaaaagtcttccatggacgagggtactgcaggatctgaagctatggccaccgaagaaatgtccaaccttgtgaactatatccagcctgtgaaatttgagagctttgagatcagcaaaaaacggaacaagtcatttgaaatgagttcttttgtggaaactaagggactagagcagctcaccaagtctcctgtggagttcgttgaatacaataagatgcagttatcccgcatctacccgaagggtacaagggtagacagttccaactatatgccacagcttttctggaatgctggctgtcagatggtggcactgaacttccagacgatggacctggccatgcagattaacatggggatgtatgagtacaatggtaagagcggataccgactgaaacctgagtttatgcgcagacctgataagcattttgacccatttactgaaggtattgtggacggtattgtggcgaataccttatcagtcaagatcatttctggccaattcctgagcgacaagaaagtaggaacatatgttgaggttgacatgttcggtctgcctgtggatactagaaggaaggctttcaagacaaaaacatcccagggaaatgccgtgaatcctgtgtgggaagaggagcccatcgtgttcaagaaagttgttctgcccactctggcgtgcctacgtatcgcagtctatgaggaggggggtaagttcatcggccaccgaattttgccagtgcaggccatccgtcctgggtaccactacatttgtttgagaaatgaaagaaatcagccactcactctgccggcagtgttcgtctatatcgaggtcaaggattacgtgccagatacttatgcagacgtgattgaggccctgagcaaccccattagatatgtgaacctgatggagcagcgagccaagcaactcgcggctctaacactcgaggacgaagaggaggtaaaaaaggaggccgatcctggcgagactccctcggaagctccatccgaggcaagaacaactcctgccgagaacggcgttaaccacaccaccactctgactcccaagcccccgagccaagccctgcattctcagcctgctcccggcagcgttaaggcccctgctaaaacagaagacttgattcagagtgtgctaaccgaagttgaggcgcaaaccatcgaggagctgaagcaacaaaaatcatttgtcaaactccagaagaagcactataaagagatgaaagacctggttaaacggcaccacaagaagactacggacttaatcaaggaacacacaactaagtacaacgagatccaaaatgattacctgcgccggcgggctgcactcgagaagagtgctaaaaaggacagcaagaaaaagtccgaaccttcaagcccggaccacggatcctctaccatagaacaagatttggcagccctcgatgcggagatgacacagaagcttattgatttaaaggacaagcaacagcaacaactcctgaatctgaggcaggagcaatattactctgagaagtaccagaaaagggaacatattaaactactcattcagaagcttacagatgtggctgaagagtgccagaacaaccagcttaaaaagctgaaagaaatctgtgaaaaagaaaagaaggagcttaagaaaaagatggataagaagcgtcaggagaagataaccgaggctaagtccaaagataaatcccagatggaggaggaaaaaaccgagatgattcgcagttacatccaggaagtggtacaatatattaaaaggctggaggaggcccagtccaaacggcaggagaaactggtcgagaaacataaggagatcagacagcagatcttagacgagaaacccaaaggcgagggctcctcatctttcttaagcgagacctgccacgaggatccgagcgtgtctcctaacttcacgcctcccaatccacaggccctgaaatggtag

SEQ ID NO: 199490 - DNA, 3522 bp, synthetic construct
  misc_feature 1..3522: note = Description of Artificial Sequence: Synthetic coding sequence
  source 1..3522: mol_type = other DNA
atggccggcgcccagcccggcgtgcacgccctgcagctgaagcccgtgtgtgtttcagattcactgaagaaaggcaccaagttcgtcaagtgggatgacgacagtactattgtcacccccattattctgcgaacagatccgcaaggatttttcttctattggactgaccagaataaggagaccgaactgctggatctctctttagtgaaggatgcccgatgtgggaggcacgccaaggcccccaaagatccaaagctgcgtgaacttctcgatgttggtaacattgggaggctggaacagcgcatgattacagtcgtatacggtcccgatctcgtcaatatctcccacttaaacctggtggcctttcaagaagaagtcgctaaagagtggaccaacgaagtgttttctttagcaacgaatctgctcgctcagaacatgtctcgcgatgccttcctcgaaaaagcgtatactaaacttaagctgcaggttacccccgagggacgtattcctctgaaaaacatttacaggctgttcagtgccgatcgaaagcgagtggagaccgccctggaagcgtgctcactgccttcttcacgcaacgacagtattcctcaagaggacttcacacccgaggtttaccgggtttttctgaacaacctgtgccctcgcccggagattgacaatatttttagtgagtttggggccaaaagtaagccctatctgaccgtggaccaaatgatggatttcatcaatctcaaacaaagagaccccaggctcaatgagatcctctacccgccacttaagcaggaacaggtacaagtactcattgagaagtatgagcctaataattccctcgcccgtaagggtcagatctcggttgacgggttcatgaggtatctgtcaggagaggagaatggagtcgtgtcccccgagaagctggatctgaatgaagatatgagccaaccactatcacattattttataaatagctctcacaacacttatctgactgcaggtcagctcgctggcaactccagcgtggaaatgtatcggcaggttctacttagcgggtgccgctgcgtggagctggattgctggaaggggcgaactgccgaggaagagccagtcattacccatggatttacaatgacaaccgagataagttttaaagaagtaatcgaggccatcgcagaatgcgcctttaaaactagcccctttcctatcctgctatcattcgaaaatcatgtcgattcccccaaacagcaggccaagatggccgaatactgtaggctgatcttcggagacgccctgctgatggaaccattggaaaagtaccctctggaaagtggagtcccattaccatcaccaatggatctaatgtacaaaatactggtcaaaaacaagaaaaagagtcataagagtagtgagggtagtggtaaaaagaaactctcagagcaagcaagtaacacttacagtgactcctcttcgatgtttgaaccctcatctcccggggcgggggaagccgacaccgagtcggatgacgatgatgacgatgacgactgtaaaaagtcatctatggacgaaggtactgccggctccgaggcgatggccacggaggagatgagcaatctcgtgaactacattcagccagtaaagtttgaaagcttcgaaattagcaagaagagaaacaagtccttcgagatgagttcctttgtagaaactaaagggctagagcagctgacaaagtcccctgttgagttcgtagaatacaataaaatgcagcttagccgcatttatcctaaggggacccgagtggacagcagtaattatatgccacaactgttctggaacgctgggtgccagatggtggcactgaactttcagactatggacctggctatgcagatcaacatggggatgtacgaatacaatggcaaaagtgggtaccgattgaaacctgaatttatgaggcgacctgacaagcactttgacccatttaccgaggggatcgtcgacggcatcgttgcgaataccctgagcgtgaagatcattagtggccaattcctctccgacaagaaggtgggtacttacgtcgaagtggacatgttcggcctcccagtggatacccgccgcaaggcattcaagaccaagacgagccaagggaatgccgtgaaccccgtttgggaggaagaacctattgtgttcaagaaggtcgtactacccacgcttgcctgtctccgaatcgctgtctatgaggaaggagggaagttcatcgggcataggattctgccggttcaggctatcagaccaggctaccactatatatgtctccgcaatgagcggaaccaaccactgaccctgcccgccgtctttgtctacatagaggtgaaagattatgtgccagatacatatgccgacgtcatagaggcactgagcaatccgatacgctatgtgaacctaatggagcagagagcgaaacaactggcggccttaactcttgaggacgaggaagaagtgaagaaagaggccgatccaggagaaaccccgagcgaagccccgtctgaagccagaaccacgccagcggaaaacggagtgaaccataccaccacccttacacccaagcccccgagccaggcactccacagtcagccagctcccggaagcgtgaaagctcctgccaagactgaggaccttatacaaagtgtgctcactgaagtcgaggctcagactattgaggagctcaagcagcagaagagctttgtcaaactgcagaagaaacactataaggagatgaaagacctggtgaaacgccatcacaaaaagaccacggatttgattaaggagcacaccacaaaatataacgagatccagaacgactatcttaggaggagagcagctttagaaaagagcgctaagaaggactcaaagaagaaatcggagccatcatccccagaccatgggagttctacaattgaacaggacctggctgctctggatgccgagatgactcaaaagctcatcgatctaaaagataagcaacagcaacagctgcttaacttgagacaggaacagtattactccgagaagtatcagaagcgggaacatattaagctgctcattcaaaagttaacagatgtggccgaggagtgtcagaacaaccagctgaagaagctgaaagagatatgtgaaaaagaaaaaaaagaactcaaaaaaaaaatggacaagaagagacaagagaaaatcacagaagcaaaaagcaaagataaatcgcaaatggaagaggaaaaaactgaaatgattcggtcatatattcaggaggtggttcagtacatcaaaaggctggaggaagcgcaaagtaagcgccaggaaaagctcgtggagaagcataaagaaatccggcaacagattctggatgagaaaccaaagggagaggggtcctcatcgttcctgtcagagacatgccacgaagatcctagtgtatctcccaacttcacgcctccgaatccacaagccttgaagtggtag

SEQ ID NO: 199491 - DNA, 699 bp, synthetic construct
  misc_feature 1..699: note = Description of Artificial Sequence: Synthetic coding sequence
  source 1..699: mol_type = other DNA
gccggcgcccagcccggcgtgcacgccctgcagctgaagcccgtgtgtgtctcagatagcctcaaaaagggaacaaagtttgtgaagtgggatgatgactctactatagtgacccctataatcctgcgtactgacccacagggttttttcttctattggactgatcagaacaaagagacggagctgcttgacctgagtctggttaaggacgctcgatgtgggcgccacgctaaagcacctaaagacccgaaactcagagaattactagacgtaggcaatatcggccgcctggagcagcgtatgatcactgtggtctacggtcctgacttggttaacatttcccatctgaacctggtggcttttcaagaggaggttgctaaggaatggacaaatgaggtgttttcgttggcaacaaatcttttagcgcagaatatgagccgcgatgcattcctagagaaggcttatactaaactgaagttgcaagtcactccggaaggcaggattcccttaaagaatatataccggttgttttctgccgataggaaacgcgtcgaaaccgccctagaagcctgttctcttccctcttccagggttgaaaaggctaatgaggcagctaagagcgaacagtcatgcggcaaggctccccccaagcactttcatctgcacttcatcaaacaaaacaagatgcttgaaccatag

SEQ ID NO: 199492 - DNA, 93 bp, synthetic construct
  misc_feature 1..93: note = Description of Artificial Sequence: Synthetic coding sequence
  source 1..93: mol_type = other DNA
gaggaggcccagagcaagcggcaggagaagctggtggagaagcacaaggagattcgacagcaaattttagacgagaaaccgaaagtcccttag

SEQ ID NO: 199493 - DNA, 591 bp, synthetic construct
  misc_feature 1..591: note = Description of Artificial Sequence: Synthetic coding sequence
  source 1..591: mol_type = other DNA
atcatcagcggccagttcctgagcgacaagaaggtgggcacctacgtcgaagtggacatgtttgggctccccgtggacacccgtaggaaggcgtttaagacgaaaacctcacagggcaatgcagttaatcccgtgtgggaggaggagccgattgtctttaagaaggtggtactccccaccctcgcatgtctgagaatcgcggtgtacgaggaagggggtaagttcataggacaccgcatccttcccgtacaagctattcgaccagggtaccactatatttgtcttcgcaacgaacgcaaccagccgctgacactccctgctgtgttcgtctacatcgaggtgaaagactatgtaccagatacttatgctgacgtcatcgaggccctgtccaatccaattagatacgttaatttgatggaacagagggcaaagcagttagcggcactcacgcttgaggatgaggaagaggtgaagaaggagggcggttttctgcatgatgaaattatgcggctgacccggaacaccttggagaagctgatggctctgcctctcacacacgtggtgccaatccagagtaagatgctgtcttag

SEQ ID NO: 199494 - DNA, 3411 bp, synthetic construct
  misc_feature 1..3411: note = Description of Artificial Sequence: Synthetic coding sequence
  source 1..3411: mol_type = other DNA
acccaggaccccaagctgcgggagctgctggacgtgggcaacatcggcaggctagagcaaaggatgattacagtcgtttatgggcctgacctagtcaacatctcacaccttaacctcgtggccttccaggaggaggtggcgaaagaatggactaacgaggtcttctccttggccactaatttgctggcccagaatatgagtcgcgatgctttcttggagaaggcatataccaagcttaaactgcaggttactccagaaggaaggatacccctgaagaacatctatcggctcttcagcgctgaccgcaaaagagtcgaaacggcactggaggcttgctctttaccctctagccggaacgatagcattccacaggaggactttactccagaagtatatcgggtttttctgaataatttgtgtcctagacccgagatcgataacattttctcagaatttggcgccaagagcaaaccttacctcactgtggatcaaatgatggactttattaatctaaagcagcgggacccccggctcaatgaaatcctttacccccctctgaagcaggagcaggttcaggtattgatcgaaaagtacgagccaaataactctctcgcacgaaaaggacagatctcggtcgatggtttcatgaggtacctaagcggcgaagagaatggcgtggtgagccccgaaaaactggatctgaacgaggatatgtcacaacccctgagccattactttatcaactctagccataatacctatctaactgctggccagctggcgggaaattctagtgtcgagatgtacagacaagttctgctgtcaggctgccgttgtgtcgagctagactgttggaaggggaggacagcagaagaggaacctgtgataactcacggcttcaccatgacaactgaaattagtttcaaagaagtgatcgaagccattgccgaatgcgctttcaagacttctcccttccctattttgttgtcctttgagaaccacgtagattctccgaaacaacaggccaagatggcagaatattgtagactgatctttggagatgcccttctgatggagccactggagaagtatcccctggagtctggagtccctttgccatcccccatggatctcatgtataaaattttggtcaaaaacaagaaaaaaagtcacaagagctccgaaggaagcgggaaaaaaaagttgtctgagcaagcatccaatacttactctgatagcagctctatgtttgagcccagtagcccaggagcaggcgaggctgatacagaaagcgacgatgacgacgacgacgatgactgtaagaagagctctatggacgagggtaccgcgggatcagaggccatggctacagaagagatgtcaaatctagtgaactacatacagcctgtcaaatttgagtctttcgaaatttcaaaaaagagaaataagtctttcgagatgtcaagcttcgtcgagaccaaaggcttggagcagctgaccaaaagcccagtcgagttcgtcgaatacaacaagatgcagttaagtcgcatttaccccaagggcacacgggtggacagttccaattatatgccacagctgttttggaacgccggatgccagatggtagccctcaattttcagaccatggacctggccatgcagattaatatggggatgtacgagtacaacggaaagtctggctaccggctgaagccggagttcatgaggcggcctgataaacactttgacccttttaccgaggggatcgtggacggaattgttgcaaataccctgagcgtgaagattatatctggccaattcctgagtgacaagaaggtgggaacttacgtggaagtggatatgtttggcctgccagtggacacaaggaggaaggcatttaaaacaaaaacaagtcagggcaatgctgtcaacccagtctgggaggaggaaccaattgtgtttaaaaaggtagtgcttcctactcttgcctgtctccggattgctgtctatgaggagggggggaaattcatcgggcatcggattttgcctgtgcaggcaataagaccagggtaccactatatctgtctacggaatgagcgaaatcaaccccttactctgccagctgtattcgtgtacattgaggttaaggactacgtacccgacacatatgctgacgttatcgaagccctttccaaccccattcgttacgtaaacctgatggagcagagggccaaacagcttgccgcgctgactctggaggacgaggaggaagtaaagaaggaagccgaccctggtgaaaccccttcagaagcaccctcagaggcccggaccacccctgcagaaaacggagtgaaccacacgaccacactgacgcccaaaccaccttcacaagcgttacattcacagcctgcgcctggctcagtgaaagctccagcaaagaccgaagatctgattcagtctgtgctgacagaagtcgaggcgcagaccattgaagaattaaagcaacagaaatcttttgtgaaactccagaagaagcactacaaagagatgaaagacctggtcaagcgacatcataaaaagactacagacctgattaaggaacacacaactaaatacaatgagattcaaaacgactaccttaggcggagggcagccttagagaaaagcgcgaagaaggactcaaaaaagaagtcggagccatcgagccccgaccacgggagctcaactattgaacaggacctagcggcactggatgccgagatgactcagaagctcatcgatcttaaggacaagcagcaacagcagctgcttaatctcaggcaggaacagtactacagcgagaaataccagaaacgtgaacacatcaagcttctcattcagaagcttaccgatgttgctgaagagtgccagaacaatcagttgaagaagctgaaggagatctgtgagaaagagaaaaaggaactgaaaaagaagatggacaagaaacgacaggagaagatcactgaggcgaagtcaaaagacaaaagccaaatggaagaggagaaaaccgagatgatccgctcatacattcaggaagtcgtgcaatatattaagaggctcgaggaagctcagtcaaagagacaggaaaaacttgttgagaaacacaaggagatacgccagcagattctggatgagaagccaaaattacaagtggagttagagcaggagtaccaggacaagtttaagagactcccactggagattctggagtttgtgcaggaagccatgaagggaaaaatatcggaagatagtaatcacggttccgctcctctgagcctgagcagcgaccccggaaaagtgaaccataaaacgccgtcctctgaggagctggggggcgatattcccggcaaagagttcgataccccgctgtag

SEQ ID NO: 199495 - DNA, 3282 bp, synthetic construct
  misc_feature 1..3282: note = Description of Artificial Sequence: Synthetic coding sequence
  source 1..3282: mol_type = other DNA
acccaggaccccaagctgcgggagctgctggacgtgggcaacatcgggaggctggagcaacgcatgatcacggtggtctatggaccagacttagtaaatattagtcacctgaaccttgtagcttttcaggaggaggtcgccaaggagtggaccaacgaggttttttcccttgccacaaacttactggcccagaatatgagccgggacgccttccttgaaaaggcctacactaagcttaaactgcaggttacccctgaaggtcgcatccccctgaaaaatatttaccggctattttccgcagaccgaaagcgagtcgagaccgcccttgaggcgtgtagcctgccttccagtagaaatgattccattccgcaggaggactttactcctgaggtgtaccgggtctttctgaataacctgtgcccacgccccgagattgacaatattttttcagaatttggtgctaaaagtaaaccctacttgactgtggaccagatgatggactttattaatctaaagcaacgggatccgcggttaaatgagatcctttatccaccactgaagcaagagcaggtccaggttttgatcgagaagtatgagcctaataattctttggcacggaaaggacagattagcgttgatggcttcatgcgttatctgagcggggaggaaaacggagtcgtcagcccagaaaagctggatttaaacgaggacatgtcccagccgctctcacactatttcatcaactcttcgcacaacacataccttaccgcaggtcagctggcaggcaacagcagcgtggagatgtacaggcaagtgcttcttagtggctgcagatgtgtcgagctggactgttggaagggtagaacagcggaagaggagcccgtaatcacgcacggatttacaatgacgactgaaatcagctttaaggaagtgatcgaggcaattgcagaatgtgcttttaagacctctccattccccattcttctatccttcgagaatcatgtggattctccaaagcagcaggcgaaaatggcggagtattgtcgtctgattttcggggatgctctgctgatggagcccctggagaagtacccacttgaatctggggtccccctgccgagcccaatggatcttatgtataagattcttgtcaagaataaaaagaagtctcataaaagtagcgagggaagtgggaagaagaaactctcggagcaggcgtccaacacctactcagattcgtcctcgatgtttgaaccttcctctcctggcgctggcgaggcagatacggaatccgatgatgacgatgacgacgatgattgtaaaaagagctcaatggacgagggaaccgctggaagcgaggctatggccaccgaagaaatgagtaatttagtgaattacatacaacctgtgaagtttgagagcttcgaaattagtaagaaacgcaataagagttttgagatgtcaagcttcgttgaaactaaagggctggagcagttgactaaatctcctgtagagttcgtggaatataataagatgcaactctctcggatttatcctaaggggacaagggtggactcctcaaattatatgcctcagttgttctggaacgccggatgccagatggttgctttgaatttccagacaatggacctcgcgatgcaaatcaatatgggaatgtacgagtacaacggcaaaagtggctatcgcctgaagcccgagtttatgaggcgacccgataaacatttcgacccgtttactgaaggaatagttgacgggatcgtcgctaacacgttgagcgttaagatcatcagtggacagtttctgtctgataaaaaggtgggaacttacgtcgaagtagatatgttcggtctgcccgtggacacgcgccgcaaggcgtttaagaccaaaacctctcagggcaacgccgtgaatcctgtctgggaagaggagcctattgtgtttaaaaaagttgtactgccaaccctcgcctgtctgagaattgccgtctacgaggagggaggaaaattcatcggccatagaatcctgcccgtacaggccatccgccccgggtaccactacatctgtcttagaaacgagcggaaccaacccctgacgctcccggccgttttcgtgtacatagaagtcaaggactacgttccagatacatacgccgatgttattgaagctctgtctaatccaatccgctacgtcaacctcatggagcagcgcgccaagcaacttgctgcactgaccctggaagacgaagaagaggtgaaaaaggaggccgaccctggtgagactccatccgaagctccttctgaggcccggacgacacccgccgagaatggtgttaaccacacaaccaccctgacccctaagccaccttcacaggctttacactctcaacctgccccaggatctgttaaggcgccggctaagaccgaagacctaattcaatctgtattgactgaagtggaggcccagacaatcgaggagctcaagcagcagaagtctttcgtgaaattacagaagaagcattacaaagaaatgaaagatttggttaagagacatcataaaaagaccactgatttgattaaggaacacacaaccaagtacaacgaaatccagaatgattatctgcggaggagagctgccctcgagaaatccgctaaaaaggattctaagaagaagtccgagcctagttcaccagatcatgggagctcgacaatcgaacaagatctggctgcactggacgcagagatgacccagaagctgatagacctgaaggataaacagcagcagcagctgcttaatctacgccaggaacaatactattcagagaagtaccaaaagcgggagcacatcaagctgcttatccagaaacttacagacgtagccgaggagtgtcagaacaaccagcttaagaaacttaaagaaatctgcgagaaggaaaagaaggagttgaagaaaaagatggataagaaaaggcaagagaagatcacggaagccaaatccaaggataaaagccagatggaggaggagaagactgagatgattcgttcttatatccaggaagtcgtacagtacataaagcgtctggaggaggctcagagtaaacggcaggaaaaactcgttgaaaaacacaaagagatcaggcagcagattctggacgagaagcctaagggcgaggggagctcatcattcctgagcgaaacctgccacgaagatccctccgtaagcccaaatttcactccgcccaacccgcaggccctgaagtggtag

SEQ ID NO: 199496 - DNA, 3558 bp, synthetic construct
  misc_feature 1..3558: note = Description of Artificial Sequence: Synthetic coding sequence
  source 1..3558: mol_type = other DNA
atgagcctgctgaaccccgtgctgctgccccccaaggtgaaggcctatctctcgcagggggagagattcattaagtgggacgatgaaactacggtggccagtcccgtcatcctcagagttgacccaaagggttattatctgtactggacgtaccagagtaaagaaatggaatttctcgatattacttcaatccgggatacaagatttggcaagtttgctaagatgccaaaaagccagaagctgagagacgtgttcaacatggatttccccgataactctttcctgcttaagaccctgacggtggttagcggtcccgacatggtggacctgacatttcataattttgtatcttacaaagagaatgtgggcaaggcttgggccgaggatgtgctggcacttgttaaacatcccctcaccgccaacgcctcgaggtccacttttttagacaaaatcttggtaaaactcaagatgcagcttaactctgagggcaagattcccgttaagaacttcttccagatgttccctgccgaccgtaagagagtggaggctgctttatctgcctgccacttaccaaaaggcaaaaacgatgcaatcaaccctgaggatttccccgagcctgtatacaagagtttcctcatgtcactctgccctcgccccgagatcgacgaaatctttactagttaccacgccaaggctaaaccttatatgaccaaggagcatctcactaagttcatcaatcagaagcagcgggatagcagattaaattccctcctgtttcctccagcgcgccccgaccaagtgcagggtctgattgataaatatgagcccagcggaattaacgcccagagggggcagctctcacctgagggcatggtgtggtttttgtgcggtcccgagaattccgttcttgctcaggacaaactcctactccaccacgatatgactcagccccttaaccattattttattaattcgtcacataatacttacttgacagccgggcaatttagtggcctgtcctccgcagaaatgtatagacaagtgttgctgtctgggtgccgttgcgtggaactggattgctggaagggaaaacccccagatgaggagccaattatcactcatggctttactatgaccaccgacatcttttttaaagaggcaatagaagccatcgcggaaagcgcgtttaaaacgagcccatatcccatcattctgagcttcgagaaccacgtggacagcccgcggcaacaggccaaaatggcagaatattgccgcacaattttcggcgacatgctgctgacggagcccctggagaaattccccctgaaacctggcgtgcctctgccgagtccagaagacctccgcggaaaaatacttattaagaacaaaaagaatcaattttctgggcctacatcctcctccaaagacacggggggggaggcggagggctcatcccccccttctgccccggcgggcgagggaaccgtctgggcaggggaggagggcacagagctagaggaagaagaggtggaagaagaggaagaggaagaatctggcaacctcgatgaggaagaaatcaaaaagatgcagtccgatgagggaacagccggtctcgaggtcacagcctacgaagagatgagctccctggtgaactacattcagcctaccaagttcgtgtctttcgagttttccgctcagaaaaatcggagctatgtgatcagcagttttaccgagctgaaagcatatgacttactgagcaaggcctcagtccagtttgtcgattataacaaaaggcagatgtcgaggatctatccaaaaggcacacggatggactcttctaattacatgcctcaaatgttttggaatgcgggatgccagatggtggcgctgaatttccagacaatggatctccccatgcagcaaaatatggccgtatttgagtttaacggacagtccgggtacctgctaaagcatgaatttatgagaagacctgataaacagttcaacccattctccgtggatcggatcgacgtcgtcgttgcaaccactctgagtattaccgtcattagcggccagttcttgagtgagaggtccgtgcgcacatacgtggaggtggagctgtttgggttgcctggtgaccctaagagacggtatagaactaagttgtctccttcgacaaacagtatcaatcctgtatggaaagaggaaccttttgtctttgagaaaatcctgatgcccgagttggcatctctccgggtggccgtgatggaggaggggaacaagtttctgggtcacaggattatccccatcaacgccttaaacagcggctaccatcacctgtgtttgcacagcgaatcaaatatgcctttgacaatgccagcactcttcattttccttgaaatgaaggactacatccctggcgcttgggccgacttaactgtggccctggccaatccaataaagtttttttctgcacatgacacgaaaagtgtgaagctgaaagaggcgatgggggggcttccagaaaaaccttttcccctggctagcccagtcgcctcgcaagtgaatggggctcttgcaccgacttcgaacgggagccctgccgccagagctggcgcccgtgaggaggcgatgaaggaggctgctgagcctcggacggcgtccctggaggaactgcgtgagctcaaaggagtcgtgaagctgcaaaggcgtcatgagaaagaactgagggagctcgaaagaaggggggcccgtaggtgggaggaactcttgcaacggggcgccgcccagcttgccgaactgggccctcccggggtagggggggtaggagcatgtaaattgggtccagggaagggtagcagaaaaaaaaggtccctccccagagaggagtccgccggagccgccccaggggagggccctgaaggagtcgacgggcgggtgagggagcttaaggatcggctggaactggaactgctgcggcagggcgaggagcagtacgagtgcgtcctgaaaaggaaggagcagcacgtggccgagcaaatttccaaaatgatggaactcgcccgggaaaaacaagcggcagaactgaaggctttgaaggaaacctcagagaacgatacaaaagaaatgaagaaaaaattggagaccaagcgccttgagaggatccagggcatgacaaaggttaccactgacaaaatggcgcaggagagacttaagcgggagattaataactcacacatccaagaagtcgttcaagtgataaaacaaatgaccgaaaacctggaaaggcatcaggagaagttggaggaaaagcaggctgcgtgtctagagcagatacgcgagatggagaagcagttccagaaggaggcgctggcggagtacgaggcgagaatgaagggcttggaagctgaggtgaaggaatcagtacgggcatgcctgaggacctgcttcccatcggaagcgaaggataaaccagaaagggcatgtgagtgtccacccgagctttgtgagcaggaccccctgatagctaaggccgatgcccaggagagccgactgtag

SEQ ID NO: 199497 - DNA, 3546 bp, synthetic construct
  misc_feature 1..3546: note = Description of Artificial Sequence: Synthetic coding sequence
  source 1..3546: mol_type = other DNA
atgagcctgctgaaccccgtgctgctgccccccaaggtgaaggcctatctgtcccagggggagaggttcataaaatgggacgatgaaacaactgtcgcatcccctgtcattttgcgcgttgacccaaagggttactatctgtactggacatatcagagtaaggagatggagttcttagatattacctccattagggatacacggttcggaaagtttgccaagatgcctaagtcccagaagttgagggatgtatttaacatggacttccctgataactccttcttacttaagactttaacagtagtgagcggtcctgacatggtggacctgacctttcataacttcgtgagctacaaggagaacgtgggtaaggcatgggcggaggacgtgctggccttggtgaaacatcccctgacagccaatgcttccagatccacctttttggacaaaatcctcgtgaagctgaagatgcaactgaactctgaaggaaagatccctgtaaagaacttctttcaaatgttcccagcagatcggaagcgcgtggaggcggctctgtccgcctgccacctacccaagggcaagaacgacgctatcaaccccgaggatttcccggagcctgtgtataagtccttcctcatgtcactttgtccacgcccagagatcgacgaaatcttcacgagttaccatgcaaaagcaaaaccctacatgaccaaagagcatctgaccaagttcattaatcagaagcagcgcgatagcaggcttaattcactgctttttccgccagcgcgacccgatcaggtgcagggccttatcgacaaatacgagccatccggcattaacgcccagaggggacaactgagcccagaaggcatggtatggttcctttgcggccctgagaatagcgtgctcgcccaagataagttgttgttgcaccacgacatgacgcagcctctcaaccactattttattaatagttcccacaacacataccttaccgccggacaattcagcgggctcagcagcgccgagatgtataggcaggtgcttctgtccgggtgtagatgtgtggaactggactgttggaagggcaaacctcccgatgaggaacccatcattacacatggctttactatgacaacagatatattctttaaagaggccattgaggccatagccgaatctgccttcaagacctccccctaccccatcatcctgagctttgaaaatcacgtggattcccccaggcagcaggccaagatggccgagtactgccggacaatatttggggacatgctccttaccgagccactggagaagttccccctcaaacccggcgtgccccttccgagcccagaagatctccgagggaaaatcctaatcaagaataagaagaaccagttctcaggaccaacttcgagttccaaggatacagggggcgaggccgaaggcagctcccctccttccgccccagccgtgtgggcaggggaggagggcaccgagttggaagaagaagaagtagaggaagaagaagaagaggaaagtggaaatttagacgaagaggagatcaaaaagatgcagtctgatgaggggactgccggcttggaagttacagcctatgaagagatgagctcgctggtgaattacatacagccaactaagttcgtgagttttgaatttagcgcgcagaagaacaggtcatatgtgatcagttcctttacggagctgaaagcttatgacctactttccaaggccagcgtgcagttcgtcgattataataagagacagatgtccagaatatacccaaagggtactagaatggattctagtaattacatgccacagatgttctggaacgcgggctgtcagatggtggccctgaatttccaaacaatggaccttcctatgcaacagaacatggcagtgtttgagtttaacggccagagcggctatttgctcaagcatgaatttatgcgccgccccgataagcaatttaaccccttttccgtggacagaatagatgtggtggttgccaccaccctatcaatcactgtgatcagcggacagttcctcagtgaacgttccgtgagaacttacgttgaggttgagctttttggcctgccaggcgatccaaagcggagatatagaaccaaattgtccccctcgaccaactctatcaatccagtgtggaaagaagaacccttcgtctttgaaaaaatattgatgcccgaactggcaagcttacgggttgccgtgatggaggagggcaacaagttcctaggacatcgcataatcccaatcaacgctctcaattctgggtatcatcacttatgtctgcactctgagtcgaatatgcctctgaccatgcctgcgctctttatttttttggagatgaaggattatataccgggcgcgtgggccgatctgaccgttgccctggcaaacccgatcaagttcttttcagcccatgataccaaatctgtgaagttgaaagaagctatggggggccttcccgagaagccattccccctcgccagtcccgtagcatcccaggttaacggggccttggccccgacctccaatggtagcccggccgctcgggcaggagcacgagaggaggcgatgaaagaagctgccgaacctcggaccgcgtccctggaggaactgagagagctgaaaggggtcgtcaaactccagcgtcgccacgagaaagaattgagagaactggagcgtcggggcgcaagacgctgggaggagttgctccagagaggtgctgctcagctcgccgagctgggccccccgggtgtcgggggagttggcgcgtgcaagctgggccctggaaaagggagtaggaagaaaaggagccttccacgagaggagtcagcaggcgcggcaccaggagagggcccagagggcgtggatgggagagttcgggaactcaaggatcggctggagcttgagcttctgagacagggcgaagaacagtacgagtgcgtcctgaaacggaaggaacaacacgtagctgaacagatctccaagatgatggagctggcccgcgagaagcaggcagcagaattaaaggccctgaaagaaacttccgagaacgacaccaaggagatgaagaagaaactcgaaactaagagacttgagcgaatccaggggatgaccaaggtgacaacggataaaatggcacaggagaggctaaaacgcgagatcaataatagtcatatccaggaagttgtccaagttatcaagcaaatgactgaaaatctcgagcgacaccaggagaagcttgaagagaaacaggccgcttgcctcgagcagattagagagatggaaaagcaattccagaaggaggctctggccgagtacgaagcccgaatgaagggactggaggctgaggtgaaggaatccgtgagggcctgtttgaggacctgttttcccagcgaggctaaggataaaccagagcgcgcgtgcgaatgccctcccgagctgtgcgaacaggacccattgatagctaaagcagacgcgcaagagtcccgcttgtag

SEQ ID NO: 199498 - DNA, 3705 bp, synthetic construct
  misc_feature 1..3705: note = Description of Artificial Sequence: Synthetic coding sequence
  source 1..3705: mol_type = other DNA
atggccggcgcccagcccggcgtgcacgccctgcagctggagcccccaacagtcgtggagaccctaagacgcggatcaaagtttattaagtgggatgaggagacttccagccgcaacttagtcacccttcgcgtcgaccccaatggcttcttcttatactggaccggccctaacatggaagtcgacacgctggacataagcagcatacgagacacccgcactggaagatacgccagactacccaaggaccccaagatcagagaggtgctggggtttggcgggcctgacgcaaggcttgaggagaagctgatgaccgtcgtctctggtccggaccctgtcaatactgttttcctaaattttatggcagtccaggacgacaccgcaaaagtatggtcggaagagttgttcaagcttgcgatgaacatccttgctcagaacgcaagccggaataccttcctgcgaaaagcgtacactaagctgaaactccaagtcaaccaggacggtcgcattcccgtgaagaatattctgaagatgtttagtgccgataaaaagcgtgtggagaccgcactcgagagctgcggcctgaagtttaacagaagtgaatctatccgaccagacgagttcagccttgagatctttgaaaggtttctgaacaagctgtgtctgaggcctgacatcgacaaaatcctattggagataggggctaagggtaagccgtaccttaccctggaacagttgatggacttcataaaccagaaacagcgagacccacgtttgaatgaggttctgtatccgcccctgcgccccagccaggccagactcctcattgaaaagtatgaacccaatcagcagttcctcgaacgtgaccaaatgagcatggaaggtttcagcagatatctggggggggaggagaatgggatcttacccctggaagctttagaccttagcacagacatgacgcagccactttccgcatatttcatcaattcgtctcacaacacctacctgactgcaggacagctagccggaacatcctcagtggagatgtacaggcaggctctgctttggggctgtagatgtgtggaactcgacgtgtggaaagggagaccgcctgaagaagaaccctttattacccatgggttcacaatgactactgaagtgccacttcgggatgtgttagaagccatcgctgagaccgccttcaagacatcgccgtaccctgtgattctctcttttgaaaatcatgtagactccgccaaacagcaggctaaaatggcagaatactgtaggagcatcttcggcgatgccttgctcatcgaacccttggacaagtacccgctggcacccggcgttcctctgcctagtccccaggatctgatgggacgcatcctagtgaagaataaaaagaggcacagaccatctgccggaggaccagattctgcaggccgtaaacggcctctcgagcagtccaatagcgccttgagcgaatcttcagccgctacggaaccatccagccctcagctgggcagcccgtcttcagactcatgccccggcctctcaaacggcgaagaggtggggctggagaaaccaagcctggaaccacaaaagtcccttggcgacgagggattgaacagagggccctacgtgttgggcccagccgacagagaagacgaggaggaagatgaagaggaggaggaacagacggaccccaagaagccaactaccgacgagggcacagctagttctgaagtcaacgctaccgaagagatgtctactttggtgaattacatagagccagtgaagttcaagtcattcgaagctgcccgaaagagaaacaagtgtttcgagatgagtagtttcgtggaaacaaaggccatggaacagctgaccaagtcaccgatggagttcgtggaatacaataagcagcagttgtctcggatctatcccaaaggcacacgggtcgactcaagtaactatatgccccagctcttttggaacgtcggatgccagctcgtagcactgaacttccagaccttagacgtggccatgcaattaaacgccggtgtcttcgagtataacggacgcagtgggtacctcctgaagcctgaattcatgcgacgccctgacaaaagtttcgacccgtttaccgaagttatcgtggacgggattgtcgccaacgcactgcgagttaaggtgatctcaggtcaattcttgtccgacaggaaagttggcatttacgtggaggttgacatgttcgggcttccagtggacacaaggcggaagtaccgaacccggacaagccagggcaattcatttaaccccgtgtgggatgaagaacctttcgactttcccaaggtagttctacccacccttgcgagtcttaggatcgccgcattcgaggagggcggaaaatttgtcgggcaccgtatactgcccgtctccgctattcgatcgggctaccactacgtgtgcctgcggaatgaagcgaaccagccgttatgcctgcctgcgttgcttatctacaccgaggcctcagactacatacccgacgaccatcaggactacgcagaggcactgatcaatccgattaagcatgtgagccttatggatcagcgcgccagacagctggcagctctgatcggggagtcagaagcgcaagccggtcaggagacttgccaggatacacaaagtcagcagctgggttcgcaaccatcatcaaaccctaccccttcccccctggatgcatctccaagaagacccccaggaccaactacgtctcccgcatctacatccctgagctcacctggtcagcgtgatgatctaattgcctccatcctgagcgaagtggcccccacgcccctcgacgagctccgggggcacaaggctttggttaaactgcgcagcaggcaggagcgtgatctcagagagctgcgcaagaagcatcagcgcaaggccgtgacgctgactcgccggcttctggacggactcgcccaggcgcaggctgagggaaggtgtcgcttgcggcccggggcactgggcggcgctgcagatgtagaggacactaaagagggcgaagacgaggccaaaagataccaggaattccagaaccggcaagtccagtctctgctcgagttaagagaggctcaagtggatgctgaggctcagcgaaggctggagcatttacgtcaagcactgcagcgccttagagaagtggttctggatgccaacactacgcagtttaaaagacttaaggagatgaatgagcgagaaaaaaaggaactgcagaaaatattggatagaaagcgacataactcaatttcagaagcgaaaatgagggacaagcataagaaagaggctgaactcactgagattaatagaagacacatcactgagtctgtgaacagtatacggcgactggaagaagcccaaaagcagagacatgacaggttggtcgccggacagcaacaggtgctgcagcagcttgctgaggaggaacctaagcttctggcccagttagcccaggagtgccaggaacagcgcgcacgtctgccccaggagatccggaggtccctgctaggcgagatgcctgagggcttaggcgacggacccctggtggcttgcgcaagcaacgggcatgcacctgggagcagcggccacctcagtggggccgacagtgagtctcaggaggaaaacacccaactgtag

SEQ ID NO: 199499 - DNA, 3705 bp, synthetic construct
  misc_feature 1..3705: note = Description of Artificial Sequence: Synthetic coding sequence
  source 1..3705: mol_type = other DNA
atggccggcgcccagcccggcgtgcacgccctgcagctggagcccccaaccgtggtggagaccttaaggcgaggctctaagtttatcaaatgggatgaggaaacatcctcccgcaatctggttactctgagggtggatcctaacgggttttttctctattggacaggcccaaacatggaggtggatactcttgacatctccagcataagggataccagaactggaagatacgcacgactaccaaaggaccctaaaatccgggaggtcctggggttcggcggtcccgacgctcggctggaggagaaactgatgaccgtcgtgtctggccctgatcccgtcaacacagtcttcttaaacttcatggcggtccaggatgacaccgctaaggtctggtccgaagagcttttcaaactggctatgaacatcttagctcagaacgctagccggaacacatttctgagaaaggcctatactaagctgaagctgcaggtcaatcaagacggccgcatccccgtcaagaacatcctgaaaatgttctctgcggataagaaaagggtcgaaaccgcactcgagagttgcggactaaaatttaatagatcagagagcattcggcccgacgaattttcactcgaaatttttgagcgcttcctcaacaaactgtgtctgaggcccgacatcgataagatcttgcttgagatcggcgctaagggcaagccttatctgactctggagcagttgatggattttataaatcaaaaacagagagaccctaggcttaacgaggtgctgtacccgcctctccgtccctcacaagcgaggttgctgatcgaaaagtacgagccaaatcagcaatttttggagcgcgatcagatgtctatggagggcttctctcgttatcttggtggtgaagaaaacggcattctacctctggaagctctcgatctgagcaccgacatgacccaacccctatctgcctactttatcaactcttcgcacaatacatatcttaccgccgggcagctagccggcacctcttccgtggagatgtatcgacaggctctgctctggggttgtcgttgtgtagaactggacgtgtggaaaggaagaccccctgaggaggagcctttcatcacacacggctttaccatgaccacagaggtccccctgcgtgacgttctcgaagccattgccgaaaccgccttcaagaccagcccatacccagttatcctgtcctttgaaaatcacgtcgattctgcgaagcagcaggcaaagatggccgaatactgccgttctatttttggggacgccttactgatagagcccctggacaagtacccgcttgctcctggcgtcccgctgccctccccccaggacctcatgggacgcatcctggtgaagaacaaaaagagacaccggccgtctgccggcgggcccgacagcgcgggaaggaaacgacctctggagcagagcaacagcgccctgagtgagtcatcagcagccacggagccctcgtccccccagttgggatcaccttcgtccgattcgtgtccggggctgtccaatggggaggaagttggactggaaaaaccatctctcgaaccccaaaagagcctgggcgacgaaggcttaaacagaggcccctatgtcctggggccagccgaccgcgaagatgaggaggaggatgaggaagaagaagagcagacagatccgaagaagcctaccacagatgaggggaccgcatccagcgaggtaaatgccactgaagaaatgtctactctcgtgaattacattgagcccgtgaagttcaaatcctttgaggcagcccggaaacgcaataaatgtttcgagatgtctagctttgtagagaccaaagcgatggagcagctgactaaaagccccatggagttcgtggaatataataagcagcagctctctcggatataccctaaggggactcgggtggacagtagcaattacatgcctcaattattctggaatgttggatgccagctcgtcgctctcaactttcagaccctcgacgttgctatgcagcttaacgcaggcgtgtttgaatataacggtaggtctggctatctgctgaaacctgaattcatgcgcaggcccgataaaagcttcgatccattcacagaggtgatcgtggacggtatagtggcgaacgctctacgcgtaaaagtgatatcaggccaatttctctccgacagaaaggttggcatttacgtggaagtcgacatgtttgggctccctgttgacaccaggagaaaataccggactcggacgtctcaagggaactcattcaacccagtctgggatgaagagccctttgatttccccaaagtggttctgcctacactggcctccctgcgaatagccgccttcgaggaaggcgggaaatttgtaggacataggatccttcctgtgagcgccattcggagcggctatcattatgtatgtctgcgcaatgaggctaatcagcccctctgtttgcctgcactcttgatttacaccgaggctagcgattacatccccgacgatcaccaggattacgccgaggcgctcattaatcccataaagcacgttagcttgatggaccagcgggcccgacaactggccgccctgattggcgaatccgaggcgcaagccggccaggaaacttgccaggacacccagagccaacaattagggtctcagccaagctccaatccaacaccatcaccactggatgcctctcccaggcggccccccggcccaacaacatctcccgcttcgacctccctaagctcacctggtcaaagagatgaccttatagccagcatactgtcagaggttgcccctacacccctggatgagctgcgtggacataaagcattggttaagctgaggtctcggcaggaacgtgacttgagagaactccggaaaaagcaccagagaaaagcggttactcttacacggcggctgttggacggtctggcacaggctcaggcggagggaaggtgtcgcttacgccctggcgctctgggcggtgccgcagatgttgaagatactaaggagggggaagatgaggcaaaacgttatcaagagttccagaatcgccaggtccagtctttgttggagctcagagaggcccaggtcgatgctgaggctcaacggcgcctggaacatctccgccaggctctgcaacgcctgcgggaagtggtgctggatgctaataccacacagtttaagaggctgaaggagatgaatgagagggaaaagaaggaactccagaaaatcctggataggaagaggcacaattccattagcgaagccaaaatgcgcgacaagcacaagaaggaagccgaattaacagaaataaaccgacgccacatcactgagagtgttaatagtattcgacgattggaggaggcacagaaacaaaggcacgatagactggtagctggccagcaacaggttctccagcagctcgcagaagaggaacccaaacttcttgcccaacttgcacaggagtgtcaagagcagcgtgccaggttaccccaggaaatccggcgtagcctgctaggtgaaatgcccgaaggcctaggggacggaccgctagtcgcctgcgcttcaaatggccatgcccccggtagcagcggtcatctgtcgggggccgattctgagagccaggaagagaacactcagctctag

SEQ ID NO: 199500 - DNA, 3528 bp, synthetic construct
  misc_feature 1..3528: note = Description of Artificial Sequence: Synthetic coding sequence
  source 1..3528: mol_type = other DNA
atggccaagccctacgagttcaactggcagaaggaggtgcccagcttcctgcaagaaggagccgtgttcgacagatatgaagaggaatctttcgtttttgagcccaattgtttgttcaaggtggatgagttcggcttttttctcacctggcgctcagaagggaaagagggccaggtgctcgaatgttcgctcatcaactccataaggtccggagccatcccaaaggaccccaagattctggccgctctcgaagcggttggaaaatcggaaaatgaccttgagggtcggatcgtgtgtgtgtgcagtggaaccgaccttgtgaatatcagctttacatatatggtagccgaaaatccggaggtgaccaaacagtgggtggaaggcctcagaagcataatacataacttccgcgcgaacaacgtcagcccaatgacgtgcctgaagaagcattggatgaaactggcgtttatgaccaatactaacggaaaaatccctgtcagaagcatcaccaggacatttgcctctggaaaaactgagaaggtgattttccaggctctgaaagagttgggattaccttctgggaaaaacgatgagatagagcccacagcttttagttatgagaaattttatgagttgacccagaaaatttgtccaagaacagacattgaagatttgtttaagaagattaatggcgataaaaccgattacctgaccgtggaccagctcgtctcatttctcaatgaacaccagagagatccccggctcaatgaaattctgttccctttctacgatgcgaagcgtgccatgcaaatcattgagatgtatgagcccgacgaagacctgaagaaaaagggcctcatttctagcgacggtttttgccgctatttgatgagtgacgagaacgcccctgtgtttctggaccgcctcgaactttatcaggaaatggaccacccattagctcattattttatctctagttcacataacacctatctcacagggaggcagttcgggggcaagagttccgtcgaaatgtacagacaggtgctgctcgcgggctgcaggtgcgtagagttagattgttgggacggtaagggtgaggatcaagagcccatcattacccacggcaaggcgatgtgcaccgacatccttttcaaggacgtgatccaggctattaaggagactgcattcgttacatccgagtatcccgtgatactctctttcgaaaatcattgcagcaagtatcagcaatacaagatgtcaaagtactgtgaagatttgtttggagatctcttgctgaagcaggcacttgagtcacaccccctcgagccgggacgcgccttgcccagtccaaatgatctcaagcggaaaattttgatcaaaaataagcggctgaaaccggaagtagagaagaagcagctggaggcactgagaagcatgatggaagctggtgagtctgcaagccccgcaaacatcctggaagatgataacgaggaagaaatagagtcggccgatcaggaggaggaggcgcacccggaatttaagtttggcaacgagctgtcagccgatgatctgggacataaggaggcagttgcaaatagcgtgaagaaaggtctagtcactgtagaggacgagcaggcgtggatggcttcctataaatacgtcggcgcaacaacaaacatacatccatacctgagcaccatgatcaattacgctcagcccgtcaagtttcaggggtttcatgtggccgaagagcgcaacatacattacaacatgtcgtcatttaatgagagtgtgggattgggttacctgaagacccatgcgatcgagtttgtcaattataataaacggcagatgtccaggatatacccaaaaggaggcagggtagactcaagtaattacatgcctcagatcttttggaacgcaggatgtcagatggttagcctgaactatcaaacaccggatctggcgatgcagttgaatcagggtaagtttgagtacaacggatcttgcgggtacctgcttaaacccgactttatgcggcggcccgatcgcaccttcgacccttttagcgagacgcctgtggacggcgtgatagcggcgacctgcagtgtacaggtaatatcgggacagttcctatctgataagaaaataggcacttacgtcgaagtggatatgtacggactgcctacggatacgatccggaaggagtttcgcactcgcatggtaatgaataatgggctcaaccccgtgtacaatgaagaatccttcgtgttcaggaaggtcatcctgccagacctggctgtgctgcggatcgccgtgtacgacgataacaacaaactgataggacagcgtattcttcctctggacggactgcaagccggctacagacatatcagtttgaggaacgaaggaaataagccacttagcctccccacaatattttgtaacatagtcttgaagacctatgtaccagatggcttcggggatattgtagacgctctgtccgatcccaaaaagttcctttcaattactgagaagcgcgctgaccaaatgagagctatgggaatcgagacttccgatattgccgacgtgcccagcgacaccagcaaaaacgataagaagggcaaagcaaacactgccaaagccaatgtgaccccccaatcgagctccgaactgcgtcctacaaccacagctgctctggcgtccggggtggaggccaagaaaggcatagagcttataccccaggtgagaatagaagacctgaagcagatgaaggcatacctgaagcacctgaagaaacaacagaaggagctcaattccctcaaaaagaaacacgcgaaagagcacagtaccatgcagaagctgcactgcacccaagtggataaaatcgtagcacagtacgacaaggaaaagtcaacacacgagaaaatcctggagaaagccatgaagaagaagggcggaagcaattgtctggaaatgaaaaaagagaccgagataaagattcaaacactaacatcagatcacaaatccaaggtgaaagaaatcgtcgctcagcacaccaaagagtggtcagagatgatcaatacacactccgctgaggagcaagagatcagggatctacatctatcccagcagtgcgagctgcttaagaaacttttgattaatgcccatgagcagcagacccagcagctgaagctcagccatgacagggagagtaaggaaatgagggcacatcaggccaaaattagtatggaaaattcaaaagcgatcagccaggataagagcatcaagaataaggctgaacgagaacgacgcgttcgggaacttaatagctccaacacaaaaaaattcttggaagagagaaagcgactggcaatgaaacagagcaaggaaatggatcagttgaaaaaagttcagctcgaacacctcgaattccttgagaaacagaacgagcaggcgaaagaaatgcagcagatggtcaagctggaagccgaaatggataggagacctgccacagtagtatag

SEQ ID NO: 199501 - DNA, 3585 bp, synthetic construct
  misc_feature 1..3585: note = Description of Artificial Sequence: Synthetic coding sequence
  source 1..3585: mol_type = other DNA
atggccaagccctacgagttcaactggcagaaggaggtgcccagctttctccaagaaggagcagttttcgaccgatacgaggaagaatctttcgtctttgaaccaaactgcctgttcaaggttgacgaattcggcttttttctgacctggcgctctgaaggtaaagagggacaggtactggagtgctccctgatcaattctattcggagcggagctattcctaaggatccaaaaatcttggctgcattggaagctgtaggaaagagcgagaacgatcttgaaggaagaattgtgtgtgtgtgttctggcaccgatttggtgaacatatccttcacttacatggttgccgagaaccctgaagtgacgaagcagtgggtggagggtctccgatcgattatccacaactttcgggccaacaacgtgagccccatgacctgccttaagaagcactggatgaaactggcgtttatgacgaacactaatggcaaaattcccgtgagaagtatcaccaggacatttgcgagtggcaaaacggaaaaagtcatttttcaggccttaaaggaactggggctgccgtcaggcaagaatgatgaaatagagcccacggcattcagctacgaaaagttctatgagttgacgcagaagatttgtccccgaaccgacatagaggacctgttcaagaagataaatggggacaaaaccgattatctgactgtggaccaactggtgagttttcttaacgaacatcaaagagaccctcgacttaacgagatccttttcccattttacgatgcaaaaagagccatgcagatcatcgagatgtatgagcccgacgaggacctcaagaaaaaaggtctgataagttctgacggattttgtcggtaccttatgtcggacgagaacgcccctgtttttctggacaggctggaactttaccaggaaatggatcaccctctggcacactacttcatttcatccagccacaatacctatttaactggtaggcagtttgggggaaagtcatctgttgaaatgtatcgccaggtgctcttagccggatgcaggtgtgtggagctggattgctgggacggcaaaggagaagatcaggagcctattatcacccatggtaaagccatgtgcacagacattctgtttaaggatgtgattcaggctataaaggagacggcctttgttactagcgaatatcctgtgattctgtcctttgaaaatcattgtagtaagtaccaacagtacaaaatgtcgaagtactgcgaggacctgttcggagacctcttgctgaagcaggcgctcgagtcccatcccctggagccaggccgcgccctccccagcccgaatgacctcaaacggaagatcctcataaaaaacaaacgcctgaagcctgaagtcgagaaaaagcagctcgaggctctcagatctatgatggaagccggggagtctgccagcccagccaacatcttggaggacgacaacgaggaagaaattgagtcagctgaccaagaggaagaagcccatccagaattcaaattcggaaacgagctctcagctgacgatttgggacacaaggaggccgtcgctaactctgtcaagaagggcctcgttactgtggaagatgagcaggcttggatggcgtcctacaaatacgttggagcaacaacgaacatccatccctatctgtcaacaatgatcaactatgcgcagcccgtaaaatttcagggatttcacgtagcagaggaaaggaatatacactacaatatgtcttcattcaatgagtctgtgggtctcggctatctcaagacacacgccatagagttcgtgaattacaacaagcggcagatgagccggatctaccctaaaggtggccgggtggactcctccaactacatgccacagattttctggaacgccggctgccagatggtaagcctgaactaccagaccccagatttggctatgcagttaaatcaggggaagtttgagtacaatggctcctgcggatacctgcttaagcccgattttatgagacggcccgatagaacctttgaccctttcagtgaaacaccagtagacggcgtgattgcagcaacatgttccgtccaggtaatcagtggtcaatttctgtccgacaagaagataggcacctacgtagaggtggatatgtatgggctacctacggatacaatcaggaaggagttccgcacacgaatggtgatgaacaatgggctgaacccagtatacaatgaagagagctttgtctttcgcaaagtcatcctccccgatctcgccgtccttagaattgctgtgtacgatgataataataagctgatcggccagaggatactacctctcgacgggctacaggctgggtatcgacatatcagcttgcgtaatgagggaaataagccattgagcctgccaactatcttctgtaatatcgtgttaaagacatacgtgccagacggattcggagacatcgtcgatgcactttcagatcctaagaaattcctgtctatcacagaaaagagagcagaccagatgagagcgatgggaatcgaaacatctgatatcgctgacgtgccaagcgacacctcgaaaaatgacaaaaagggaaaggccaatactgcgaaggccaatgttacgcctcaaagcagctccgagctgcgcccaacaaccacagccgcactggcaagtggggtggaagctaaaaaaggaatcgaactgattccacaggtgcggattgaggatttaaagcagatgaaagcctacctgaaacatctcaaaaagcagcagaaagagctaaactccctgaaaaagaagcatgctaaagaacatagtaccatgcagaaacttcactgcactcaagtagacaaaattgtcgcccagtacgacaaagagaaaagcactcacgaaaagatcctggagaaggctatgaaaaaaaaagggggaagcaattgtctcgagatgaagaaggaaactgaaattaagatccagactttgacctctgaccataaaagtaaggttaaggagattgtggcgcagcacactaaggaatggagtgagatgatcaacacacattccgccgaagagcaagagattagggatttgcatctgagccaacagtgcgagctcctaaagaaactgttgattaacgcccacgaacagcagacccagcagttgaagctctctcacgatcgagaatctaaggagatgcgggctcatcaggccaagatttcaatggagaacagcaaagcgattagccaggataagagcattaagaacaaggcggaacgcgagcgcagagtaagggaactgaatagttctaacaccaagaagtttcttgaagagaggaaaagactggccatgaaacagtctaaagagatggatcagctgaagaaagtccagctagaacacttagagtttttggagaagcagaatgagcagctactcaaatcttgtcatgccgtttcacagacacagggggagggagatgctgcagatggtgagattggatcacgcgacggtcctcaaacttcaaacagctccatgaagctccagaatgcaaactag

SEQ ID NO: 199502 - DNA, 3564 bp, synthetic construct
  misc_feature 1..3564: note = Description of Artificial Sequence: Synthetic coding sequence
  source 1..3564: mol_type = other DNA
atggccaagccctacgagttcaactggcagaaggaggtgcccagctttttgcaggagggggccgtcttcgacagatacgaagaagagtctttcgtattcgagcctaattgcctgtttaaagttgatgaatttggatttttcctcacttggagatccgagggcaaggaggggcaggtgctagagtgttctctgataaatagtattcggtccggagccattccgaaggacccaaaaattctagcagcgctggaagcagtgggcaaatccgagaacgatctggaggggaggatagtatgcgtgtgtagcgggacggacttggtgaatatttcatttacatatatggtagctgagaaccctgaggttacaaaacagtgggtcgagggccttcgatcgattatccacaattttcgggccaataacgttagccctatgacctgcctgaaaaagcactggatgaagcttgcctttatgacaaacactaacggcaaaattccagtccgcagcatcacccgaactttcgccagcggcaagactgaaaaagttatcttccaggccctaaaggagttaggactgccttctggcaaaaacgatgaaatcgaaccaaccgcttttagctacgagaagttctacgagctcacacagaagatatgcccaaggaccgatatcgaggacctgttcaaaaagattaatggcgacaagactgattacttgaccgtggaccagctcgtgagttttcttaatgagcatcaacgcgaccctaggcttaacgaaatcttgttcccattctacgacgcgaagagggcgatgcagatcatagagatgtatgagcccgacgaagacctgaagaaaaaggggttaatttcgagtgacggtttctgtaggtacctcatgagcgacgagaacgcacccgtctttctggatcggctggagctgtatcaggagatggaccaccctttggcccactactttatctccagtagtcacaatacatacctcaccggcaggcagtttggaggaaaaagttctgttgaaatgtatcgtcaggtgctcttggccgggtgtagatgtgtggagcttgattgttgggatgggaaaggggaggatcaggaacccatcataacccacgggaaagctatgtgtactgacatacttttcaaggatgtgatccaggcgattaaggaaacggccttcgtaacctcagagtatcctgtgattctgtcctttgagaatcattgtagcaagtatcagcagtacaaaatgagcaaatattgcgaggacttgttcggagacctgttacttaagcaagccttggaatcccaccccttggagcctggcagggcactgccgtctccgaacgatctaaagagaaagattctcataaagaataaaagattaaagcccgaagtggaaaagaaacagttagaggctctccgctctatgatggaggcaggagaatccgcctctcctgctaacatcctagaagatgacaatgaggaagaaattgagagcgccgaccaggaggaggaggcccaccccgagtttaaatttggcaacgagctttccgccgatgatcttggtcataaggaggccgtggctaattcagtcaagaaggctagcgacgatttggaacacgagaacaataagaagggtctggttaccgttgaggatgagcaggcttggatggcctcttacaagtatgtcggggccaccactaatatacacccctacctgagcactatgattaattacgcccagcccgtcaaattccagggctttcatgtggctgaagagaggaatattcattacaatatgagttctttcaatgagtctgtgggattgggttacttaaaaacccacgctattgaattcgtgaactataacaagcgccagatgtctaggatctacccaaaaggcggtcgcgtcgatagtagcaattacatgccccaaattttttggaacgccggttgccagatggtgtcactgaattatcagacgcccgatctggctatgcagttgaaccagggcaaattcgagtacaatgggagttgtgggtacttgttgaagccagatttcatgcggcgccccgacaggacctttgatccgtttagtgagacacccgtggacggcgtaatcgcagccacatgctcggtgcaggtgattagtgggcagtttctgtcagacaaaaagattgggacatatgtggaggtggatatgtacggtttaccaaccgatacgatacgcaaggagttccggaccagaatggtgatgaataacggattaaaccctgtgtacaacgaggaatctttcgtgtttcggaaggttatcctgcccgatcttgcagtgctgcggattgctgtgtatgacgataataacaagttaataggacagagaattcttccgttggatggcctacaggcagggtatcggcacattagcctgcgaaacgagggaaacaagcctctgagtctgcccaccattttctgtaacattgtcctcaagacatatgtacctgacggattcggagatattgtcgatgccctgagcgacccaaagaagttcctgtctattactgaaaagcgggccgaccagatgagggccatggggatcgagacaagcgacatagctgatgtgcctagcgatacaagtaagaatgacaaaaaagggaaagctaacaccgccaaagccaacgtgacccctcagtcaagctcagagctccggccgactacaacagccgcattggcaagcggcgtggaagctaagaaaggcattgagctaattccgcaggttaggatcgaggacttgaaacaaatgaaagcctatctcaagcatctcaaaaagcagcagaaagaactcaactccctgaagaagaaacatgccaaggaacactccaccatgcaaaaacttcattgtactcaggtggacaagattgtggcccagtatgataaagagaagagcacacacgaaaaaatcttagagaaagctatgaagaaaaagggcgggagcaattgcctggagatgaagaaggagactgagatcaagatacagaccttgacctccgaccacaaaagcaaggttaaagagattgtcgcccagcacaccaaggaatggagtgagatgattaacacgcattcagccgaagagcaagaaatccgggacctgcacctgtcccagcagtgcgagctgctgaagaaactgctaatcaacgctcacgagcaacagacacagcaattaaagctctcccacgacagggaatctaaggaaatgcgcgcacaccaagccaagatctctatggaaaattcgaaggccatttcccaggataagagcattaagaacaaggcagagagggaacgtcgggtgagagagttgaatagcagcaacactaaaaaatttctggaagagcgcaaacgtcttgcaatgaagcagtccaaagagatggaccagctgaagaaggttcagctggagcacttagagttcctagagaaacagaatgagcaggccaaagaaatgcagcaaatggtgaaactcgaggccgaaatggatcgccgcccggccactgtggtttag

SEQ ID NO: 199503 - DNA, 3528 bp, synthetic construct
  misc_feature 1..3528: note = Description of Artificial Sequence: Synthetic coding sequence
  source 1..3528: mol_type = other DNA
atggccaagccctacgagttcaactggcagaaggaggtgcccagctttctgcaagagggagctgtctttgacaggtatgaagaggagagtttcgtcttcgaaccaaactgtctttttaaggtggatgagtttggattttttctcacatggaggtccgagggcaaggagggtcaggtgttggagtgtagccttattaattccattcgcagcggcgccatccccaaagatccaaagatcctcgcagcactggaggccgtgggcaagtcagaaaatgatcttgaaggcagaattgtgtgtgtttgctctggaaccgacctcgtaaacatctcttttacatacatggtagcggaaaaccctgaggtaaccaaacagtgggttgagggcctgagatctataatacataacttccgcgctaataacgtgagcccaatgacatgcttgaaaaagcattggatgaagcttgcctttatgacgaacacaaacgggaaaataccagtgagatccattactcgcacatttgcttccggtaaaaccgagaaggtgatctttcaggctcttaaagagttggggctcccatctggtaaaaacgatgagatcgagccaaccgccttctcctacgagaagttttacgagctcacacaaaaaatttgtccaaggacagacatcgaggaccttttcaaaaagattaatggagacaagacagattacctgacagtcgaccagttagtgagtttcctgaacgaacaccaacgggacccgcgtcttaatgaaattctattccctttttatgatgcaaagagggctatgcagatcatcgagatgtacgaaccagacgaggatctaaaaaaaaaggggctcatttccagcgacggcttctgccggtaccttatgagtgacgagaacgcgccggtgttcctggaccggctggaactgtatcaggaaatggaccaccctctcgcacattacttcataagctcctcacacaacacgtacctgacaggaagacagttcggaggaaaatcttctgttgagatgtatcgccaggtcttgctggcagggtgcaggtgtgtcgaattggactgctgggacggcaagggggaggatcaggagccaattattacacacggaaaagccatgtgcaccgacatcctgtttaaggacgttattcaagcaattaaagagactgcattcgtcactagcgagtatccagtgatcctcagtttcgagaaccactgttccaagtaccagcagtacaagatgtccaagtattgtgaggacttatttggggacctcctactgaagcaagcactggagagccatccgctggagccggggcgagccttgccgagtccgaatgacctgaagagaaaaatattaattaagaataaacggctgaaacctgaggtggagaaaaaacagttagaggccctccgaagcatgatggaagctggcgagagtgccagtcctgccaacatcctggaggacgacaatgaagaggagattgagtcagctgaccaggaggaagaagcccaccctgagtttaagtttgggaacgaactgtctgccgacgacttggggcataaggaagccgtcgccaattcagtgaaaaaagggttggtgactgtcgaggacgaacaggcctggatggcctcttacaagtatgttggtgctactaccaacatccatccctatttatctacaatgattaactacgcccagcctgttaagttccaggggttccacgtcgcggaggaacggaacattcactataacatgtcatcatttaatgaatccgtgggcctcggatatctgaaaacccatgcaatagagttcgtcaattataacaaacgtcagatgagtcgcatatacccaaaaggcggtagagtggattcctctaattatatgccacagattttctggaatgccggctgccagatggtaagtctgaactaccagactccagatctggccatgcaactgaaccagggtaagtttgagtacaacggctcctgtggttacctcctcaagccagacttcatgcgtagacccgatagaacctttgaccctttttcagagacaccggtggatggtgtcatcgcggccacatgcagtgtacaggtgatttcaggacagttcctctccgataagaagatcggcacatatgttgaggtagacatgtatgggctgccaaccgacactattcgaaaggagtttaggacccgaatggttatgaacaacgggctcaatcccgtctataacgaggagtcattcgttttcaggaaagtgatcttacccgatctcgccgtcctccgaatcgctgtttacgacgataacaacaagctcatcggacagaggatactaccactcgatggactccaggcagggtatcggcacatcagtctgcgaaatgagggcaataaacccctcagtttaccaacgattttttgcaacatagtgctgaagacttacgtccctgacgggttcggtgacattgtagatgcgctatctgaccctaagaaattcttgtctataacagagaagagagccgatcagatgagagcgatgggcattgaaactagcgacatcgccgatgttccttcagatacgagtaagaacgacaagaaaggaaaagcaaacactgccaaagctaacgtaactcctcagagttcctccgaattgagacctaccaccaccgccgcccttgcttcgggcgtcgaggctaagaagggcatagaactgatcccccaggtcaggattgaagacctcaagcagatgaaggcctacctcaagcatctgaagaaacagcagaaagagctcaattctttgaaaaagaaacatgcaaaagaacacagcactatgcaaaaactgcactgcactcaggttgacaaaattgtcgctcagtacgataaggagaagtccacacatgaaaaaatcttggaaaaggcaatgaagaagaagggtggctctaattgcctggagatgaagaaagaaactgagattaaaatccagactctgaccagtgaccacaagtctaaggtgaaggagatagtcgctcagcacaccaaggagtggtccgagatgatcaatacacatagcgcagaagagcaagagattcgggatcttcacctttctcagcagtgcgaactgctgaaaaagctgctgattaatgcacatgaacagcagacccagcagctgaagctgtctcacgatagagaatccaaggagatgagagctcatcaagcgaagatcagtatggaaaactcaaaggcaatctcacaggataaaagcatcaaaaacaaggctgaacgtgagcgaagagtgagagagctgaacagcagtaatacgaagaagtttctggaagaacgcaagagactggccatgaaacagtcaaaggaaatggatcaactgaagaaagttcaactcgaacatttggagttcctcgagaagcagaacgaacaggcaaaggaaatgcagcagatggtgaagctagaggctgaaatggaccggaggcccgctaccgtggtttag

SEQ ID NO: 199504 - DNA, 3585 bp, synthetic construct
  misc_feature 1..3585: note = Description of Artificial Sequence: Synthetic coding sequence
  source 1..3585: mol_type = other DNA
atggccaagccctacgagttcaactggcagaaggaggtgcccagctttctgcaggagggcgccgtttttgaccggtacgaagaagaatcattcgtatttgagccgaattgcctgttcaaggttgacgaatttgggtttttcctaacctggaggtctgaagggaaagaaggtcaggtgctggagtgctcactgattaacagtatcagatccggagctattcccaaagaccccaagattctggccgctctcgaagcagtcggtaagtctgagaacgacttagagggcaggatcgtatgtgtgtgttcgggaaccgatcttgtcaatatttctttcacatacatggttgccgagaatccagaagttacaaaacagtgggtcgagggtctgagatcaatcatccacaacttcagagctaacaacgttagtcccatgacctgtctgaaaaaacattggatgaagctggcttttatgactaatacaaacggcaaaatcccagtacgtagcatcaccagaacctttgctagcggcaagactgaaaaagtgatcttccaggctctgaaggaactcggcctgcccagcggcaaaaacgacgaaatcgagcccaccgccttttcctatgagaagttctatgaactgactcagaagatttgcccccggaccgatattgaggatttattcaagaaaattaacggggacaagactgattacctgaccgtggatcagctggtcagctttctgaatgagcaccagagggaccctagactgaacgaaatcctgttccccttttatgacgccaaacgggccatgcaaatcatcgagatgtacgagcccgacgaggaccttaagaagaaaggtttaataagcagcgacggtttctgtcggtatctgatgtctgacgaaaatgccccagtctttttagaccgattagagctgtatcaggagatggatcatccactggcgcactacttcattagctcgagccacaacacataccttactggacggcagttcggtggcaagtcttcagtcgagatgtaccgacaagtgttgttggccgggtgccgttgcgtggagcttgactgttgggatggcaaaggggaagatcaggaaccgataatcacacacggtaaggcgatgtgcacggatatactgtttaaagacgtgattcaggctattaaagagaccgcattcgttacctccgaatacccggtgattctgtccttcgagaatcactgctcgaaataccagcaatataagatgtcaaaatactgtgaagacctctttggagatctcctgctgaagcaggctctggaatcgcatcccctcgagcctggccgtgcgctgccttcgcctaacgatctgaaaagaaagatccttatcaagaataagcgactaaagcccgaagtggaaaagaaacagttggaagccctcaggagtatgatggaagcaggcgagtccgctagccctgctaacattctggaagacgataacgaggaggagattgaaagcgccgatcaggaggaggaagcccacccggagttcaagtttgggaacgaactgtccgctgatgatctggggcacaaggaggcggtagccaacagtgtcaagaagggcctggtgactgtggaagatgagcaggcatggatggcaagctacaaatacgttggggccacaacaaatatccacccctacctgagcaccatgattaactacgcacagccggtgaaattccaggggttccacgtcgccgaagagaggaatatccactataacatgagcagcttcaatgagagcgtggggctcggctacttgaagacccatgcaatcgaatttgttaactataacaagcgacagatgtcacggatctatccaaaagggggtcgcgtcgatagtagtaattatatgcctcagatattttggaatgccggctgccagatggtgagcctgaattatcagacaccagacctggcaatgcagttaaatcaggggaagttcgagtataacggcagctgcggatatctcctcaagcctgactttatgaggagacctgaccgaacttttgacccctttagtgaaacgccagtggacggagtcatcgcagcaacttgcagtgtgcaagtgattagtgggcaatttttgagcgataaaaaaattggcacttacgtcgaagtggatatgtatggcctacctaccgacaccattcgcaaggagtttcgaactcggatggtaatgaataacggactgaatcctgtatacaatgaagaatcatttgtttttcgtaaagtgattctcccagatctggccgtactgcgcatcgccgtgtacgatgacaacaataagctaataggccaacgcattctacctttggatggacttcaggccggataccggcacatatccctaagaaatgagggtaacaaaccccttagcttgccaactatcttttgtaatatcgttctaaaaacttacgttccagatggctttggcgacattgttgacgcactttccgatccaaagaagtttttaagtattacagaaaaaagagcggatcagatgagggcaatgggcatagaaacatctgatatcgctgatgttccctctgatacatcgaaaaacgacaaaaagggaaaggccaatactgccaaggccaatgttacgccccagtcatcctccgaactaaggccaacaacaaccgccgcccttgcatctggtgtggaggcaaagaagggtattgagctcataccccaggttagaatcgaggacttgaagcagatgaaagcttaccttaagcatttgaagaaacagcagaaggaacttaacagtcttaaaaaaaaacacgcaaaagagcactctacaatgcagaagctgcactgtacacaggtggacaagattgttgcccagtatgacaaggagaaatccacccacgaaaagatcctggagaaggcaatgaaaaaaaaaggtggctcaaactgtctcgaaatgaagaaggaaactgagattaaaatacaaactctcacctcagaccacaagtccaaggttaaagagattgtggcccagcatactaaggaatggagcgaaatgattaatacgcactccgcagaagagcaggagattcgggaccttcacctgtcccagcagtgtgaactgctgaaaaaactcctgattaacgctcacgagcagcaaactcagcagctaaaactgagccacgaccgggagagcaaagaaatgagggcgcaccaggctaagatttccatggagaattcaaaggccatctcccaggacaagtccattaagaataaagccgagcgagaacgacgcgtacgagagctcaactcgtcgaacaccaaaaagttcctcgaggagcgcaagcgactggcgatgaaacaaagtaaggagatggaccagctgaaaaaagttcagctagaacacttagagtttttagaaaagcagaacgaacagctgcttaaatcatgtcacgccgtgagccagacccagggggagggcgacgcggctgatggagagatcggctcgcgagatggacctcaaacctccaactcatcaatgaaacttcagaatgccaattag

SEQ ID NO: 199505 - DNA, 342 bp, synthetic construct
  misc_feature 1..342: note = Description of Artificial Sequence: Synthetic coding sequence
  source 1..342: mol_type = other DNA
atggccaagccctacgagttcaactggcagaaggaggtgcccagctttcttcaagaaggggcagtctttgatcgctatgaagaggaatcctttgtgtttgagcctaactgcctctttaaagtagacgaatttggtttcttcctgacatggcgctcagagggaaaggagggccaggtgttggaatgtagtctcattaatagcatcaggtcaggtgctatacccaaagatcctaaaatcctggctgccctggaggccgtcggaaaatccgagaacgatctggagggtagaattgtgtgcgtgtgctcaggcactgacctggtcaacattagctttacttattag

SEQ ID NO: 199506 - DNA, 3072 bp, synthetic construct
  misc_feature 1..3072: note = Description of Artificial Sequence: Synthetic coding sequence
  source 1..3072: mol_type = other DNA
cccgtgcggagcatcacccggaccttcgccagcggcaagaccgagaaggtaatcttccaggccctgaaagagctgggccttccgtctggaaagaacgatgagatcgagccgacagccttcagttatgagaagttttacgaactcacacagaagatctgtccccgaaccgatattgaagacctattcaagaagattaacggggacaagacagactatctgacggtagatcagctcgtctcattcctgaatgaacaccaacgggatccccggctgaatgagatcctcttcccattctacgatgctaaacgtgctatgcagatcatagagatgtacgagccagatgaggatttaaagaaaaaagggttgatatcctctgacggtttctgcagatatctaatgagtgatgagaatgcaccagtgtttctcgatagactggagttgtaccaggagatggaccatccactggctcactactttatcagttctagccacaatacctatctcaccggccggcagtttggagggaagtcaagtgtcgagatgtatcgccaggtactattagccgggtgccgatgcgttgaacttgactgttgggacggaaagggcgaagaccaggaacccattatcacccacggcaaggcaatgtgcacagatatcttatttaaggacgtgatccaggcgatcaaggagactgccttcgtgacttctgaatacccagtgattctgagtttcgagaaccactgcagcaaataccagcagtacaagatgtcaaagtattgcgaggatctctttggcgacctactcttaaagcaagcattagaaagccacccactggagcccggaagagccctccccagtcctaacgacctgaaacgcaagatccttatcaagaataaacggttgaaacctgaggtagaaaagaaacaattggaagctctgaggtctatgatggaggctggagagtccgccagtccagctaatatactggaggacgacaatgaggaagagattgaatcagccgatcaggaagaggaggcccacccagagtttaagtttggaaatgaactgtctgcggatgacctgggacacaaagaggctgtggccaactctgtcaagaaggcctcagacgatctggagcatgagaacaacaaaaaagggctagtgaccgtggaggacgagcaggcgtggatggcctcttataaatacgtgggcgccacgaccaatatacacccttatctgagcacaatgattaattacgctcagcctgtgaaatttcagggcttccacgtggctgaggagagaaatattcattacaacatgtcctcttttaatgaatccgttggcctaggttatctgaagacccacgccattgaattcgtgaattacaacaaacgacagatgtctcgcatttacccaaagggggggcgagtcgactcatcaaattatatgccccaaattttctggaacgccggctgtcaaatggttagtctcaattaccaaacacccgacctagctatgcagctcaatcagggaaaattcgaatataacggctcgtgcggctatctcctcaagccagatttcatgcggcgacctgaccgcacctttgatccctttagcgaaacccctgttgatggagtgatcgctgctacatgcagcgttcaggtgatttccgggcagtttctatctgacaagaagataggtacctatgtcgaagtggacatgtatggtctgcccacagacacaataagaaaagagtttcgtacccggatggttatgaataacgggctcaatcccgtttacaatgaggaaagttttgtgttccgcaaggtaattctgccagatctcgccgtcctgcgaattgccgtatatgacgacaataataaacttatcggccagagaattctgccgctggacggcctgcaggctgggtatcggcacatctccctgaggaacgaaggcaacaagccactgtctctgcctactattttctgtaatatcgttctgaaaacctatgtccctgatggatttggggacatcgtggacgctctcagtgatcccaaaaagttcttgagtatcactgagaagagggcggaccagatgagggccatgggcatcgagaccagtgatatcgcagatgtgccttccgataccagcaaaaatgacaaaaaggggaaggctaatactgccaaggccaatgtgaccccacaatcttcttccgaactgcgtccaacaacgaccgcagccctcgcttcgggcgtggaagccaaaaaagggatcgagttgataccccaggtgcgaattgaagacctgaaacagatgaaggcatacctcaagcatttgaagaagcagcagaaagaactcaactcgttgaaaaaaaagcacgccaaagagcactccaccatgcaaaaactgcactgcacccaagtggacaagattgtcgcacagtacgataaagagaaaagcacccacgaaaagatcctggagaaagccatgaaaaagaagggcgggtcaaactgcttagaaatgaagaaagagacagagattaaaattcagaccctgaccagcgatcataagtcgaaagtcaaggagatcgtggcccagcatacgaaggagtggtctgaaatgatcaacacgcactccgcagaggaacaggaaattagggatctacatctgtcacagcagtgcgagttgctaaagaagttgctgattaatgcccacgaacagcagacccagcagttgaagctgagccatgatagggagtctaaagagatgagggcacaccaggccaagatttccatggagaacagcaaagcgattagccaggacaaatcaattaagaataaagcggaaagggaaagaagggtgcgcgaactgaactcctcaaacacaaaaaaatttcttgaggagcgcaagcggctcgctatgaaacagtctaaagagatggaccaactgaagaaggttcaactggagcacctggagtttctcgaaaaacaaaacgaacaagccaaagagatgcagcagatggtcaaattggaagccgagatggataggagaccagctacagtggtctag

SEQ ID NO: 199507 - DNA, 183 bp, synthetic construct
  misc_feature 1..183: note = Description of Artificial Sequence: Synthetic coding sequence
  source 1..183: mol_type = other DNA
atggccaagccctacgagttcaactggcagaaggaggtgcccagcttcctccaggaaggtgccgtgttcgacaggtacgaagaagagtcattcgtgtttgaaccgaactgtctatttaaagttgatgagtttggtttttttctgacttggaggtccgagggcaaggagggtcaggtcttgtag

SEQ ID NO: 199508 - DNA, 246 bp, synthetic construct
  misc_feature 1..246: note = Description of Artificial Sequence: Synthetic coding sequence
  source 1..246: mol_type = other DNA
atggccaagccctacgagttcaactggcagaaggaggtgcccagcttcctgcaggagggggcagtatttgaccggtatgaggaggagagtttcgtgttcgaacccaattgcttgtttaaggtcgacgagttcgggtttttcctgacgtggaggtccgaaggcaaagagggccaggttttggaatgcagcctcatcaatagtatacgctcgggagccatacccaaagaccctaagattctcgcttag

SEQ ID NO: 199509 - DNA, 333 bp, synthetic construct
  misc_feature 1..333: note = Description of Artificial Sequence: Synthetic coding sequence
  source 1..333: mol_type = other DNA
atggccaagccctacgagttcaactggcagaaggaggtgcccagcttcctccaggaaggggctgtatttgaccggtacgaggaagagagcttcgtgttcgaaccaaactgcttattcaaagtcgacgagtttggattcttcctcacttggcgcagcgagggaaaagaaggccaggtgttggaatgttcgctgattaactctatcaggtcaggtgccattccaaaggaccctaagatcctggcagctctagaagctgtgggcaaatccgagaacgacctggagggcaggatcgtctgtgtgtgttcaggtactgaccttgttaacatctcctag

SEQ ID NO: 199510 - DNA, 2271 bp, synthetic construct
  misc_feature 1..2271: note = Description of Artificial Sequence: Synthetic coding sequence
  source 1..2271: mol_type = other DNA
atggacagcggccgggacttcctgaccctgcacggcctgcaggacgacgaagatctgcaggccctgcttaaagggtcccagctcctcaaggtgaagagctccagctggagaagggaaagattttataagctccaggaggattgtaaaacaatttggcaggaatcgcgaaaagtgatgcgcacaccagaatctcagctgttttccatagaagatatacaagaagtgcgaatgggccaccgaaccgaggggttagagaagttcgctcgtgacgtgccagaagacagatgtttttccatagtctttaaggatcagagaaacaccctggatctcatcgccccttcaccagccgatgcccaacattgggtacttgggctgcacaagatcattcatcactccggctctatggaccagcgccagaagctgcagcactggatccactcttgccttcgaaaggccgacaaaaacaaggacaacaaaatgagcttcaaagagctgcagaacttcttgaaagagctcaatatccaggtggacgattcttacgcacggaagatttttagagaatgcgatcattctcagaccgacagtctcgaggatgaagaaatagaagccttctacaagatgctgacacagcgggtcgagatcgatcggaccttcgccgaggccgcaggctctggcgagactttatcagtggatcagttggtgacattcttacagcaccagcagcgagaggaagccgcgggcccagctcttgcgctgtcgctgattgaacgatacgaacccagcgagacagcaaaggctcaaagacagatgactaaggatggattcctcatgtacctgctcagcgcggatgggtcggcgttcagcctggcacacaggcgggtctaccaagatatggggcagccactgagtcattacctggtttcatcctcccacaatacatacttgctggaagatcaacttgccggaccctctagtacagaagcctatatccgggcgctctgtaaaggatgtaggtgcctggagttagactgctgggacggccctaatcaggagccgattatttaccatggctatacatttacatcaaagattctcttttgcgacgtgctgagagcaatcagagattatgccttcaaagcttcaccctacccggtgattttgtcattggagaaccactgcaccctcgagcagcagcgcgttatggccaggcatcttcacgctatcctcggtccgatgctacttaaccggcctcttgacggggtgacgaactccctgccgagcccagagcagctgaagggtaaaatcctgttgaaaggtaagaagctgggcggacttctcccaccggggggcgagggcggccccgaggctactgtcgtgagcgacgaagacgaagctgccgaaatggaggacgaagccgtgcgcagccgggtccagcacaaacctaaggaagacaaattgaggctggcccaggagctttctgatatggtgatatattgcaagtcagttcactttggcggcttttcctcaccgggcactcctggacaggccttctacgagatggcatctttcagcgagaacagagctttacggctgcttcaggaatccggaaatgggttcgtacgccataacgttggtcatctctcaagaatctaccctgcaggctggcggaccgatagcagtaattatagccccgttgagatgtggaatggcggctgccagatcgtagcactgaatttccagacccctggaccggagatggatgtttatcaaggacggtttcaggataatggcgcctgtggttatgtcctcaagcccgcatttcttcgcgatccgaatggcacctttaacccccgcgctctggcccagggcccctggtgggccaggaaacgcctgaacatcagagtgatcagtggccagcaacttcccaaggtgaacaaaaataagaattccatcgtggacccgaaggtcactgtagagatacacggcgtgagtagggacgttgccagcaggcagaccgcagttatcacgaacaacggattcaacccatggtgggataccgagtttgctttcgaggtagtcgttcccgatctagcactcattaggttcctggtcgaggattacgacgcgtctagcaaaaacgacttcattggccagagcaccattccgctaaacagcctcaaacaggggtataggcacgtgcatctcatgtccaaaaatggcgatcaacacccatcagctacacttttcgttaagatctccctccaggattag

SEQ ID NO: 199511 - DNA, 2334 bp, synthetic construct
  misc_feature 1..2334: note = Description of Artificial Sequence: Synthetic coding sequence
  source 1..2334: mol_type = other DNA
atgcagtgcctgggcatccggagccggagccggagccgggagctgtacttacaagaaagatctctgaaagtcgcagcactgaacggaagaaggctagggctacaggatgatgaggatctccaggcgctgttaaagggctctcagctcctcaaagttaagtcttccagctggaggagagagcggttctataagctacaggaagattgcaagacaatatggcaggaaagccggaaggtaatgcggacacccgagagccagctgttctctatcgaggacatccaagaagttagaatgggccaccgtacggaaggccttgaaaaattcgccagagatgtgcctgaggaccgctgcttttcaattgtcttcaaagatcaacgcaatacgctggaccttattgctccatcccccgctgacgcccaacactgggttctgggacttcataaaatcatccaccactcggggagcatggaccagaggcagaagcttcaacactggatccacagctgcctgaggaaagctgacaaaaataaggataataagatgtcctttaaggagcttcagaactttcttaaggagctgaacattcaggtagatgacagttacgcgcgcaagatcttcagagagtgtgatcactcacagactgatagtctggaggacgaggaaatagaggcgttctataaaatgctcactcagcgcgtggagattgacagaacgttcgctgaggctgccggcagtggggaaaccttatctgttgaccagctggtcacgttcttgcagcatcaacagcgggaagaagcagctggccccgctcttgctttatcactcattgaaaggtacgagcccagcgaaactgccaaggctcagcgtcagatgacaaaggatggtttcctaatgtacctgctctctgccgacggaagcgctttttctctcgcccacaggcgcgtctatcaagacatgggccagcccctctctcattatctggtgtctagcagtcacaacacctatctcctcgaggaccagttggccggcccaagttccaccgaggcttatattcgggcactttgtaaaggctgtcgctgcctcgagctagactgctgggatggccccaaccaagagccaattatctatcatggctacacctttacctccaaaattctgttctgtgacgtattgagggccatcagggactatgcttttaaggcaagtccctaccctgttatcctgtccctggaaaaccactgcaccctcgagcagcagcgcgtaatggcaagacacctgcatgcgatcttgggccccatgctcctgaacagaccacttgatggagtgaccaattctctcccaagtcccgagcagctgaaaggcaagatactacttaagggaaaaaagttaggcgggctgctgcctcctggaggagagggtgggcccgaagccaccgtagtaagcgacgaggatgaggcagctgaaatggaagacgaggccgtcagatctagggttcagcacaagcccaaagaagacaagttgagactcgcccaggagttgtccgatatggtgatctattgcaagtcagtgcacttcgggggtttttcaagtccagggacccctggtcaggctttttacgaaatggccagtttttcagagaaccgagctttacgcctattacaggaatctggtaatgggtttgtgcggcacaacgtgggccatttgtcacgcatatacccggctggatggaggactgactcatctaattattctcctgtcgaaatgtggaatggcgggtgccagatcgtggctctgaatttccagacccccggcccggaaatggacgtttatcagggacgttttcaggacaacggagcctgcggctatgtgctcaagcccgccttcttgagagatcctaatggcacgttcaaccctcgggcccttgctcaggggccttggtgggccaggaaacgcctaaacattcgggttatctctggtcagcagctgccaaaggttaacaaaaacaagaacagcatagtggatccaaaagtgacggtcgagatacacggtgtatctcgggacgtcgccagccgacagacggccgttatcacaaacaatggctttaacccttggtgggataccgagttcgcttttgaagtggtggttcccgacctcgctttaatcaggttcctcgtggaggattacgatgcatcttccaaaaacgatttcatcggccagtctacgattcccttaaactctttgaagcaggggtatcggcatgtgcatctcatgtctaagaatggagaccagcatccctctgccactctcttcgttaaaattagccttcaggactag

SEQ ID NO: 199512 - DNA, 6909 bp, synthetic construct
  misc_feature 1..6909: note = Description of Artificial Sequence: Synthetic coding sequence
  source 1..6909: mol_type = other DNA
atgaccagcgaggagatgaccgccagcgtgctgatccccgtgacccagaggaaagtggttagcgcccagagcgcagcagacgaaagttccgagaaggtaagcgacattaatatatccaaagctcatacagtgcgtcgttctggggaaacctcccacaccatcagtcagctgaataaactgaaggaggaaccgagcgggtcgaaccttcctaaaatcctaagcattgctagggaaaagattgtcagcgatgaaaactcaaatgagaagtgctgggaaaagataatgcccgactctgcgaagaacctcaatattaattgtaacaacatcctaaggaatcaccagcatgggctgccacagcgacagttctacgagatgtataacagtgtggccgaggaagacctttgtcttgagaccggaatccccagtccacttgaaagaaaggtgttcccaggcatccaactggagctggacaggccttctatgggaatttcccctttaggcaaccagtctgttatcattgagaccgggcgtgcacaccccgactctagacgggccgtttttcatttccattacgaggttgataggcggatgtctgataccttctgcaccttgagcgaaaatctgatcctggacgactgtggcaactgtgtccccttgcctggaggggaggagaagcagaaaaagaattacgtggcgtatacgtgtaagctcatggaattagccaagaattgcgataataaaaacgagcagctgcagtgcgatcattgcgacactttaaacgataagtatttctgtttcgagggatcatgtgaaaaggtagacatggtttactctggggacagtttttgtcgcaaagattttactgacagccaggctgcgaaaacttttctgtcccatttcgaggacttccccgacaattgcgacgatgtcgaggaagatgctttcaagagcaagaaagagagaagcacactgctcgtgagaaggttctgcaagaatgatagggaggtcaaaaagtccgtgtacactggaacccgcgccatcgtgcggactctgccttctggccatataggtcttaccgcctggagctacatcgaccagaagaggaacggaccactcctgccttgcggtcgggtgatggagcctccttcaactgtggagattaggcaggatggaagtcagaggctgagtgaggcccagtggtaccctatctacaacgcagtgcggagggaggagaccgaaaataccgtcgggtcactcctgcatttcctgaccaaacttccagcttcagagaccgcccacggccggatctcggtcggaccatgtctcaaacagtgtgtcagagacaccgtatgtgagtatcgggccacactgcaacggacttcgatatctcagtacataacgggcagcctgctcgaggccactacatctctgggagctcggagcggcctgttgtcaaccttcggaggcagcaccggacgtatgatgctcaaggagcgccagcccggcccatcggtcgctaattccaatgcactgccgagttcttctgctggcatttccaaggaactgatcgatctccagcctctgatccagtttccagaagaggttgctagcattctcatggagcaggagcagacaatatacaggagagtcttgccagtggactatctgtgctttctgactagggacctggggactcccgaatgtcagagctcactgccttgtctcaaggcctctattagcgcttcaatcttgaccactcagaatggagagcacaacgcccttgaagatctcgtaatgcgcttcaatgaagtgagttcgtgggtgacatggctgatcctgactgcaggctcaatggaggagaagagagaggtgttcagttacctggtccatgtggccaaatgctgttggaacatgggaaattacaatgcagtcatggaatttctggcgggccttagatcacgcaaagtattgaaaatgtggcagtttatggaccagtcggacatagaaactatgagaagcctcaaagatgccatggcccagcatgagagttcctgcgagtatcgaaaggtagtcacaagagccctacacatacctggttgcaaggtagtccccttctgtggggttttcctcaaagaactttgcgaggttttggatggcgcctcaggattaatgaagctgtgcccacgttacaattcccaagaggaaaccttagaattcgtggctgattactcagggcaggacaacttcctccagcgcgtgggacagaatggactcaaaaatagcgagaaagagtcgacagtcaactccatcttccaagtgatccgcagctgtaaccgaagtctggagacagatgaggaagacagtccttccgagggtaacagttcccgtaagtcctctctcaaggacaagtccaggtggcaattcatcatcggtgacctcctggattctgataatgatatctttgagcagtcgaaggaatacgactcccatgggagtgaggatagtcagaaagcattcgatcatgggaccgagctgatcccttggtatgtgcttagcatccaggctgacgtgcatcagtttctgctccagggtgcgacagtgattcactacgaccaggatacgcatctgtcagcacgctgctttttacagctccagccagataactcaacgttgacctgggttaagccgacgacggcgagccccgcatcctccaaagctaaattgggcgttctgaataataccgccgagcctggtaagttccccttacttgggaacgctggactgagctccctcaccgagggcgtgctcgatctgtttgccgtgaaggcggtctacatgggccatcctggcatcgatattcatacggtgtgtgtgcaaaacaaactggggagtatgttcctctctgagactggtgtcactctactgtatggcctgcaaacaacggataaccgcctcctgcattttgtggcacccaaacacacggctaaaatgctgttttcagggcttctcgagcttacccgggccgtgaggaagatgaggaagtttccagaccagcgccagcagtggcttcgaaaacagtacgtttcattgtatcaggaggacggccgatacgagggccccacacttgcccacgccgtcgagctatttggggggcggaggtggtcagcgaggaatccaagccccggtaccagcgccaagaacgcagagaagcctaatatgcagcggaataacacccttggcatatcaactaccaagaagaaaaaaaaaatcctcatgagaggtgaatccggagaggtgactgacgatgagatggcaaccagaaaagcaaaaatgcacaaagagtgtcgatcgcgttcaggcagcgatccccaggatatcaacgaacaagaggagtcagaggtcaacgccatcgctaacccccccaaccctctgcccagtcgccgagcccactctttaactaccgctggctctccgaatctggccgccggaactagtagtcccatcagaccggtatcctcccctgtgctgtcaagctccaacaagtccccctcttctgcttggagctcatcttcttggcacggtaggattaagggcgggatgaaaggatttcaaagttttatggtgagtgactctaacatgtcctttgttgaatttgtggagctttttaagtctttcagcgttcgatctcgcaaagatcttaaggatctgtttgacgtgtacgcagtcccatgcaacagaagcggctccgaaagtgctcccctgtataccaatctaaccattgacgaaaatacctcggacctgcagcccgatctggatcttttaacgaggaatgtcagtgatttgggtttgtttatcaagtctaaacaacagctgtcagacaatcagagacagattagcgatgctattgcggcagcttcaatcgtcacaaacggtacaggcatcgaaagcacttctttgggcatctttggcgtcggcattctgcagttaaacgactttcttgtgaactgccaaggagagcactgcacatacgacgaaatcctcagtatcatccagaaattcgaaccaagcatctccatgtgccaccagggtttaatgtctttcgagggctttgcacggttcctgatggacaaagaaaattttgctagcaagaacgatgagtcccaagaaaacatcaaggagttacaactgcctctctcttattattacatcgagtcttctcataacacttatctcactggtcatcagcttaaaggcgaatcctccgttgaactgtacagccaggtacttctgcaaggctgccggtcggtggagctcgattgctgggacggcgacgatggtatgcctatcatatatcacgggcataccttaactaccaaaatcccatttaaagaggtagtcgaggccatcgaccggtcagcatttatcaatagtgatctgcccatcattattagtatcgagaatcattgttctctgccccagcagaggaaaatggctgagatatttaagacggtgttcggcgagaaattggtcaccaagttcttgtttgaaactgatttctcagatgatcctatgctgccttccccagaccaattaagaaaaaaggtgctgctgaagaataagaaattgaaggctcaccaaacaccagtggatatcctcaaacagaaggctcaccaattagcttcaatgcaggtgcaggcctacaatggaggcaacgcgaaccctcgccccgcgaataatgaggaggaagaagacgaggaggatgaatacgactacgactatgagagccttagcgatgacaacattctcgaggaccgccccgagaacaaaagctgtaacgacaagctccagtttgagtacaatgaggagatacccaaaaggataaaaaaagccgataattccgcatgtaacaaaggaaaagtctacgatatggaattaggcgaggaattctatctggatcaaaataaaaaggagagccggcagatcgcaccagaactatccgatttggtgatttactgccaggccgtgaaatttcccgggctatccactttgaacgctagcggatcttctcgggggaaggagcgaaaatcaagaaagagtatttttgggaacaatccaggaagaatgtcaccgggggagacagcgagtttcaataaaacatccggaaaaagtagctgcgaagggatacgacagacttgggaagagagctccagccccctgaaccctacaacctctttgtctgccataataaggacccctaagtgctaccacatatcaagcctgaacgagaacgccgcaaaacgcctgtgtcgcaggtattcccagaagttgactcagcacacggcatgccaactgctcagaacttaccctgctgccacacgtattgactccagcaatccgaacccccttatgttctggctgcacggtattcaattggttgctctaaactatcagaccgatgacctgcccctccatctgaatgctgctatgttcgaggccaacggcggttgcggttacgtgctcaagccacctgtgctttgggacaagaactgccctatgtatcagaaattctccccactggagcgcgaccttgattccatggaccctgcagtctattctctaaccatagtcagtgggcagaacgtctgtccatccaatagcatgggatctccatgcattgaagtcgatgtgttgggaatgccattggacagttgtcacttccgcaccaagcctatccaccgcaatacacttaacccaatgtggaatgaacagttcctgttccatgtgcacttcgaggacttggtgttccttcgtttcgctgtagttgaaaataacagcagcgcagtgaccgctcagaggataatccctctgaaagctcttaagagggggtaccgtcacctccagctccggaaccttcacaacgaagtgctggagatctcctctctgttcatcaatagtaggcggatggaagagaattcgagcggaaacacaatgtcagctagctctatgtttaatactgaagagagaaagtgtctgcagacccaccgcgttactgttcatggcgttcccggtcccgaacctttcacagtgtttactataaatggcggtaccaaagccaagcaacttctgcagcaaatcctgaccaatgaacaggacatcaagccggtgaccactgattacttcctcatggaggaaaagtactttatctctaaggaaaaaaatgaatgtcggaagcagccattccagcgggccattggacctgaagaagaaatcatgcagattctctccagctggtttcctgaggaaggctatatggggcgtatcgttctgaaaacacaacaggagaatttagaggagaagaacatcgtgcaagatgacaaagaggtgatcctttcatccgaagaggagtcgttttttgtccaggtgcacgatgtttccccagaacagccaaggacggtgatcaaagcgccgagagtgagcaccgctcaagacgtgatccaacaaacattgtgcaaagcgaagtactcctactctattttgtctaaccccaacccctctgattacgtattgttggaggaagtggtgaaggacactacaaacaaaaaaacaactaccccaaagagttctcaacgggtgttattggatcaggagtgtgtgttccaagcgcagagtaagtggaagggagcaggcaagttcatcctcaagttaaaggaacaggtgcaggcctcgagagaagataagaagaaggggatctcatttgcttcggagttgaagaagctgaccaagagcacaaaacaacccagagggttaacttctccaagtcagttactgacctcagagagtatacagacgaaggaggagaagcccgtggggggactgtcgagcagcgacaccatggactatagacagtag

SEQ ID NO: 199513 - DNA, 5985 bp, synthetic construct
  misc_feature 1..5985: note = Description of Artificial Sequence: Synthetic coding sequence
  source 1..5985: mol_type = other DNA
atggtgagcgagggcagcgccgccggccgggacttcgccggcatggaggaggttcgccagttacacgttaggttttgcaaggggattaaaatctggcaccaggcttggttcctttgcagtctgctcgggagagagccacaggaaagagaggctggatgccaactgtggctgtgcacactgagtgcagttctgaaagttgggtggctgttcccgctctccgaggtccccaattttaccctgctgaaggatggctgcggatgctggaggctcaaagaagaccagatctacaatgcagtccgcagagaggagaccgagaatacggtggggtctcttttgcatttcttaaccaagttgcccgcctcggaaactgcccacggtcgcatttctgttggtccctgtctgaaacagtgtgtgcgggatacagtgtgtgagtacagggccactcttcagagaactagtatatcacagtacatcaccgggtctttactggaagccactacatccctgggggcccgcagcggcttactaagcacgtttggaggttccacggggcgcatgatgctcaaggagcgacagcccggaccctctgtggctaacagtaatgccttgccctcctcttcagccggaatcagcaaagaactgatcgacttgcagccattgatccagtttccagaagaggtggcctctatccttatggaacaggagcaaacaatttaccggagagtgctgccggtggactacctgtgcttcttaacacgagatttaggcacaccagaatgccagtctagtttgccctgtctcaaagcttctattagcgcaagtatcttaacaactcagaacggggaacacaatgccttggaggacttagtgatgagattcaatgaagtgtccagttgggtcacctggctcatcctgacggcaggtagtatggaggagaagcgggaagtcttctcttatctcgtgcacgtggctaaatgctgctggaacatggggaattacaacgctgttatggaattcttagccggactgagatcacgaaaggtcctgaagatgtggcagtttatggaccagtctgacatcgagacaatgcggtcgctgaaggatgccatggcccaacatgaaagtagttgcgagtatagaaaggtcgtaacacgggccttgcacatcccaggttgtaaagtggtgcctttttgtggcgtgttcctgaaagaattatgtgaggtgcttgatggtgcatcgggcctgatgaaactgtgcccgaggtacaactcgcaggaggagactctcgagtttgtggctgattactctgggcaggacaactttttgcagagggtcgggcagaacggcctgaaaaacagcgagaaagaaagtaccgtgaactctatcttccaggtaattcggagctgtaaccggtctcttgaaactgatgaagaagatagtcccagcgaggggaactccagccgcaagagttccttaaaggacaagagccgatggcagttcatcattggcgacctgctcgactctgacaacgacatcttcgagcaaagtaaagagtacgatagtcacggttcagaggactcacaaaaggccttcgaccatggcacagagctgattccttggtacgtgctttcaatccaggccgacgtgcatcagttccttcttcagggcgctaccgtgattcactacgaccaagatacacacctatcagccagatgtttcctgcagcttcagcccgacaattcgacactgacttgggtgaagcccaccaccgcttccccagccagcagcaaggccaaactcggggtattaaataacacagcagaaccaggcaagtttccgctgctgggaaacgctggcctgtcctctctcacagagggcgttcttgatctgttcgctgtaaaagccgtttatatgggccaccccggtattgatatccacactgtctgcgtgcagaacaagcttggctcaatgttcctaagcgagaccggggtcaccctactttacggcctgcagactactgataatagactgctccatttcgtcgctccaaaacacaccgctaagatgctgttctccgggttactggaactgacccgcgctgttagaaagatgcgaaagtttcctgaccagcgccagcaatggctgaggaagcaatacgtgagcctgtaccaagaagacggccgatatgagggccctacccttgcacacgccgtggagctgtttggaggcagaagatggagtgctcggaacccttcccccggaacctctgcgaagaatgccgagaagcctaacatgcagcgcaataatacactgggaatctcaaccactaaaaaaaaaaagaagattcttatgagaggtgagagcggtgaggtcaccgacgacgagatggccaccaggaaagctaagatgcacaaagagtgccgctctcgttctggatcggatcctcaggacatcaacgagcaggaagaatctgaggtcaatgccatagctaatcccccgaatcctctcccatcccggagagcgcactctctgacaactgcaggttcacccaaccttgcggccggcactagctcgcctattcgacccgtttcttctccggtattatctagcagcaataaatctccatctagcgcctggagcagctcgagttggcatggcaggattaagggcggtatgaagggcttccagtcgttcatggtttctgacagcaatatgtcctttgtggagttcgtggaactgtttaagtccttctcggtacgtagtagaaaggacttaaaagatctctttgatgtgtacgccgtcccatgtaacaggtccggatcagagagcgcacctctgtacaccaacctgaccatcgatgagaatacaagcgacctgcagcctgatctggacctactgactaggaacgtgtctgatctgggattatttatcaaaagcaagcagcaacttagcgacaatcagcgccaaatctccgatgctatcgcagctgccagtattgttactaacgggacaggaatcgaatccacgtctctgggaatctttggggttgggattctccagctgaacgacttcctggtgaattgccaaggggagcattgcacttacgatgagatactctccattatccagaagttcgaaccttcaattagcatgtgccatcagggactgatgtcttttgaggggtttgcaagattcctgatggacaaggaaaattttgcttctaagaacgacgagtctcaagaaaatatcaaggaactgcagcttcctctgtcttattattacattgagtcctcccacaatacttacctgaccgggcaccaactgaaaggtgaatcttccgtcgagctatattcgcaggtcctcctgcaaggttgcagatccgtggagctggactgctgggacggtgatgatggaatgcccattatctaccacggtcacacactgactaccaagattccatttaaggaagtggtggaagcgatcgaccggagcgcctttattaactcagacctccccatcatcataagtatagagaaccattgtagtctccctcaacaaaggaaaatggccgaaattttcaaaaccgtgtttggcgagaaactcgtaacaaagtttttgttcgagaccgacttcagtgacgacccgatgctgccttccccggatcagctgcggaaaaaagtactgttgaagaacaaaaaactcaaagctcatcagacacctgttgacatcctgaagcagaaagctcatcagcttgcatccatgcaggtacaggcctacaatggcgggaacgctaaccctcggccggcgaacaacgaggaggaggaggatgaggaggatgagtatgactacgattacgaatcactcagtgatgacaacattctggaggaccgccctgagaacaagtcctgtaacgataagctgcagtttgagtacaatgaagaaatacctaagcggatcaagaaagccgataacagcgcctgcaataaaggaaaagtgtatgatatggaactgggggaagagttttatctagatcagaacaagaaggagtcccgacagatcgccccagaactgagcgaccttgtgatttattgtcaggctgtgaaattccctggattgtctaccttgaatgcatccgggagttccagaggtaaggagagaaaaagtcggaagagcatcttcggaaacaaccccggccgcatgtcccccggagagacagcatcgtttaataagacgtcaggcaagtcttcctgtgaagggattcggcagacctgggaggaaagctcctctccacttaatcctaccacctccttatcagcgatcattcggacccccaaatgctaccacatttcaagccttaatgaaaacgccgctaagcgcctgtgtcggaggtatagtcaaaagttgactcagcacaccgcatgccagctacttcgtacgtacccagccgccaccagaattgacagctcgaacccaaatccccttatgttttggctacacggcattcagcttgtcgcactaaactaccagactgacgacttacctctgcatctgaacgctgccatgttcgaagccaacggcgggtgcgggtatgttctgaaaccgcctgttctctgggacaagaattgccccatgtatcaaaagttctccccactagagagggacctggacagtatggatcccgccgtgtattcgttgacaatcgtaagtggccagaatgtgtgtccctcaaactcaatgggaagcccttgcatcgaagttgatgtgctcgggatgcccctggactcttgccacttccgaaccaagccaatccatcgaaatactctgaaccctatgtggaacgagcagttcctctttcatgtccactttgaagaccttgtgtttctccgattcgctgtggtggaaaataattcttcagcagtcactgcccagagaattatacctcttaaagcactgaagagagggtacagacatttgcagttgcgcaatcttcacaatgaagtgttggagatatccagcctcttcatcaacagtagacgtatggaagagaactctagcggcaataccatgtctgcttcctcaatgtttaacactgaggagcgcaaatgtctgcaaacacatcgtgtcactgtgcacggtgtgccggggcccgaaccatttactgtctttactatcaatggaggcaccaaggccaagcagcttctccagcaaatcttaacgaatgaacaggatattaaacccgtgacaactgattatttcctgatggaagaaaagtatttcatatctaaggaaaagaacgagtgcagaaaacaacctttccagagggccataggtcccgaggaggagataatgcaaattttgtctagctggttcccagaagagggctacatgggcaggattgtgctgaaaacacaacaggagaatcttgaagagaagaacattgttcaggacgataaggaggtcatcctgtcctctgaagaagaaagcttcttcgtgcaggtacacgacgtttccccagagcagccccgaacagtgattaaagccccgcgagtatccaccgcccaagacgtaatccaacagacactctgtaaagcaaagtacagttattccatcctgagcaatcccaatccgtccgactatgtcctgctagaagaagtcgtaaaggacactactaacaaaaagactactacgcccaagtcatcacaaagggtcctgctggaccaggagtgcgtcttccaggcgcagtcaaagtggaagggcgctgggaaattcattctcaaactcaaggagcaggtacaggcaagcagagaagataagaagaaaggtatttcctttgcctccgaactgaagaagctgaccaaatcaactaaacaacctagagggctcacgagcccaagccaactgctgactagcgagtccatccaaacaaaagaggagaaacccgttggcggattgtcatccagcgacactatggattatcgccagtag

SEQ ID NO: 199514 - DNA, 6939 bp, synthetic construct
  misc_feature 1..6939: note = Description of Artificial Sequence: Synthetic coding sequence
  source 1..6939: mol_type = other DNA
atgaccagcgaggagatgaccgccagcgtgctgatccccgtgacccagcgcaaagttgtttccgctcagtccgccgctgatgaatcctccgaaaaagtgtctgacatcaatatatccaaagcccacacagtgcgcaggagtggcgaaacatcccacaccatctctcagctgaacaaacttaaagaagagccaagcggttccaatctgcccaaaattctgtcaattgccagagagaagatcgtgagtgacgagaatagcaatgaaaagtgctgggagaagatcatgcctgattccgccaagaatcttaacatcaattgcaataacattctgaggaaccatcagcatggattgccacagcgccagttctatgaaatgtacaatagcgtcgcagaagaggacttatgcctcgaaacgggtattccctctcctctggagagaaaggtcttcccgggaatccagctggagcttgatcgccctagcatggggatatcaccacttggaaatcagtccgtaatcatagagacggggcgggcgcacccggatagcaggcgtgcagtgtttcacttccactacgaagtcgacaggaggatgagcgacactttttgtaccctgagcgaaaacctcatcctggatgactgtgggaactgcgtgcctctgccagggggagaggaaaaacaaaagaaaaattatgtggcttatacgtgcaagctcatggaactcgctaagaattgtgataataaaaatgaacaactgcaatgtgaccattgcgataccctaaatgataagtacttctgttttgaaggctcgtgcgagaaagtggacatggtctatagcggcgacagcttctgtaggaaagatttcactgattcccaggcggcaaaaacttttctaagtcattttgaggatttccctgacaactgtgacgatgttgaagaggacgcgtttaagtccaagaaggagcggagcaccctgctagtacgtcggttttgcaagaacgacagagaagtaaagaaatccgtttatactgggactagagcaattgtccggacactcccaagcggccatattgggctgactgcttggtcctatatcgaccagaagcggaatggacccctgttaccatgtgggagagtgatggagcctccgagcacagtcgaaatcaggcaggacggatcacagagactctcagaagcccaatggtaccctatttataatgctgtgcggcgggaggaaactgagaacacggtgggcagtctactgcactttctcaccaagttgccagcctccgagaccgcacacggacggatcagcgtcggaccttgcctgaaacagtgtgtccgggacactgtgtgcgagtatcgggccacccttcagagaacatccatcagccagtacatcacaggatccctcctcgaggccactacctcactgggtgccagatcaggcttgctcagtacattcggggggtcaactgggcgcatgatgctgaaggaacgccagcccggtccctctgtcgccaacagcaatgccttgccaagctctagcgctggcatctccaaggaacttatcgacctgcaacccctgatccaattcccagaggaagtagccagtatcctgatggaacaggagcaaaccatataccggagggtgcttcctgtggactacctttgcttcctgacccgtgacctgggcacaccagaatgccagagcagtctgccctgtctgaaggcatccatttccgctagcatactcacaacgcagaacggtgaacacaacgccctggaagatcttgtaatgaggtttaacgaagtgagtagttgggtgacttggttgattctcacggccggatcaatggaagagaaacgggaggtattcagctacctggtccacgtggctaaatgctgttggaacatgggaaactacaacgccgtgatggaattcctggctggtctacgcagccggaaggtgcttaagatgtggcagtttatggatcagtccgacatcgagacaatgcgctcacttaaagatgctatggctcaacatgagagcagctgcgaatatcgtaaagtagtgacccgggcactccatatccctgggtgtaaagtagtccctttttgtggtgttttcttgaaagagctgtgtgaggtgctggatggagccagcggcctgatgaagttgtgcccccgatataatagccaggaggaaactcttgagttcgtcgccgactacagcggacaagacaattttcttcagcgggtcgggcaaaacggccttaagaactctgagaaggagagtacagtgaactccatcttccaggtgatcagaagttgcaaccgctcgctcgagacagacgaagaagattctcccagtgagggcaattctagccgcaaatctagcttgaaagacaaaagtaggtggcagtttatcatcggcgatttgttggactctgacaatgatatctttgagcagagtaaggagtatgacagtcacggctcagaggacagccagaaagcctttgaccatgggacagagctaattccttggtacgtcctgtccattcaggctgacgtgcaccaatttctattgcaaggagcaaccgttattcactacgatcaagacactcacctctcagctcgatgcttcttgcagctgcaaccggataattccactcttacttgggtcaagcccacaaccgccagtcccgctagctctaaggcgaagctgggcgttctgaataatactgccgaaccagggaagttcccattgttgggcaatgcaggtctttcgtcgttaacagagggggtgctggacctgttcgccgtgaaagctgtatacatggggcacccaggtatcgatatacataccgtttgtgtgcagaataagctagggtccatgtttctcagcgaaaccggggtcaccctgttatacggtcttcagactacggacaatcgtctcctgcactttgttgcgccaaaacatacagcaaagatgctgttttcaggcctcctcgaactgacaagggctgtgcggaagatgcgtaagtttcccgaccagcggcagcaatggctgcgaaaacagtacgtgagcctgtaccaagaagatggcaggtacgaaggacctaccctggcacacgccgttgaactgttcggcgggcgcaggtggagtgcccgtaatccaagccctggcacaagcgcaaagaacgccgagaaacccaatatgcaaagaaacaatactctcggtattagcacgactaaaaagaagaaaaaaatcctgatgcggggagaatctggggaggtgacagatgacgagatggctactcgtaaggccaaaatgcataaagaatgtaggagcaggtccggctccgacccgcaggatattaacgagcaggaggagagcgaggtgaacgcaattgccaatccacccaaccccctgccatcaagaagggcccactctctaactacggccggctccccgaacctcgccgccgggacatcctctcctattaggccagtaagctcaccagtgttatcttccagtaataagtccccttcatcagcatggtcaagttccagttggcacggtcggattaagggggggatgaagggctttcagtcgttcatggtgtccgactcaaatatgtcgttcgtcgagttcgttgagctgttcaagtccttttccgtgaggtctcgtaaagaccttaaggacctttttgacgtctacgccgttccttgcaacagaagtggctcggagagtgctcctctttataccaatctaaccatagacgagaacacctccgacctccaacctgacctggaccttttgactcgaaatgtgtccgatctgggcctctttataaagtcgaaacaacagttgtccgacaatcaaagacagattagtgacgcaatagcggctgctagcattgtcactaacggcacaggtatcgagtcaacttctctcggcatcttcggggtgggaattctgcaactgaatgacttcctggtcaactgtcaaggagagcattgtacctacgacgagattctttcgatcatacagaaattcgagccaagcattagtatgtgccaccagggacttatgagcttcgaaggattcgcccggttcttgatggacaaggagaacttcgccagtaaaaacgacgaaagtcaagagaatatcaaggaactgcagctgcccttaagctactactacattgagtccagccacaacacttacctgaccggccaccagctgaagggggaatcaagcgtggaactgtattctcaggttctgctgcaggggtgtcgttccgtggagctcgattgttgggatggagacgatggcatgcctataatttaccacggccacacactcacaacaaaaatcccgtttaaagaggttgtggaagcaattgacagatcagcattcatcaacagcgatctgcccattattatttccattgagaaccattgctccctgccacagcagcggaaaatggccgagattttcaagactgtatttggggagaagctagtgactaaattcttgttcgaaacagatttcagtgacgaccctatgttaccatctcctgatcagttgcgtaagaaagtacttctaaaaaataagaagttaaaggcccaccagacccccgtagacatactcaagcaaaaagcccaccagctggcatccatgcaggtacaggcctataatggtggcaacgccaacccccggccagctaacaatgaagaggaggaggacgaggaggacgagtacgattatgattacgaatccttatccgacgacaacatcctggaagataggcccgaaaataagagctgtaatgacaagctccagttcgaatacaatgaggagattcctaagcggattaaaaaggctgacaattccgcatgtaacaaaggcaaagtgtacgatatggagctgggagaagagttctatctagaccagaacaaaaaagaatcccgtcagatcgcacccgaactgagcgaccttgtgatctattgccaagccgtcaagtttccgggactgtctactctcaacgcaagtgggagctccaggggaaaggagcgcaagtctcgtaaaagtattttcgggaataatccaggccgcatgagtccgggagaaacagcaagctttaacaaaacctctggcaagtccagctgtgagggaataaggcagacatgggaggaaagttccagtccactcaacccaaccacctccttgtcagctatcatccgcacccctaagtgctaccatatcagcagccttaatgaaaatgctgccaagcggctatgtagacgatacagtcagaaactgactcagcacactgcatgtcagttgctgcggacttaccccgcggctactagaatcgacagcagcaacccaaacccgcttatgttttggctacacggaattcagctcgtcgcccttaactaccagaccgacgatttgcccctacatcttaacgctgcaatgtttgaggccaatggggggtgcggatacgtgctgaagcccccagtgctctgggacaagaattgtcctatgtaccagaagttctcacctctggagcgggacttggacagcatggaccccgccgtgtactcactaacaatcgtgtctggccagaatgtctgtccatcaaattccatgggatcgccttgcattgaagtggatgttcttgggatgcctctggattcttgtcacttccggactaagccgatccaccgcaatacgctgaaccctatgtggaacgagcagttcctgtttcatgtccacttcgaagacctggtgtttctgagatttgctgtggttgaaaataattcttctgccgtcactgcacaaagaatcattcccttgaaggccctcaagagaggttatcgacacctgcaactgagaaatcttcacaatgaggtgctggagatttcctcgttgttcattaacagtagaaggatggaggaaaattcaagcgggaacactatgtccgccagttctatgtttaacacagaggagcggaagtgtctgcaaacgcacagagttacagttcacggcgtcccaggtccggaacctttcaccgtgtttacgattaacggagggacaaaggccaagcagctgttgcagcagatactaacgaatgagcaagacatcaagccagtgaccacagattacttcctgatggaggaaaagtactttattagcaaggaaaaaaacgagtgccgaaagcagcctttccagagagctattggaccagaagaggagattatgcagatcctatcctcctggtttccagaagaaggatacatgggtagaatcgtgctcaagacgcagcaagagaatctggaagagaagaacatagtgcaagatgacaaagaggtaattctttcttctgaggaagaatcttttttcgtgcaggtacatgacgtgagccccgagcaaccacgcacagttatcaaggctcccagagtgtccacagctcaagatgtgatacagcagaccctctgtaaggccaaatactcttactcaatcctgagtaacccaaatccgagcgactatgttctactggaggaggtggttaaggatacaaccaacaagaagacgactactcctaaaagctctcagagagtcctgctcgaccaagaatgcgtctttcaggcacaaagtaagtggaaaggggctgggaaatttatactgaaactcaaagagcaggtgcaagccagcagggaggacaaaaaaaaaggaatctccttcgccagcgagctgaaaaaactgacgaagtctaccaagcagccgagaggacttaccagcccttcccaattgctgactagcgaatcaattcaaacaaaggaagaaaaaccggtcggagggctttcctcctcagacaccatggactatagacaggtgaagatattcaagcaggaagtgaaggagtag

SEQ ID NO: 199515 - DNA, 5985 bp, synthetic construct
  misc_feature 1..5985: note = Description of Artificial Sequence: Synthetic coding sequence
  source 1..5985: mol_type = other DNA
atggtgagcgagggcagcgccgccggccgggacttcgccggcatggaagaagttaggcaactgcacgttcggttctgtaagggaatcaagatttggcaccaggcatggttcctctgctccctcctcgggcgtgagccccaagagcgggaggccggttgccaactgtggctgtgcacactgtccgccgtgctgaaagtgggatggttgtttcctctttccgaggtgcctaatttcaccctcctcaaggacggctgcggctgttggcgcttaaaggaagaccagatctacaacgccgtccggagggaagagaccgagaacaccgtaggcagcttgctgcactttcttacaaagctgcccgcttctgagacagcacacgggaggattagtgtaggcccctgtctcaagcagtgcgttagagataccgtgtgcgaatatagggccactctgcagaggacgtccatttcacagtacataaccggtagcctgctggaagctaccacatccctgggtgctagaagtgggctactcagcaccttcggcggatcaaccgggagaatgatgctgaaggaacgacaaccagggccatctgtcgccaactctaacgccctccctagttcgtcagctggaatctccaaggagttgatcgatcttcagccgctcattcagtttcccgaagaagtcgctagtatactgatggagcaggagcaaaccatttatcggcgggtgctgccggtggattatctgtgctttctcactcgggatctgggcacgccagagtgtcagtcgtctcttccctgtcttaaagcaagcatctctgctagcatcttaaccactcaaaatggggaacataatgcccttgaagacctggtgatgcgctttaacgaggtctcttcctgggtgacgtggttaatcctgacagccggtagtatggaagaaaagcgagaggtcttcagctatctcgtgcacgtggccaagtgctgctggaacatggggaactataacgcagtaatggaattcctggccggacttcgatccagaaaggtgttgaagatgtggcagtttatggaccagtccgacattgagactatgcggtctttgaaggatgctatggcacagcatgaaagctcatgtgagtataggaaagttgttactagagcactccacattcccggctgcaaggtggtgcccttctgtggtgtgttcctgaaagagctgtgtgaagttctagatggtgcatcaggccttatgaaactgtgcccacgctataactcacaggaggagaccttggagttcgtggcggattactcaggccaggacaacttcctgcaacgagtgggacagaacggactgaagaattctgagaaggagtccacagtgaactctatatttcaggtgataagaagctgcaatcgctctctcgagactgatgaggaggactctccctcagagggcaatagctctcgtaaatcgagcctgaaggataaatcccgatggcaattcatcataggagatctactagactctgacaacgatatttttgagcagtccaaggagtatgacagtcatggaagcgaggactctcaaaaagcctttgaccatggcaccgagctaattccctggtatgtcctgagcatccaagctgacgtgcatcaatttctgctgcagggagctaccgttatccattatgatcaggacacccatttgtccgcaaggtgcttcctacagcttcagcccgataattcaaccctgacctgggttaaacctaccacagccagcccagccagttccaaggctaaacttggagtcctgaacaacactgcagagccaggtaagtttcctctgttgggaaatgctggacttagcagcctgactgaaggtgtgctggacttgttcgcagtcaaagctgtttacatgggtcatccgggcattgacatccacaccgtgtgtgtccagaataaacttggctctatgttcttgtcagaaacaggagttactctcctatacggcctgcagacaacagacaacaggctgttgcacttcgtcgcccccaagcataccgctaaaatgctgtttagtggactgttagagctcactagagctgtgcgtaagatgcgcaagtttcccgatcagagacaacagtggcttaggaaacaatacgtcagtctgtatcaggaggatggacggtatgagggtccaacactggcccatgccgtagagctgttcggcggcagacgttggtcagctaggaacccatccccagggacttcagccaagaatgccgaaaagcccaacatgcaaagaaacaacacgctcggcatttcaaccactaagaagaaaaaaaaaattctgatgagaggggagagtggagaggtgacagacgacgaaatggccacccggaaggctaaaatgcacaaggagtgcagatcccggtcaggaagcgacccgcaagacataaatgaacaagaagaaagtgaagtcaacgccattgcgaatcctcctaatccgttaccctcacggcgcgcgcatagtctgactaccgccggcagccctaatctggctgccggtacgagttctcctatccggcctgtgagctcccctgtgctgagcagttccaacaagtcaccatcatcagcatggagcagttccagctggcacgggcggatcaagggtgggatgaaggggttccagtctttcatggtaagcgactcaaacatgtcgttcgtggaatttgtggagctgttcaaaagctttagcgtgagaagcagaaaagacttaaaagatttgtttgatgtgtacgccgttccctgcaatcgttctgggtctgaatctgcacccctctacacgaatttaactatcgacgagaacacctctgacttacagccggacctcgacttacttacccgtaatgtttctgacctcgggcttttcatcaagagtaaacagcagctgagtgataatcagcgacagatatcagatgctattgctgcagccagcattgtgacaaatgggacgggtatcgagagtacatccttgggtatcttcggcgtgggaatacttcaactgaatgattttcttgttaactgtcaaggggagcattgcacatatgacgagattctctctataatccaaaaatttgaaccgtctatttcaatgtgccatcaaggcctgatgtccttcgaaggcttcgctagatttctcatggataaagagaacttcgcctcgaaaaatgacgaatctcaggaaaacatcaaggaacttcaactgccattgtcatactattatatagagtcaagccacaacacctatctgactggccaccagctgaagggtgaatcatcggtggaactgtacagccaggtactccttcagggatgccgctcagtagagctggattgttgggacggtgatgacgggatgcctataatttaccacggtcataccctgactaccaaaataccattcaaggaagtggtagaggccatagaccgctctgcttttattaatagcgatctgcccatcattatatctattgagaaccactgctcattaccacaacagaggaaaatggccgagattttcaaaacggtttttggcgagaagttggttacaaaattcttattcgaaacagatttcagtgatgaccctatgttgccaagcccagaccaactgagaaaaaaagtcctgctgaagaataaaaagctgaaagcacatcagactcctgtcgatatcctgaagcagaaggcacaccagctggctagcatgcaggtgcaagcatataatgggggcaatgctaacccaagacccgcaaacaacgaggaggaggaggatgaagaggatgaatatgactatgactatgagtccctctctgatgacaatatcctggaggatcggcctgaaaataagagctgtaacgataagctgcagttcgagtataacgaggaaataccaaaacggatcaagaaagcggataattccgcgtgtaataagggcaaagtgtatgacatggaacttggtgaggagttttaccttgaccaaaataaaaaagaaagcagacaaattgctcccgaactcagtgacttggtcatctactgccaggccgtgaaatttcctgggctgtccacgctgaacgcttcaggctcttctcgcggcaaggaacgcaagtcaagaaaatccattttcggaaataatccaggtcgcatgagcccgggcgagaccgcctcatttaataaaacctccgggaaatcttcatgcgaaggcataagacaaacttgggaggaaagcagctcccctctgaaccctaccacatcactgtctgccattatccgcaccccaaagtgttaccacatttccagtctgaatgaaaatgcggccaagcgactgtgtagacgctactcccagaaactcacacagcacaccgcttgccaactgcttcgtacttaccctgccgccaccagaattgactcttctaaccccaatcccctcatgttttggctccatggaatccagttagtggcactcaactaccagacagacgaccttcctcttcaccttaacgccgctatgtttgaggcgaacggcggttgtgggtatgtgctgaaaccaccagtgctttgggacaaaaactgtcctatgtaccaaaaatttagtcccctagaaagggacttagacagcatggacccagctgtctacagtttgacaatcgtgtctgggcagaatgtctgtccatctaattctatgggctctccatgcatagaagtggacgtcctgggcatgcctctcgattcctgccacttccgcacaaagcccattcatcggaacaccctgaaccccatgtggaacgagcaatttctcttccatgtccacttcgaggatcttgtgttcctgagatttgccgtggtagagaataactctagcgcagtgacggcccagaggattattcctctcaaagccctgaaaagaggctatagacatcttcagctcaggaaccttcacaacgaagtgctggaaatctcatcacttttcatcaacagccggcgtatggaggagaactcctccggaaatacgatgtcagcctcctccatgttcaacactgaagagaggaagtgcctacaaacccaccgtgtaacagtgcacggggtaccggggccagagccatttaccgtgttcacaataaatggaggaacgaaagcaaagcaactgctccagcaaattctaacgaacgagcaggatatcaagcccgtgactaccgattactttctcatggaggagaagtatttcatttcaaaggaaaaaaacgaatgtagaaaacagcccttccagagagcaattgggcctgaagaggagataatgcagattctcagctcatggttccccgaggaagggtacatgggccgaattgtcctaaagacccaacaggagaatcttgaagagaagaacattgtgcaagatgataaggaggtcatcctctctagtgaagaggaaagttttttcgtacaggttcacgacgtgtctcctgagcagcctaggacagtcatcaaagcaccgagagtgagtacagctcaggatgtgattcagcagacgctttgcaaagctaagtactcatactctatcctaagtaatccaaacccttcagactacgttctcctggaagaagtcgtgaaagataccacaaacaaaaagaccacaacccccaagtcctctcagagggtcctgttggatcaagaatgcgtcttccaagcccagtccaaatggaagggagccgggaagtttattctgaagctgaaagaacaagtccaggcctcacgtgaggacaagaaaaaaggtatcagttttgctagcgaactcaagaagttgaccaagtccaccaagcagccacgtgggctgacctccccgagccagctgttaacttctgaaagtattcagacgaaagaagagaaacctgttggaggtctatcgagtagcgacacaatggactataggcagtag

SEQ ID NO: 199516 - DNA, 4968 bp, synthetic construct
  misc_feature 1..4968: note = Description of Artificial Sequence: Synthetic coding sequence
  source 1..4968: mol_type = other DNA
atgagcgtgatgcagagcggcacccagatgatcaagctgaagcggggcactaaggggctggtcaggctgttttacttagatgaacaccgaacccgactcaggtggcgcccaagccgtaagtcagagaaggcaaaaattttaatcgactccatctataaggtgactgagggccgccaaagtgaaatcttccatcgacaggccgaaggcaactttgatccttcctgctgctttactatatatcacggcaaccacatggagagtttggatctgattacgtctaaccctgaggaagcccgcacctggatcaccggtcttaagtaccttatggccgggatcagtgacgaggactcacttgcaaaacgtcagcgcactcacgatcagtgggtgaagcagacattcgaagaggcagacaagaatggggacggtttgctgaatattgaggagattcaccagctgatgcacaaactaaatgttaatttgccaaggaggaaagtgcgccaaatgtttcaggaagctgacactgatgagaatcagggcacccttacattcgaagaattttgtgtgttttacaaaatgatgtcccttcggcgtgatttatacctgctgctactgtcctactctgacaaaaaagaccatctgaccgttgaggaactcgctcagtttttaaaggtcgagcaaaaaatgaataatgtcacgaccgattactgtctggacattatcaagaaattcgaggtcagcgaggagaacaaagtgaaaaacgtgctgggcattgagggcttcactaactttatgagatcaccagcatgtgatatctttaacccgctacaccacgaagtctaccaggacatggatcagccactgtgtaactactacattgccagttctcataatacttatctgaccggtgatcaactattgagccaatctaaggtggacatgtatgcccgcgtcctgcaggaaggatgtcgatgtgtcgaagtggactgctgggatggccccgatggcgaacctgtggtgcaccatggctacaccctcacctctaaaatcctctttcgcgacgtcgtagaaactatcaataaacacgcctttgtgaagaatgaatttcccgtcattttgtctatcgaaaaccactgctccattcaacagcagaggaaaatcgcacaatacctgaaagggatctttggagacaagttggacctgtcttccgtggatacgggtgaatgtaaacaactgcccagcccacaaagcttgaaaggcaagatcctggtgaagggaaagaaactgccctatcatctgggagatgatgccgaggaaggtgaagtatccgatgaggactccgctgatgagatcgaggacgagtgcaaattcaagttacattactcgaacggcactactgagcatcaagtcgagagtttcattagaaaaaaacttgagagcttgctgaaagagagtcagattcgggataaagaagatccagactcgttcacagtgagagccctgctgaaggctacacacgaaggtttgaatgcgcatttgaagcagagccctgacgtgaaggaatccgggaaaaaatctcacgggcggagccttatgacaaatttcggcaaacataagaagacgaccaagagtcgaagtaagagttattctacggatgatgaagaagatacacagcagtctactggcaaggaaggtggacagctctaccgtctcggtcggagacggaaaacaatgaagctttgtagagagctgtctgatctggtggtgtatacaaactccgttgcagcccaggatattgtagatgacggcacaaccggcaatgttctctccttctctgaaaccagagcccatcaggtggtgcaacagaagtctgaacaattcatgatatataatcagaaacagctgacaagaatctatccaagcgcatatcggatcgactcttctaacttcaatcctctgccatattggaatgctggctgccagttagttgccctcaactatcaaagcgagggaaggatgatgcagcttaaccgggctaaattcaaggccaatgggaattgtggctatgtactgaaacctcaacagatgtgtaagggaactttcaatccattttccggagatcctctccctgctaatcctaagaagcagttgattctgaaggttatttccggacagcagttgcccaaaccgcctgatagtatgtttggcgaccgcggggagatcattgatcccttcgtcgaggttgagatcattggcttacccgtggactgttgcaaagatcaaacacgtgtagtggacgataatgggtttaatcccgtgtgggaggaaacactgacatttaccgtccatatgccggagattgccctcgttagattcctggtttgggatcatgaccctataggaagagatttcgtggggcagaggaccgtcacattttcctcattggttccaggttaccgtcacgtgtatctggagggactgacagaggcgagcatcttcgtccacattacgattaatgagatttacgggaagaataggcagctgcaggggttgaagggcctcttcaataagaaccctcgtcactccagcagcgaaaacaactcacactacgtccgcaagaggagtattggcgacagaatacttcggcggacagcaagcgctcccgcaaaggggaggaagaagtcaaaaatggggttccaagagatggtggagatcaaagacagtgtctcggaggcaacccgtgatcaagacggcgtcctacggcggacgaccaggtccctccaagcaagacccgtatccatgcccgttgatagaaatctgctaggagcccttagcctaccagttagcgaaacagccaaggacatcgaaggaaaggagaacagtctcgccgaagacaaagacggtcgcaggaaaggcaaggcctccatcaaagaccctcatttcctgaactttaataagaagctgtcaagctcctcgtcagcccttcttcataaagatacctctcagggagacacaatagtgtcaacggctcacatgagtgtaaccggtgagcagctcgggatgtcgtcacccagaggcgggcggaccacttccaacgccacctcaaactgccaagagaatccctgtccctccaaatctctttctccgaagcagcatctcgcacctgaccccgtggttaatcctacacaagatctgcacggagttaagatcaaagagaagggaaaccctgaggatttcgtggagggcaagagcatcctgtcaggcagcgtgctgtcccactctaatctcgagattaagaatctagaaggaaaccgcggaaagggtcgcgctgctacatccttttctctgtctgacgtttctatgctctgctcagacattcctgatctacattcaacagctatactccaagaaagtgtcatatcccacttaattgataacgtaactctgactaacgagaatgagccgggatccagcattagcgctctaattggacaatttgacgaaactaataaccaggccttgaccgtggttagtcacctccacaatacgagcgtaatgagcgggcactgtcctctgccttcactcggcttaaagatgcccattaaacacggtttctgcaagggtaagagcaagtcttccttcctgtgtagctcaccagagttaattgcgctgagcagtagtgagaccactaaacacgccactaataccgtctacgagaccacgtgcacaccaatatcaaaaaccaagcccgatgacgacctctcatcaaaagcaaagaccgccgctctggagtccaacctgcccggatccccaaacacgtcacgcgggtggcttccaaagagtccaacgaagggagaggattgggagactctgaagagttgctcacctgcatctagcccagatctgaccctggaggacgttatcgccgaccccacactttgctttaacagcggcgagagtagcctagtcgaaattgatggcgagagtgagaacctcagcctgacaacatgcgaataccgcagggagggcacttcccaactcgcttcccctctcaagctgaaatataatcaaggtgtggtggaacacttccagcgcggcctgcgaaatgggtattgcaaggaaactttacggccctccgtgcctgagatctttaataatatccaggacgttaaaactcagtccatctcatacttagcttaccagggcgccggcttcgtacacaatcacttctccgattccgacgccaaaatgttccagacatgtgtgccacagcagtcaagcgcgcaggatatgcatgttcctgtgccaaaacaactagcccatctgcccctgcctgctcttaagcttccatctccttgtaagtcaaagtccctgggcgaccttaccagcgaggacatcgcatgcaacttcgagtctaaataccagtgtatatctaagagcttcgttaccaccggaatcagggacaaaaaaggcgtgactgtgaaaaccaagtcattagagccaatcgacgctctcacagaacagctccgcaagctggtcagctttgatcaggaggataattgccaggtcctttacagtaagcaagacgctaaccagcttcctagggcactggtgcggaaactctcatccagaagtcagtcacgtgtccggaacatcgcatcacgggcaaaggaaaaacaagaagcgaacaaacagaaagttcccaacccctccaatggtgctggcgtcgtcctacggaacaaaccaagcgcccctacacctgccgtgaatcggcatagcacgggatcgtacattgccggctacctcaagaatactaaaggagggggtctcgaggggagaggcatccctgaaggtgcctgcaccgcactacattacgggcacgtggatcagttttgctcagataattcggttctccagacagaaccatccagcgatgataaacccgagatttacttcttgctgagattgtag

SEQ ID NO: 199517 - DNA, 5082 bp, synthetic construct
  misc_feature 1..5082: note = Description of Artificial Sequence: Synthetic coding sequence
  source 1..5082: mol_type = other DNA
atggccgacctggaggtgtacaagaacctgagccccgagaaggtggagaggtgtatgagtgtaatgcagtctggcacgcaaatgatcaagctgaaaaggggtaccaaagggctcgttaggctattctatctcgacgagcatcggacccggttaaggtggaggccaagccgcaagtccgagaaggcaaagatccttatcgactccatttataaggttaccgagggaaggcagtcagagatcttccacaggcaggccgaggggaacttcgatcccagctgttgcttcacaatatatcatggaaaccatatggagtcactggacctgatcacaagcaatcctgaagaggctcgcacgtggattacagggctgaagtatctcatggccgggataagtgacgaggatagcctagcaaagcggcaaagaactcacgaccaatgggtaaaacagacattcgaggaagctgacaaaaacggggacgggctgctcaacatcgaagaaatccaccaactgatgcataagttgaatgtgaaccttccgagaagaaaagtgaggcagatgttccaggaagccgataccgatgaaaatcagggcaccctaacctttgaggaattttgcgtcttttacaaaatgatgagcctgcgccgagatctctacctgctgctgctctcctactcagacaagaaggaccaccttaccgtcgaagagctggcccagtttctaaaagtcgaacagaagatgaacaatgttactacggattactgcctggacatcatcaaaaagttcgaggtgtcagaagaaaataaagtgaaaaatgtcctcgggatcgagggctttaccaacttcatgagatcgcccgcttgtgatatttttaatcccctgcatcacgaggtgtatcaggacatggatcagccactgtgcaactactatatcgcgtcgtcccataatacctacctaaccggcgatcaactgctgtcccaatcaaaggtggacatgtatgctagggtgctccaggaagggtgccgctgtgttgaggtagattgttgggatggccctgacggcgaaccagtggtgcaccacggatacacactgacttccaaaatactgttccgcgacgtagtggagaccataaacaaacatgccttcgtaaaaaatgagttccctgtcatcttgtccattgagaatcactgcagcatacagcagcaaaggaaaattgcgcagtatttgaaggggatctttggcgacaagctcgacctgtctagtgtggataccggggagtgtaaacagctcccctctcctcaaagtcttaagggcaagatcttagttaagggaaagaaactgccataccatctgggggacgatgcagaggaaggagaggtcagcgacgaggactcagccgatgaaatcgaggatgaatgcaagttcaagctccattacagcaacggcacaacagaacatcaggtggaatctttcatcagaaagaagcttgaatctctcttaaaagagtcccagattcgggataaggaagacccagactcattcacagttcgagcgctcctcaaagctacacacgaagggttgaatgcccatcttaaacagtcccccgatgttaaggagagtgggaagaaatcccacggtcggagcctgatgactaactttggcaaacacaaaaagaccacaaagtctaggtcgaaatcatactccaccgatgatgaggaggacacgcagcagagtactggcaaggagggtggtcagctttacagattggggcgccgcaggaaaaccatgaagctttgcagagaactgtcagacctggtggtgtatacaaactccgtggccgctcaagacatcgtcgatgacggaacaactggaaacgtgctgtccttctccgaaacccgagcacaccaggtggtccagcaaaagtccgagcaatttatgatatataatcagaagcagctcacgaggatttatccttccgcatatagaatagattctagtaattttaatccccttccatactggaatgcagggtgtcagttagtcgccttgaattaccaatcagaaggtcgtatgatgcagctgaacagagcaaaatttaaggcaaatggcaactgcggctatgtactgaaacctcagcagatgtgcaagggcaccttcaatcctttctccggtgacccacttccagcaaatccaaagaaacagcttattctcaaggtgataagcggccagcaactgccaaaacccccggattctatgttcggcgaccgcggggaaattattgacccctttgtcgaggtggaaatcattggcctgcctgttgactgctgcaaggatcaaacccgcgtcgtcgacgacaatggcttcaatccagtgtgggaagagactctgacctttacagtccatatgccagagattgcccttgtgcgatttcttgtgtgggaccatgacccaattgggagggatttcgtgggacaacgcacggtgacctttagcagtctggtgcccgggtatagacacgtgtacctggaagggttgacggaagcatccatctttgtgcatattaccatcaatgagatttacggcaagtggagccccctgatcctgaatcccagctataccatcctgcattttctcggcgcgaccaaaaatcgccaattgcagggcctcaaaggtctgtttaacaaaaatccccgccacagcagttcagagaacaactctcactatgtccgtaaaaggagtatcggcgatcgcatcctgcgccggactgcctccgcaccagccaagggaaggaaaaagtctaaaatgggcttccaggaaatggtcgagattaaagatagtgtgagcgaggcaacacgggaccaagacggggtgctgagacggaccactagatcgctgcaggcccgtcctgtcagtatgcctgtggacaggaacctgctgggggcacttagcctccccgtttcagagaccgctaaagatatcgagggtaaggagaattccctcgccgaagacaaggacggcagacgcaagggaaaggcaagcattaaggacccgcactttctcaacttcaacaagaagctcagcagcagctcaagcgccctgcttcacaaggacacctctcagggagatacaatagtgtccacagcccatatgtctgtgacaggggagcaactgggcatgagctccccgaggggaggaaggaccaccagtaatgccacctcaaactgtcaggagaacccatgtccttccaaatccctcagcccaaagcagcacctggctcctgacccggtagtgaaccctacccaggacctccatggagtcaagatcaaggagaaagggaacccggaggatttcgtggagggcaaatcaatactgagcggatctgtgttgtcccacagtaacttggagattaagaatctcgagggcaaccgaggtaaggggcgcgccgccacctctttttccctttccgacgtctctatgctatgtagcgatatccccgacttgcactccactgctatcctccaggagtccgtgatcagtcatctgattgataacgttactttgaccaatgagaatgaacccggcagcagtatcagcgcattaatcggacagtttgatgagaccaataatcaggccctgacggtggtgtcgcacctacataacaccagcgtgatgagcggacactgtccgttgcctagcctcggcctcaaaatgcccattaagcatgggttctgtaaaggaaaatcgaagtcttctttcctgtgttcgtctcccgaattgatcgccctatcctcctccgagacaacaaaacacgccacaaataccgtgtacgaaactacatgtaccccaatttccaagacaaagcccgacgatgacctgtcttctaaggccaagaccgccgccctcgagtccaatctccccgggtcccccaacacatcccgcgggtggctgccgaagagtccaactaagggagaggactgggagaccctgaaaagttgttctcccgcttcaagccccgatctaactcttgaagatgttatcgctgatcctacgctttgcttcaacagcggagagtcatctctcgtggagatcgacggcgagtctgagaatctgtctctcaccacctgtgaatatcgccgagaagggacaagtcaactggcttccccgctcaaacttaagtataaccaaggagtcgtcgaacattttcagagaggcctgagaaacggatactgtaaagagacactcagaccatccgtcccagagattttcaataatattcaagacgtgaagacacagtctatctcatatctcgcctaccagggcgccgggtttgtccacaaccacttttcagacagcgacgccaagatgttccagacttgtgtcccacagcagagctctgctcaagatatgcatgtgcctgtccccaaacagctggctcacctgcccctgccggccttaaagctcccatcaccctgtaagtctaagtccctcggtgaccttacgtcagaggacattgcatgcaattttgagtccaaataccagtgcatttccaagtctttcgtgaccaccggcattagggacaaaaaaggggtcactgtcaaaacgaaatctctcgaaccaattgatgccctaactgagcagctccggaagctcgtgtcttttgaccaggaagacaattgtcaggtgctttacagtaaacaggatgcaaaccaactgcctcgcgcattggtccggaagttgagctctcgctcccaatcacgtgtgcgaaacatcgcctctcgagctaaagaaaagcaagaggcaaacaaacagaaagtgcctaacccctcaaacggagcaggcgtcgtcctgaggaacaaaccctccgcccctaccccagccgtcaatcgacactctactggaagttacatagcaggttacctcaaaaacaccaagggaggaggcctcgagggcagaggcataccagaaggtgcgtgcacagctttgcactacggacacgtggaccagttttgttccgacaactctgtactccagacggagcccagcagtgatgataagccggagatttatttcctcctgaggctgtag

SEQ ID NO: 199518 - DNA, 4968 bp, synthetic construct
  misc_feature 1..4968: note = Description of Artificial Sequence: Synthetic coding sequence
  source 1..4968: mol_type = other DNA
atgagcgtgatgcagagcggcacccagatgatcaagctgaagcggggaaccaaaggtctggtccggctcttctacctcgacgagcatagaacacggctgagatggcgaccgagtcgtaagtctgaaaaggctaaaatcctgattgactcaatctacaaggtcactgagggcaggcagtctgagatcttccataggcaagccgagggaaactttgaccccagttgctgcttcactatttatcacgggaatcatatggagagccttgatctgattactagtaacccggaagaggcaagaacctggatcactggcctgaaatatctaatggccggcattagcgacgaagactcacttgcaaaacggcagaggacccacgaccagtgggtaaaacaaacattcgaagaggccgataagaacggcgacggactgctcaatatagaggaaattcatcagctgatgcataagctcaacgtgaacctgccaagacggaaggtcagacagatgttccaggaagcagacaccgatgaaaaccagggaacactgacattcgaggaattctgcgtgttctacaaaatgatgagcctgagacgcgacttgtacctgctactcctgtcttattcagacaaaaaagatcacttaaccgtggaagaactggcccagtttctgaaggtggaacagaaaatgaacaatgtgacaactgattactgtttggacattatcaagaagttcgaagtgtcagaagaaaataaagtgaagaatgtcctgggtatcgagggctttactaactttatgagatcacccgcctgtgatatattcaacccgctacatcacgaggtgtatcaggatatggaccagcctctctgcaactactacatcgctagcagccataacacttatctgacaggggaccagcttctgagtcagagcaaggtcgatatgtatgctagggtattgcaagaaggttgccggtgtgtggaagtcgactgctgggacggacctgatggcgaacccgtggtgcaccacggttatactctcacttccaagattctgttccgcgatgtagtagagaccatcaataagcacgctttcgtgaaaaatgagttccccgtgatcctgagcatcgagaaccattgttctatccagcagcagcggaagatagctcagtatttgaagggcatcttcggggataagctcgatctgagttctgtggacaccggggagtgcaaacagcttccatcgcctcagagcctcaagggcaaaatccttgttaaggggaagaaattaccatatcatctgggcgacgacgctgaggaaggagaagtgagtgacgaagattccgctgatgaaatcgaggacgagtgcaagtttaagttgcactacagcaatggcacaacagagcaccaagttgagtcgttcattcgaaagaagctagagtcactgctgaaagagtcacagattagggataaagaggacccagattctttcaccgtgagagccctgttgaaagctactcacgagggcttaaacgcacacctgaaacagtctcccgatgtgaaggaatccgggaaaaaatcccacggtcgcagtctgatgaccaatttcggtaagcacaagaagactactaagtcccgcagcaagagctatagcactgacgacgaagaagacacgcagcagtctacaggaaaggaaggaggccaactgtataggctgggccgccgacgaaagaccatgaaattatgtcgtgaactcagcgatctagtggtctacacaaactctgtcgcagcacaggacattgtggacgatgggactacgggaaacgtgctatccttctcggaaactcgcgctcatcaggtcgtgcagcagaagagcgagcagtttatgatatataatcagaaacagttgacacgcatctaccctagcgcatatagaattgactcatccaatttcaaccctctcccctattggaacgccgggtgtcagctggtcgcactaaattaccagtccgaggggcggatgatgcagctgaatcgcgctaagtttaaggccaacgggaactgcggatacgtgctcaagccacagcagatgtgcaaaggcaccttcaatccgttcagcggagatcctctcccggctaacccgaagaaacagctgattttgaaggttatttccggacagcaactaccgaagccacctgatagtatgttcggtgatagaggagagattatagatccatttgtagaggtggaaatcatcggactccctgtcgactgctgtaaggatcagacgcgggtggtggacgataatggttttaatcccgtttgggaggagactctcactttcactgtgcatatgcccgagattgcactggtccgttttctggtgtgggaccatgatccaatcgggagggactttgttggacagcgcacagtcactttcagttcactcgttcccgggtatagacatgtctatctggagggtctgactgaagcctccatattcgtccacattacaatcaacgaaatttacggaaaaaaccgccagttgcagggactgaaaggcctgtttaataaaaatccaaggcattcatcctcagagaataattctcattacgttcgcaagcgatcaataggcgatagaattctccgtaggacagcctctgctccggctaagggtcggaaaaaaagcaaaatgggattccaagagatggtggagataaaagatagtgtatccgaagccacccgcgaccaagatggggtgctgcggcgcaccacccgaagccttcaggctcgtccggtgagcatgcccgttgatcggaacttactgggggcactaagcctgcctgtatccgaaacagcaaaagatattgagggaaaggagaactccctggccgaggacaaagacggccggaggaagggaaaagcgagcatcaaagacccccattttctcaatttcaacaagaaactgagctcatcatcatccgccctgctccataaagataccagtcagggggacactatcgtgtccacggcccatatgtccgtcaccggagagcaactggggatgagctctcccaggggtggaaggactaccagcaatgccacaagtaactgccaagaaaatccatgcccgtccaagagcttgagcccaaaacagcatctagcccccgacccagtcgttaatcctacacaggaccttcacggagtcaagatcaaagagaagggcaatccagaggattttgtggagggaaagtccatcctgtctgggtccgtactgtcccactctaaccttgagattaagaacctggaggggaatcgcggcaaaggaagggcggcaacgagttttagtttgtctgatgtttctatgctgtgctccgacatcccggacctccactccaccgctattctccaagaaagtgtaatcagccatttgattgataacgtgacactgactaacgaaaacgaaccaggtagctcaatcagtgctctaattgggcagttcgatgagactaataaccaggctttaaccgtagtgagccacctacataatacatccgtgatgtctggacactgccccctcccatctctaggtttaaaaatgcccataaagcacggtttctgcaaagggaaatcaaagtcttcgttcctatgttcttcccctgagctgattgctctgagttccagtgagactaccaagcacgccacaaatactgtctatgagacgacgtgtacacctatcagtaagacaaagccagacgacgacttaagttcgaaggccaagaccgctgctctggagtctaacctacccgggagtcccaacacctctcgcgggtggttgcccaaatccccgacaaaaggcgaggactgggagacgctgaagtcctgctcgccagcttcatctcccgacctgacactggaggatgtgatcgcggaccccactctttgtttcaattcaggcgaatcgtcactggtggaaattgacggggagtccgagaatctgtcgctgacaacatgtgagtataggcgagaaggaacgtcccagttggcaagtccgttgaaattaaagtacaaccagggggtggttgagcacttccagcggggactccgcaacggttattgcaaagaaacacttcgaccgtcggtgcccgagatatttaataacatccaagacgttaaaacacagagtatatcctatttggcataccagggcgccggttttgttcataaccactttagcgactccgatgctaagatgttccagacttgcgtgccacagcagagttctgcgcaggacatgcacgtgcctgtgccaaagcagctggcacatctgcccttacccgccttaaaactacccagcccgtgcaagtctaaatctctaggagatctgacatcagaggacattgcctgcaattttgagtccaagtatcagtgtatcagcaagagcttcgtcaccactgggatccgcgacaagaaaggggttactgtaaagacgaaatccctcgagccgatcgatgcgctgaccgagcagctgcggaaactagtgtcgttcgatcaggaggacaattgccaggtcctctactccaaacaggacgccaatcaacttccgcgtgctctcgtccggaagttgtcatcgaggtcacagtcacgggtgcggaatatcgccagccgggccaaggagaaacaggaagccaacaagcagaaagtacccaatccctctaacggcgcaggcgtggtactacggaataaaccaagcgcccctactccagctgtgaatagacactccacgggaagctacatagctggctacctgaaaaataccaaggggggcggtctggaagggcgaggcatacccgaaggtgcgtgtactgcattgcactacggtcatgtggaccagttttgcagcgataactccgtgttgcagaccgagccttcttctgacgacaaacccgaaatctattttttgctcaggttgtag

SEQ ID NO: 199519 - DNA, 3009 bp, synthetic construct
  misc_feature 1..3009: note = Description of Artificial Sequence: Synthetic coding sequence
  source 1..3009: mol_type = other DNA
atggccgacctggaggtgtacaagaacctgagccccgagaaggtggagcggtgcatgagtgttatgcaatcaggcacccagatgattaagcttaagagggggacaaaaggactagttcgacttttttacctggacgagcatcgcacccggttgcggtggagaccatcccgcaaaagcgaaaaggcaaaaatcctgattgattccatttataaagtaactgagggcaggcagtccgagatcttccaccggcaagctgagggaaactttgatccaagttgctgcttcactatataccacgggaatcacatggagagtctagatcttattacttccaatccggaggaggcccggacgtggatcaccgggctcaagtacctgatggctggcatttcagacgaagattccctcgccaagcggcagaggacgcacgatcagtgggttaaacagacgtttgaggaagccgataagaatggcgacgggctactgaacatcgaggaaatccatcagctgatgcacaaactgaacgtcaacctccctaggcgcaaagtgcgacagatgtttcaggaggcggacaccgatgaaaatcaaggtacccttacctttgaggagttctgtgtgttctacaaaatgatgtccctccgaagagacttgtatttgctacttctgagctactccgataaaaaggatcacctgactgtggaggaactggcccagtttttgaaagtcgagcaaaaaatgaataacgtgaccacagactattgtctggacattattaagaaattcgaggtctcagaagaaaacaaggtaaagaacgttctgggcatcgaaggttttaccaacttcatgagatctcccgcttgtgatatttttaatccactgcaccacgaggtgtatcaggatatggaccagccactgtgtaattattacatcgccagttctcacaatacgtatcttaccggggatcagttgctgtctcagtcgaaggtggatatgtacgcccgcgtgctccaggaagggtgcaggtgtgtggaagtggactgttgggatgggcccgatggcgagccagtggtccatcacggctataccctgactagtaagatcctgtttagggatgttgtggagacaatcaacaagcacgcctttgtgaaaaatgaattccccgtcattctgtctatagagaaccattgttccatccagcagcagagaaagatcgcccaatatcttaaagggatattcggcgacaaactggatctctcctctgtcgacacaggggagtgcaagcagctgccaagccctcagtcactcaaaggcaagatactcgtgaaagggaaaaaattgccctatcatctgggggatgacgccgaagagggcgaggtgtccgatgaggactcagccgacgaaatcgaagatgaatgtaaattcaagctgcattattctaacggtacaacagaacaccaggtggagagcttcattcgaaagaagcttgaaagtttactaaaggaatcccagatcagggacaaggaggacccagatagttttactgtgcgagcgctccttaaagcgacacatgagggccttaacgctcaccttaaacagagcccagacgtgaaagaatcgggaaagaagagtcacggccgatcactgatgactaattttggaaaacataagaaaactacgaaatctcgatctaagagctactctactgatgatgaggaggacacgcaacagagcaccggcaaggagggaggccaactttatcggttaggtcgacggcggaaaaccatgaagttatgcagggagttaagtgacctagtggtgtacacaaacagtgtagccgcccaggacattgtcgatgatggcacaacaggaaacgtgttgagtttcagtgaaaccagagcccatcaagtggttcaacaaaagtccgagcagtttatgatttataaccagaaacagctcacaaggatctacccttcagcctatagaattgactctagcaatttcaatcctctgccctattggaacgcaggatgtcaactagtggccctcaactaccagtcagaggggaggatgatgcagcttaatcgggccaagttcaaggcaaacggcaattgcggctacgtgctgaagccacagcaaatgtgtaaggggacattcaatccctttagtggcgatcctctcccagccaatcctaagaagcagctgatcttaaaagtgatctccggccagcaattgccaaagccccctgactctatgttcggcgacagaggagagatcattgatccctttgtggaggtcgaaataatcggtctacctgtggattgctgcaaggatcagaccagagtcgttgatgataatggcttcaaccccgtgtgggaggaaaccctgacctttaccgtccacatgccagaaattgccctggtgagattcctggtgtgggatcacgatcccatcggccgcgattttgtgggccagcgcacagtgacattcagttctttagtccccggatatcgccacgtgtacctcgaggggcttaccgaggcctccatcttcgtgcacattacgattaacgaaatttacgggaagtggtcacccctaatcctgaatccttcctataccatattgcatttcttgggagctacaaagaaccggcagctgcagggcctgaagggactgtttaacaagaaccctagacatagttcttcagaaaacaacagccactacgtacggaaacgatcaattggggacagaattttgcgccgcacagctagtgcaccagcgaagggacggaagaaaagtaagatgggtttccaggaaatggttgaaatcaaagatagtgtgtccgaagctacccgggatcaggacggggtcctgcggaggactaccaggtccttgcaggcgcgacctgtgtcaatgcccgttgaccgaaacctgttaggcgcgctgtcattgccagtctctgagaccgccaaagatatagaggggaaagaaaatagtctggtccagatatag

SEQ ID NO: 199520 - DNA, 4968 bp, synthetic construct
  misc_feature 1..4968: note = Description of Artificial Sequence: Synthetic coding sequence
  source 1..4968: mol_type = other DNA
atgagcgtgatgcagagcggcacccagatgatcaagctgaagcggggcactaagggtttagtcaggcttttttacctggatgaacataggacacgactgagatggaggccaagcagaaaaagtgaaaaagcgaaaattctgatcgactccatttacaaggtcacagagggccggcaatccgagattttccaccgacaggctgaagggaactttgatcccagctgctgtttcactatttaccatgggaaccatatggaatctctcgacctcataacatctaaccccgaagaagcccggacatggatcacaggcttgaaatacttgatggctgggatttcggacgaagactctttggccaagaggcagcgtacccatgaccaatgggttaagcaaaccttcgaagaggccgataagaacggagatggcctgctgaacatcgaggaaattcaccagttaatgcacaaattaaatgtgaatctcccacggcggaaagtgcgccaaatgtttcaggaggccgataccgatgagaatcaaggcaccctgaccttcgaagaattctgcgtgttttacaagatgatgtctctgcggagggacctatacctactcctgctgtcctactcagataaaaaggatcacctcactgttgaagaactggcccaattcttgaaagtggagcagaaaatgaacaatgtgactacggactattgtcttgatattatcaaaaaatttgaggtgtcagaagaaaataaagtcaaaaatgtactcggaatcgaagggttcactaattttatgcggagccctgcttgcgatattttcaatcctctgcatcacgaagtgtaccaggatatggaccagcccctgtgcaattactatatcgcgtcatcacataacacgtacctgaccggcgatcagctgctctcccagagtaaggttgatatgtacgcccgcgtcctccaagagggatgcagatgtgtggaggtagattgttgggacggcccagatggggaaccggttgttcaccatggatacaccttaacttccaaaatcttgtttagagacgtggtggagaccatcaataaacatgcctttgtaaagaatgaatttccagttatcctcagcattgaaaatcattgtagcattcaacaacagaggaaaattgctcagtacttgaagggaatttttggagataaactggacctctccagtgttgacaccggagagtgtaaacagctcccaagcccccagtcactgaaggggaagatcctagtgaaggggaaaaagctgccctaccacctgggagatgatgcagaggagggagaggtgagcgatgaagacagcgctgatgaaatcgaggatgaatgcaagttcaaactccactacagcaatggcaccacagaacaccaggtggagagttttattcggaaaaaactggagtcactcctcaaggaatcccagatacgggataaggaagatccagattctttcaccgtgcgcgccctcttgaaagccacacacgagggcttgaatgcacatttgaagcagagccccgacgtcaaggaatccggaaagaaatcccacgggcgcagcctcatgaccaattttgggaagcataaaaaaaccacaaaatccagaagcaagtcctactcaaccgacgatgaggaggatacacaacagtccacaggtaaagagggcggccagttgtacagactcggacggagacggaagacaatgaaattatgtcgagagctgtcagacctggttgtttacacaaactccgtggccgcccaggacatcgtcgacgatggaacaacaggcaatgttctttctttctcagaaactcgagctcaccaagtggttcagcaaaagtcagagcagttcatgatatataatcagaagcagctcactcgaatctatccgtctgcttatcgaatcgatagctcaaatttcaatcctctcccttattggaatgctgggtgtcagctggtggcactcaattaccagtcagaaggtaggatgatgcagctaaaccgcgcaaagttcaaggccaatggtaattgcggctacgtgcttaaaccccaacagatgtgtaaaggtaccttcaatcccttcagcggagacccgctgcccgcaaacccaaagaagcaactgattcttaaggtgatttcaggtcagcagttacctaaaccccctgatagtatgtttggcgacagaggggaaataattgacccctttgttgaggtggagattatagggcttcctgtggattgttgtaaggaccaaacgagagtagtcgatgataatggatttaacccagtatgggaagagactttgaccttcaccgtccacatgcccgagatcgccttggtgcgcttcctcgtctgggaccacgacccaattggtagggattttgtcggtcagagaactgtcactttctcatcactggtgccaggataccggcatgtgtacctggagggcctcacagaggcttccatctttgttcatatcacaataaatgagatctacggcaaaaatcgacaactccaaggactgaagggtttgttcaataaaaaccctcgccacagttcctcagaaaacaatagccactatgtgcgcaaaagatctattggggacaggattcttaggaggacagctagcgccccagctaaagggagaaaaaaaagcaaaatgggatttcaggagatggtcgaaataaaggattccgtgagtgaagccacgagagaccaagacggagttctgcggcgaacgacgaggtcccttcaggcccgacctgtgagcatgccagtcgatcggaatctactcggagccctttccctgcccgtctcggagaccgccaaggacatagaggggaaggagaactcactggcagaagacaaagacggccgtagaaaggggaaggcaagcatcaaagatccccatttccttaactttaacaagaagctgagttcgagctcaagcgctctgcttcacaaagacacttctcagggagacacaatcgtcagtacagcccacatgagcgtgaccggtgagcagctgggaatgtctagcccacgtggaggccgtacaacgtcaaacgctacatctaattgtcaggagaacccttgtccaagcaagagtttatcccccaagcaacatcttgcccctgatcctgtggtgaaccccacccaggatttgcatggagtcaaaattaaagaaaaaggcaaccccgaggacttcgtggaggggaagagcattctgtccggttcagtgttgagtcactcaaatctcgaaataaagaaccttgaaggaaaccggggtaaaggtcgggcggcaacgagtttctcactgagtgacgtgagcatgctatgtagtgatatcccagatctgcactctacagccatactgcaagaaagcgttattagtcatctcatcgataatgtgacactaacaaacgagaacgaacctgggagcagcatttctgctttgataggacagtttgatgagacgaacaatcaggctttgacagtggtgtcacacttacataatacttccgtgatgagtgggcattgtcctctcccctcacttggtctcaaaatgccaataaaacatggcttctgtaagggcaagtccaagtcttcctttctgtgcagtagccccgaactgatcgctctctctagctctgaaacaaccaagcacgccacaaacaccgtctacgagacaacctgtactcctatctcaaaaactaaacctgatgacgatctgtccagtaaggctaaaaccgccgccctggagtctaatctcccaggctcacctaacacgtctaggggctggctgcctaaaagccccactaagggtgaagattgggaaaccctgaagagttgtagccctgcaagctcaccggatcttaccctggaagatgtcattgccgatccaacattgtgctttaattcaggggagtcaagtctcgttgaaatagacggcgaatctgagaatctgtccctgactacttgcgagtaccgcagggaaggcacgtcacagttggccagtccactaaagctgaaatacaaccaaggcgtggtcgaacacttccagagaggattgcgtaacggctattgcaaggagaccctcagacccagcgtcccggagatatttaacaacattcaagatgtaaaaacccagtctatatcttacctggcatatcagggcgcaggatttgtccataaccacttctccgactccgatgcaaaaatgttccagacatgtgtaccccagcagtcatctgctcaggatatgcatgtgcctgtgcctaaacaactggcacacctccctcttcctgcattgaagctgccatcaccatgcaaaagtaagtctctaggagatcttacctcagaagatattgcctgcaactttgagtcgaaataccagtgcatctcgaagtcgttcgtgacaacaggcattcgggacaaaaagggggtgactgtgaagaccaagtccctggaacctatagatgccctgacagagcagttgagaaagctggtgtcattcgaccaagaagacaattgccaagtgttgtatagcaagcaggacgccaaccaacttcctagggcactggtaagaaagctgtcctcacggagtcagtctcgagttcggaatattgcatcacgtgccaaggaaaaacaagaggccaataaacagaaagtccccaacccgtcaaacggagccggggttgtgctgcgaaacaaaccctccgctcctactcctgccgtcaaccgtcacagcaccggaagttatatcgcggggtatctcaaaaacaccaagggcggcggcctggaaggaagaggcattcccgaaggagcatgtacggccctgcactacggccacgtggaccagttctgttcagacaattcagttctacagaccgagccttcctctgacgacaagcctgagatttatttcctgctcaggctttag

SEQ ID NO: 199521 - DNA, 3045 bp, synthetic construct
  misc_feature 1..3045: note = Description of Artificial Sequence: Synthetic coding sequence
  source 1..3045: mol_type = other DNA
atggccgacctggaggtgtacaagaacctgagccccgagaaggtggagcgctgcatgtccgtgatgcagtctggcactcagatgatcaagctgaagagaggaaccaagggcttggtgcggcttttttatcttgacgaacatcgaacaagattgagatggcgtccttctaggaaaagcgagaaggcaaagattctgatcgatagcatttataaggttactgagggcaggcaaagcgagatcttccatcgacaagctgaaggcaatttcgatcccagttgctgcttcactatctatcacggtaaccacatggaatctttagatctcatcacatcaaatcctgaagaagctaggacctggattaccggcctgaagtaccttatggccggcatcagcgacgaggactctttggccaagagacagaggactcacgatcagtgggtcaagcagacattcgaagaagccgataagaatggagacgggctgctgaatattgaagagattcatcaactgatgcataaactgaacgtgaatttgcctcgaagaaaagtcagacaaatgtttcaggaggctgacacagatgagaaccagggcacgttgacatttgaagagttctgcgtcttttacaagatgatgtcactgcggcgagacctgtatcttttactcctatcctattccgataagaaggatcatcttactgtagaggaattggctcagttcctgaaagtagagcagaagatgaacaacgttaccacagattattgcctcgacattattaagaaattcgaggtcagcgaggaaaataaagtgaagaacgtgctcggaatcgaagggtttacaaatttcatgcggtcacccgcctgtgatatatttaatcccctccaccatgaggtctaccaggatatggatcagcctctttgtaactattatatcgcaagctcacataatacctatttaaccggggaccagttgctctctcaaagcaaggttgatatgtacgctcgggtgttgcaggagggctgccggtgcgtggaggtcgattgttgggacggaccagacggtgagcccgtggtgcaccatggctacaccctgaccagtaagattctctttcgagatgtagtagaaactatcaataagcacgcctttgtgaaaaatgagtttcccgttatcctaagtatcgagaatcactgttctatccagcagcaacgaaagattgcacagtaccttaaaggaatctttggggacaaactggaccttagctccgtggataccggcgaatgcaagcagctgccaagcccccagtctctgaaggggaaaatcctcgtgaaggggaagaaactgccatatcacctcggagacgacgctgaggagggcgaagttagcgatgaagactctgctgatgagattgaagacgaatgcaaattcaaactgcactactccaacgggactaccgaacaccaggtagagagctttatcagaaaaaaattagagagcctgctgaaggagtctcaaatcagggataaggaggatcccgacagctttaccgtcagagctctgttgaaggctactcatgaggggttgaatgcgcaccttaagcaaagcccggacgttaaagaaagcggcaagaagagccacggacgctctctgatgaccaacttcggtaaacataagaagacaacgaaaagccgaagcaaaagctattcaacagatgatgaagaagacacccagcaatccaccgggaaggaggggggccagctgtatcggcttgggaggcggcggaaaacgatgaagctttgtagggagcttagtgatctggtggtgtacaccaacagcgtggccgcacaggatattgtcgatgacggtactaccgggaacgtcttgtcattcagcgagactagagcgcaccaggttgtgcagcaaaaaagcgagcaatttatgatctataatcagaagcagctgactaggatttacccgtcagcctatcggattgacagttccaactttaatcccctcccgtattggaatgccggctgccagttggtggccctgaactaccagtccgagggtcgcatgatgcagctgaacagggcgaagttcaaagcaaacggtaactgtggttatgtgctcaaaccacagcagatgtgtaagggtacctttaatccattttcgggcgaccctctgccagccaatcctaagaagcagctgattctgaaagtgatctcaggacagcagttgccgaaacccccagactccatgtttggggatagaggggagattatcgatccctttgtggaggtggagataattggacttcccgtggattgctgcaaagatcagactcgagtcgttgacgacaatggattcaaccccgtttgggaggaaactctcacttttactgtccacatgcctgagattgctctggtgaggtttctggtgtgggatcacgaccctatagggagggacttcgttgggcagaggaccgttacattctccagtcttgtgcctggctaccgccatgtgtacctggagggcctcactgaggccagcattttcgtgcacatcactattaacgaaatttatggcaagaatcgacagctgcagggcctgaagggcctgttcaataagaatccccgacactccagctcagagaacaattctcactacgtgcgtaagcgttctataggggaccggatcctcaggcgtacagcttcagctcccgccaagggccgaaagaagtccaaaatgggatttcaggaaatggtagaaatcaaggattctgtgagcgaagcaacaagagatcaggatggggtgctccgacgcaccaccaggtcccttcaggctcgtcccgtgagcatgcccgtggacagaaacctgctcggagccttgtcgctcccagtgtctgagacagcaaaagacatcgagggtaaggagaactcactggacagcagcttctgccgccccacagaacaggctaaggccgagatgtgcaaagtcccattcccccggcagctggaatgtgtgatgaagatggaaattagtgagacctag

SEQ ID NO: 199522 - DNA, 3507 bp, synthetic construct
  misc_feature 1..3507: note = Description of Artificial Sequence: Synthetic coding sequence
  source 1..3507: mol_type = other DNA
atgttccgggaggccgacaccgacgaccaccagggcaccctgggcttcgaggagttctgtgctttttacaaaatgatgtcaacccggagagacctctacctgctgatgctgacatactcgaaccataaagaccatttggatgcagcatctctgcaaaggttcttgcaagtcgagcagaaaatggccggcgtaacccttgaatcatgccaagatattatagaacagtttgagccttgcccagaaaacaagagcaaaggactcctgggaattgatggttttaccaattacactcgctctcccgccggcgatatattcaatcctgagcatcaccacgtgcaccaggacatgactcaacccctgtcccactacttcattacgtcatcgcataacacttacctagttggagatcaactgatgtctcagtcacgtgtcgacatgtatgcatgggtcctgcaggctgggtgtaggtgcgtggaggttgattgctgggacggacccgatggagagcctatcgtgcaccatgggtatactttgacttcgaaaattctctttaaagatgtcatcgagacgattaacaagtacgctttcatcaaaaacgaataccccgtcatcctttcaattgagaatcactgctcggtcattcagcaaaagaaaatggcccaatatctgaccgatattctgggcgacaagctggacctgagctctgtgtctagcgaggatgcaactaccctcccttcccctcagatgctgaagggaaaaattttggtcaagggcaagaagctgcctgcaaacatctcggaggatgcagaggagggcgaagtgagcgatgaggactctgccgacgaaatagatgatgactgcaagctgttaaacggtgacgccagcaccaatcggaaacgggtcgagaacaccgcaaaacggaaactcgacagtctgatcaaggagtcaaagataagggactgcgaagacccaaataactttagtgttagcacactctccccgtctggaaagctggggagaaagtcaaaggccgaggaggatgtggagtctggtgaagacgccggcgccagtcgaaggaatggtcggctcgtggtgggttctttttccagacgcaaaaagaagggcagcaagcttaagaaagccgcttcagtggaggagggcgacgaaggacaagattcaccagggggccagtcccggggggcgacaagacaaaagaagaccatgaaactgtctagggcgctgagcgacttagttaagtatacaaagtctgtggccacacacgacattgagatggaggccgctagtagttggcaggtgagcagtttcagcgaaactaaggctcaccagatcctccagcagaagccggctcaatatttgagattcaatcagcagcagctgtcacgcatttacccaagttcttaccgcgtggacagctctaactacaatccacagccattctggaacgcaggatgtcaaatgggagtgttcaatcctaacagcgaggacccactgccaggacaattgaagaaacagcttgtgctgaggatcatttcagggcagcaattacctaagcccagggatagcatgctgggggacaggggcgaaataattgacccattcgtcgaggtcgaaatcatcggtttgcctgtggattgtagcagggaacagacccgtgtggtggacgacaacggttttaaccccacatgggaagagacgctcgtgtttatggttcacatgcctgagatagcgctggtgcgcttccttgtgtgggaccacgacccaattggacgagacttcatcgggcagaggaccctcgcctttagttctatgatgcccggttaccggcacgtctacctggagggaatggaggaagcaagcattttcgtgcacgtggctgttagtgacattagcggcaaggtgaagcaggccttaggtcttaagggactgttcctcagaggtcctaaacctggaagccttgactcacatgccgccggccgtcctcccgcacgccccagcgtgtcccaacgaatcctacggagaactgcgagcgccccgactaaatcacaaaagccaggacgcagaggctttcccgagctggtgctgggaacacgagatacgggtagcaaaggggtggccgacgatgttgttccaccagggcccggaccagcgcctgaggcaccagctcaggaaggacctgggtcaggtagtccgagggatactcggccccttagcacccagcggcccttgccacccctgtgtagcctggagacaatcgctgaagagccggctccaggaccagggccaccccccccagcagccgtgcctacaagctctagtcagggacgaccgccatatccaaccggtcccggcgctaacgttgcatctccactggaagatacggaagaaccacgtgactcccggccccgcccatgcaatggcgaaggtgcgggcggcgcctatgagcgcgctcccggatcgcagaccgatgggaggtctcaaccacgaacgctcggccacctaccagtcatccgtagagtcaaatctgaaggtcaggtgccaacagaacccctgggtggctggcgccccctggccgccccattccctgctccagcggtttattcagatgctaccgggagcgatccactgtggcagcgcctggaaccctgcgggcacagggactcagtgagcagcagctcttcaatgtcctcaagcgacacagttattgatttgtcgttgccgagcctcgggttgggccgctccagagagaatctggccggagcccacatggggagactcccaccccggccgcactccgcttccgccgccagacctgatcttcctcctgttaccaagtctaagagtaaccccaacctgagagctactggacagcgcccccctattcctgacgaactacagcctcgatccttagccccacggatggctggcctgcctttccgtcccccttggggttgtctttcgctggtcggagtccaggactgccctgttgccgccaagtcaaagagcttgggagacttgaccgcagacgattttgccccatcatttgaaggtggcagcagaagactgtcacatagccttggcctaccaggcggcactcggcgagtgtcgggacctggcgtgagaagggacacgttgaccgagcaactccgttggctcacagtcttccagcaggccggcgacataacgtcacctaccagcctgggtcccgccggcgagggcgtcgctgggggcccagggttcgttcggaggtccagcagtcggagtcatagccgcgtgagagccattgcatcccgggccaggcaggcccaggaacgccagcagcgtttgcaaggcctgggacgccagggcccgccagaggaggagagggggacgcccgaaggagcttgctctgtagggcatgaaggaagtgtggacgcccccgcaccaagtaaaggggctctcggtcccgccagcgctgctgccgagaatctggtgctactacgtctgtag

SEQ ID NO: 199523 - DNA, 1500 bp, synthetic construct
  misc_feature 1..1500: note = Description of Artificial Sequence: Synthetic coding sequence
  source 1..1500: mol_type = other DNA
atgggcgccatgcaggagggcatgcagatggtgaagctgcggggcggatcaaaaggcctggtgagattctactacctggacgaacacaggtcctgcatcaggtggcgccccagcaggaagaacgaaaaggcaaaaatttcaatagatagcatccaagaggtaagtgagggccgacaatcagaagtctttcagcgctatcctgacggatccttcatcatcgatccgtttgtcgaggttgagatcatagggctaccagtagactgcagtcgggagcagacaagagtggtggatgataacggcttcaaccctacgtgggaggagacactggttttcatggtacacatgcccgagattgccctcgtgaggttcttggtgtgggaccacgaccccataggcagagatttcattggacagcggactttagcgttctcttccatgatgccaggctaccgccacgtctacctcgagggaatggaggaggctagcatattcgtacacgtggccgtttctgacatctccgggaaggtgaagcaggcactaggtctcaagggcttgtttcttagaggcccaaagcccggaagccttgacagtcacgccgctggcaggccgccagcaagaccatccgtttcccaacgcatcctcaggaggacggcctctgctccgaccaaatctcaaaagcctggcaggagggggttccctgaactggttttaggtactagagatactggaagtaaaggcgtcgctgacgatgtagtgcccccaggcccgggccccgcacctgaggcgccagcacaggagggcccgggatctgggtccccgcgcggaaaggctcccgccgctgtggcagagaaatctccggtacgcgtgagaccacctagagtgcttgacggtcccggacccgcaggcatggccgccacatgtatgaaatgcgtcgtcggcagctgtgccggagtgaacacaggggggctccagagggagaggcccccttcccctggacctgcatctcgccaagcagcgatccggcagcagccgagagctagggctgattccttgggggcaccctgctgcggcctagatccgcatgcaatccctggaaggagcagagaggcccctaaagggccaggagcgtggcggcaggggcccggcggttctggtagcatgagctccgacagttccagtcccgattctcccggtatccccgaacggtcacctaggtggccagagggtgcctgccgtcagcccggcgctctgcagggagagatgtccgctctgttcgctcaaaagttggaagaaatacggtccaagtcacctatgttttctgctgggaagccactgctgccttgcgtggtgctgccccacgctccaggaatggctggcccgggatcccccgccgccgcatccgcctggacagtatcacctagggtcctggtcctggtagctctatacccgtggcattgcctgcgcggcacccttctgccctggctggcgtgtggcccatag

SEQ ID NO: 199524 - DNA, 3177 bp, synthetic construct
  misc_feature 1..3177: note = Description of Artificial Sequence: Synthetic coding sequence
  source 1..3177: mol_type = other DNA
atggccggcatcagcgacgaggacagcctggcccggcggcagcggacaagagatcagtggttgaaacaaacattcgatgaagccgataagaacggcgacgggagcttgagcattggcgaggtgctccagcttttgcacaagttaaacgtgaacctgcctcgacaacgtgtgaaacagatgtttcgcgaagccgataccgacgaccaccaggggaccctggggtttgaggaattttgtgccttttacaagatgatgtccaccagacgcgacctgtatctgttaatgctgacgtactcaaaccacaaagaccacctggacgccgcaagcctgcagcgctttttgcaggtcgagcagaaaatggcgggagtaactcttgagagttgtcaagatattattgagcagttcgaaccgtgcccagagaataaatccaaggggttacttggtatcgatgggttcactaactatacgagatctcccgccggagacatcttcaacccagagcatcaccacgttcaccaagatatgacacagccactaagccattactttatcactagctctcacaacacctacctcgtaggcgatcagctgatgtcacaaagtcgagtagacatgtacgcctgggtgctgcaagctggctgcaggtgcgtggaagttgattgctgggatggcccagacggtgagcccatcgttcaccacggctatactttgacatccaagatcttgttcaaggacgttatcgagaccattaacaaatatgcattcatcaaaaatgaatatccagtcatcttgtcaattgaaaatcattgctcagtcattcagcagaaaaaaatggcccaatacctgactgacattctcggagacaaactagatttgagcagcgtgtcttcagaggacgcaacaacccttccgtcaccacagatgttaaagggcaaaattctggtgaagggcaagaagctgcctgccaacatatcagaggacgctgaagagggcgaggtgtctgacgaagacagtgccgatgagatagatgacgactgtaagctcctcaacggtgatgcctcaaccaaccgcaagcgggttgagaatactgcaaagcgaaaactcgactctctgattaaagagtcaaagatccgcgactgcgaagatcccaataactttagtgtgtccacactttccccaagtggaaaactgggtaggaaatctaaagctgaggaagacgtcgagagtggagaggacgccggtgcatccagacgtaatggcaggcttgtagtgggctcatttagtagaaggaaaaagaaaggttcaaagctgaaaaaggccgcctcagtggaggagggcgatgagggccaggattcaccagggggtcagagccgcggtgccacacgccaaaagaaaacgatgaagctttctagagccctgtccgatctcgtgaagtacactaagtcagtcgccacccacgacatcgaaatggaggctgcgtcctcctggcaagtcagcagctttagtgaaaccaaggctcatcagattctgcagcagaagccagcccagtatctgagattcaatcaacagcagctgagccgcatttaccccagcagctaccgggtcgattcaagcaattataatccacaacctttttggaacgctggttgtcagatggtcgcgttaaattaccagtccgagggccggatgctgcagttgaaccgtgccaaattttccgccaatgggggttgtggttacgttctgaagccaggatgtatgtgtcaaggcgttttcaatcccaactctgaagaccctctgcccggtcagctcaaaaagcagctggtgcttcggattatatccggacaacaattgcccaaaccccgagatagtatgttaggcgatagaggagaaattatagatccatttgttgaggtggaaatcatcggactcccggtcgattgctctcgcgaacagacacgggtcgtggatgataacgggtttaatcctacttgggaagagaccctcgtgtttatggtccatatgcccgagatagccctggtgagattcctggtatgggatcacgacccgatcggtcgggactttattggccagcgaactttagccttttcatctatgatgcctggatacaggcacgtataccttgaaggcatggaagaagccagtatcttcgtgcatgtggccgtctcagatatttcaggtaaagtgaagcaggctttgggactgaagggcctgtttttgcgcggcccaaagcctggtagtctggacagccacgcagcaggtcggcctcccgctaggccttcagtgtctcaaaggattctgcggcgaacagcctccgccccaacaaaaagccagaaacccggtcgccgcggctttcccgagctcgtcctcggaacccgggataccggttcaaaaggggtcgccgacgatgtggtgccgccaggacccggacctgccccagaggcacccgcacaagagggcccaggcagtggatctccgcgagggaaagcacccgctgccgtggcagagaaaagcccagtgcgggtcagaccacctcgggtcttggacggtcccgggcccgctggcatggcagccacctgtatgaagtgcgttgtcgggtcctgtgccggcgtcaacacaggcggcctgcaacgcgagagacctccctcacccgggcccgctagtcgccaggccgcaattcggcagcagccgagggccagggctgactcccttggcgcaccttgctgcgggcttgacccccatgcaatccctggacggtcacgcgaagcccccaagggaccaggggcttggaggcagggacctggtgggagtgggtctatgtctagcgactcatccagcccagatagccccggaattccagaacgttcccctcgctggcccgaaggggcttgcagacagcctggcgcccttcagggggagatgtctgccctttttgcacagaaactggaggaaattagaagcaaatcacctatgttcagcgctgggaaacccctgctgccatgcgtcgtcctgccgcacgctccaggaatggctggccccggaagccctgcagccgcaagcgcctggactgtgtccccgcgcgtgctggtgcttgtggctctttatccctggcattgtttgcgaggaaccctgctgccttggctcgcttgtgggccatag

SEQ ID NO: 199525 - DNA, 1494 bp, synthetic construct
  misc_feature 1..1494: note = Description of Artificial Sequence: Synthetic coding sequence
  source 1..1494: mol_type = other DNA
atgggcgccatgcaggagggcatgcagatggtgaagctgcggggcggcagtaaaggattggtgcgattttattacctcgacgagcaccgttcctgtatacgctggaggccctctagaaagaatgagaaggcgaaaatcagcattgatagcatccaggaggtgtctgaaggacgacagagcgaagtcttccagagatacccggatggatcttttgacccatttgtggaggttgaaattattggactgcctgtagactgttccagggagcagacacgggttgtggatgacaacggcttcaatcctacatgggaggagaccttggtttttatggtgcacatgcccgagatcgcccttgtgcggttcttggtgtgggaccatgatcccatcggaagagattttatcggccagaggaccctagcattctccagtatgatgccgggttatcgccatgtatacttggagggcatggaggaagctagtatttttgttcacgtggctgtcagtgacatcagtgggaaggtcaaacaagcgctcgggttgaagggtcttttcctccgcggccctaaaccaggtagtctggattcgcacgccgccggtcgtccccccgctcgaccttctgtgtcccagagaattctgcgacggacggcctccgcccctaccaagagccaaaagcccggccgacgaggatttccggaactggtgctgggaaccagggatacgggaagcaaaggcgttgcagacgatgtggtgcccccaggcccaggccccgcacccgaagcaccagcacaggagggacccggctcgggatcacctagggggaaagccccagcagccgtcgccgagaaatctccagtcagggtgcgaccccctagagtcctggacggaccgggccccgcaggcatggccgccacctgcatgaaatgtgtagtcgggtcctgcgctggtgtgaacacgggaggcttacagcgagaacgtcccccctctcccggtccagcctctcggcaagccgccatcaggcagcagccccgggcacgagccgatagcctaggagcaccctgttgtggactggatccacatgctataccgggccgctcccgcgaagcacccaaaggccccggagcctggcggcagggccccggaggttcaggcagtatgtcttccgactccagtagtcccgactccccaggcatacccgagagatcccctcgctggccagagggcgcctgcagacaacccggtgctctgcagggggaaatgtcagccttgttcgctcagaaactcgaagagattaggtctaagagtcctatgttttccgctggcaaaccactccttccttgcgtcgtcctgccccacgcaccaggcatggcggggccaggttctccagctgctgcgtccgcctggacggtctccccaagggtgcttgtccttgtggccctttacccgtggcactgtttaagagggacactcctaccatggctagcttgtggtccctag

SEQ ID NO: 199526 - DNA, 4251 bp, synthetic construct
  misc_feature 1..4251: note = Description of Artificial Sequence: Synthetic coding sequence
  source 1..4251: mol_type = other DNA
atgagcggcccctggcccagccccgacagccggaccaagggcaccgtggcctggctggccgaagtgttgctgtgggtgggtggctctgttgtgctctcgtctgagtggcaactggggcccttggtggagcgctgcatgggcgccatgcaggaggggatgcagatggttaagcttcgggggggttctaaggggctcgtacgcttctactatttagacgagcatcggtcctgtattagatggagaccctctcgcaaaaacgagaaggctaaaatatcaattgattcaatccaggaggtgtctgaaggccgtcagagcgaggtatttcagaggtaccccgatggaagcttcgacccaaactgttgtttttctatctaccatggctcacacagagaatcccttgatctcgtcagtacgagttctgaggtggcacgcacctgggtgacagggctcaggtacttgatggcaggcatctctgatgaggactccctggcaagaagacaaaggactagagatcagtggttaaaacaaacatttgacgaggcagataaaaatggggacggatccttaagcatcggagaggttctgcagctcctacacaagctgaacgtgaatctcccccgacagcgggtgaagcaaatgttcagagaggcggacacagatgaccaccaggggaccctgggcttcgaggagttttgcgccttctacaagatgatgtccactcgacgcgatctgtatctgctgatgctaacctattcaaaccataaggaccatttagatgctgcttcgctgcagcgcttcctccaggtagagcaaaaaatggctggagtcaccctggaatcatgtcaggatattatagaacagttcgaaccttgtccggagaataaatctaaggggcttcttggtattgatggttttacgaactacacaagatccccagcgggggacatatttaatccagaacaccatcacgtccaccaggatatgactcagccgctcagccactattttatcacgtctagccacaacacctacttggtcggagatcaactgatgtctcagtcgagagttgacatgtatgcctgggtgcttcaggccggctgcagatgcgtggaagtcgactgctgggatggccccgacggggaacctattgtccaccatggttataccttaacatccaaaattctgtttaaggatgtcatagagacgatcaataagtatgcgttcattaaaaatgaatacccggtgattctgtctatcgagaatcactgcagtgtgattcagcagaaaaaaatggcccagtatttaaccgacattctcggagataaattggatctgtctagcgttagctccgaggacgctactaccctgccatctccccagatgctcaaaggaaagatcttagtgaaaggcaagaaattgcctgcaaacatctccgaggacgccgaagagggggaggtttcggatgaagatagcgccgacgaaatcgacgacgactgcaagcttctcaacggggatgcctccactaaccgtaaaagggtggagaacacagccaagagaaagttggactccttgatcaaggaatctaaaatacgggactgcgaagacccgaacaactttagcgtgtcaacgctaagtccctcaggcaaactggggagaaaaagcaaagccgaggaggacgtcgagtccggggaagacgccggtgcaagtcggcgtaacgggcggttagtggttggctcattctctaggagaaaaaagaaaggcagtaaattgaagaaggcagccagcgtggaggagggagacgagggtcaagactcacccgggggtcaaagccgaggtgctacaagacagaaaaagacaatgaaattatctcgggctctgtctgacttagtcaagtacactaaatctgtcgccacacacgacattgagatggaggctgcctccagttggcaggtgtccagctttagtgagactaaagcacaccagatactgcagcaaaaacctgcacagtacctcaggtttaatcagcagcagctctcccgaatctaccccagcagctaccgtgttgattcctctaactataatccccagccattctggaacgctggctgccaaatggtggctcttaattaccaaagtgagggtaggatgctccagcttaacagggcaaagttttccgcaaacggaggctgcggctacgtgctcaaaccagggtgcatgtgccagggtgtatttaatccgaatagcgaagatccattacctggacagcttaagaagcagcttgtccttaggattatctccgggcagcagttgcctaagccacgcgacagtatgttgggtgaccggggcgagataattgaccccttcgtcgaggtcgagattataggactacccgtggactgctccagagaacagacccgagtggtcgacgacaatggcttcaatcccacctgggaggagactctagttttcatggtgcacatgcccgagattgctttagtaagattcttggtgtgggaccacgacccaattggaagagactttattggacagaggaccctggccttcagctccatgatgcctggctaccggcacgtctacctcgaaggcatggaggaggccagtatttttgttcacgtcgctgtctcagatatcagcgggaaggtgaagcaggccctcggcctcaagggcctttttctgagagggccgaaacccggctctttggactcccacgctgccgggcgccctcccgcaaggccctctgtatctcaacgaattctgaggcgtactgcaagcgcacctaccaagagccaaaagcccgggagacgggggttcccagaacttgttctggggacccgcgacaccggctccaagggcgttgctgatgatgttgtaccccccggtcccgggccagctcccgaggccccagctcaggagggcccaggtagcgggagcccccgcgacacgcgccccctgtctacgcagcggcctctgccaccactctgctcccttgaaaccatcgctgaggagcctgctccaggccccggtccgccaccacctgccgctgtcccaacaagtagcagccagggccgcccaccgtaccctaccgggcctggtgcgaacgtggcgtcaccactcgaagatactgaagagcccagggatagccggcctagaccgtgcaacggcgagggcgccggcggcgcgtacgaacgagctccgggttctcagaccgacggtcggagtcaaccacgcactctggggcacctccccgtcatccggcgtgttaaatccgaaggtcaggtacctactgagccgctggggggatggaggccactcgccgcgccctttccggccccagcagtgtactcagacgccacaggaagcgaccctctctggcagcgtttggagccatgtgggcacagggacagcgtatcatcatctagctccatgagttcttccgataccgtcatcgacctaagtcttccatccctgggcctgggccggtctcgagagaacttggccggtgcccacatgggcagactcccacctcggccccacagcgcaagtgccgcacgcccagatttacccccagtaactaagagtaagagtaaccccaatctgagagctacaggccagcggccacctatccctgacgaactgcagccccgctcactggctccacggatggcaggcctgccattcaggcccccctggggctgcctctctttggtaggagtgcaggactgtccggtagctgctaagtccaagagtctcggcgacttaaccgccgacgactttgcgccctcattcgagggcggaagcaggcggctttcccatagccttggcctgccgggaggcaccaggcgcgtcagcggacccggtgtccggcgcgacactctcactgaacagctgagatggctgacggtcttccagcaagcgggggacattacttcacctacttcactggggccagctggagagggcgtggcgggagggccagggtttgtgaggagatcatcctcaagaagtcacagccgggtacgcgccattgcttctagggccagacaggctcaggagagacagcagaggttgcagggactggggcgccaagggccccccgaggaagagaggggaacgccggaaggggcatgctccgtaggccacgaggggtccgttgacgcaccagcgccctccaaaggcgccttgggcccagcttctgctgccgccgagaacctggtgctgctgaggctctag

SEQ ID NO: 199527 - DNA, 4143 bp, synthetic construct
  misc_feature 1..4143: note = Description of Artificial Sequence: Synthetic coding sequence
  source 1..4143: mol_type = other DNA
atgagcggcccctggcccagccccgacagccggaccaagggcaccgtagcatggttagcagaggtattgctgtgggttggcggatcagtcgtactgtcatctgagtggcagctcgggccactggtcgagcggtgcatgggggccatgcaggagggaatgcagatggttaaactcaggggtggatcgaagggactcgtcaggttctactacctcgatgagcacaggagctgcatccggtggaggccctcccgaaagaatgaaaaagcaaagatttctatagactccatccaggaggtgtctgaggggcggcagagtgaggtcttccagaggtacccggacggctctttcgaccctaattgctgttttagtatttaccacggttcccatcgcgaatcactggatctggtgtcaactagttctgaagtagcacgcacgtgggtcacggggttgaggtacctcatggcaggaattagcgacgaggattccctcgctagaagacagcggacgagggatcagtggctgaagcagacttttgacgaagcggacaagaacggggacggctcactgtccattggagaggtgctgcaattgctgcataagttgaacgtcaacctgcctaggcagcgagttaagcaaatgtttagggaggcagatacggacgaccaccaaggaactttaggattcgaggaattctgcgctttttataaaatgatgagcactcgtcgagatctgtatctgcttatgctgacatactcaaaccataaagaccacttggacgccgcctctctccagcgctttctgcaggtggagcaaaaaatggctggagtaacgctcgagagctgtcaggatatcatcgagcagttcgagccctgccccgaaaacaagagcaaaggactcctgggaatagatggcttcaccaactacacacgcagcccagccggggatatctttaatccagagcaccatcacgtgcaccaagacatgacccagccgttgtcacattatttcatcacgtctagtcataacacatatttagtcggggaccagctgatgagccagagcagggtcgacatgtatgcatgggtgctacaagccggctgtcgttgtgtagaggttgattgttgggacggaccagacggggagcctatcgtccaccacggctacaccctcactagcaaaatcctctttaaagatgtaatcgaaacaatcaataaatatgcgttcattaagaatgaatatcctgtgatcctgagcatagaaaaccactgctcagtcatccagcagaagaaaatggcccagtacctgactgacatactgggggataagctggatctgtcctcagtttccagtgaggatgctaccaccctgccatcaccacaaatgctgaagggcaagattctcgtaaagggcaagaaactcccagcaaatatttctgaagatgctgaagaaggggaggtgtctgacgaagacagtgctgacgagatcgacgatgattgtaagttactgaacggagacgcctcaaccaataggaaacgcgtggagaacactgccaagagaaaattagattctctgattaaagaatccaagatacgcgattgcgaagacccgaataatttcagcgtgagtactctctctccttccgggaaactgggacgcaaatcaaaggccgaggaggacgtcgaatcaggcgaagatgctggcgccagtaggaggaacggtcgcctggtggtgggctccttctcacgccgaaagaagaaaggctccaaactcaaaaaagccgcctcagtggaggagggagatgaaggccaggacagccccggggggcagagccggggagccactcgtcaaaagaaaactatgaaactcagccgggccttgtccgatctggttaaatatacaaaaagcgtggctacccacgatatcgaaatggaagcagcctcttcatggcaagtctcaagcttcagtgagacaaaagcccatcagatcttgcagcaaaagcctgcccaatatctcaggttcaaccagcagcagttgagccgaatttacccctcgtcctatcgcgtggactcgagtaactataacccccaacccttctggaacgcaggctgccagatgggcgtttttaatccaaactcggaagaccctttgcctggccagttaaagaaacagcttgtcctgcggattattagtggacagcaactgccaaagccccgtgactcaatgctgggagacagaggagaaattattgacccattcgtggaggtcgaaatcataggcctgcctgtggactgctcacgagaacagactagagtggtggacgataatgggttcaaccctacttgggaagaaacactcgtgttcatggtccatatgcctgaaatcgcgctggtccggtttctagtgtgggatcatgatcccatcggaagagatttcatcggacagaggacattagcattttctagtatgatgccaggttacagacatgtgtatcttgaaggtatggaagaagcgtctatttttgtgcatgtggccgtcagcgacatctcagggaaggtcaaacaagcattggggttaaaaggactgttcctacgcggccccaagccggggtcacttgatagtcacgccgccggcaggccgcccgcccgcccgtctgtgagtcagagaatcctgcggcgaaccgcctcagcgccaaccaaatcacaaaagccagggcgccggggcttccccgaactcgtgctggggacccgggataccggcagtaaaggggttgccgacgacgtcgtgcccccagggcctgggcctgccccagaggccccggctcaggagggccctggctctgggtctccacgtgacacaagaccgctttctacacagaggcccctccctcccctgtgtagcctcgagaccatcgccgaagaaccagctcccggacctggaccacccccccctgccgctgtacccacctcaagctcccaggggagacccccataccctacagggccaggcgcaaacgtcgcttctcccctggaagacactgaagaaccccgggatagccgtccaaggccgtgcaatggcgaaggggcgggcggagcatacgagcgagccccggggagccaaaccgacgggaggagtcagcccagaaccttgggtcatctaccagtaattaggcgcgttaagtctgaggggcaggtccccaccgagccgctgggtggatggcgtcccctggccgcacccttccctgcccccgctgtctattccgacgcaaccggcagcgatcccctttggcagcgactggagccctgtggtcacagagactccgtctcttcttcaagctccatgtcatctagcgacaccgtgatcgatctgagcctgcctagtcttggcttgggaaggtcccgggaaaacctggccggcgcccacatgggcagactgccccctagaccacactctgcttccgccgcccgaccagatctccctcccgtcaccaagagtaagagtaatcccaatctgagagcaaccgggcagcggccccctattccggacgagttacagccgaggtccctggctcccaggatggccggcctaccatttaggccaccatggggatgcctgagtctggtgggcgttcaggactgtccagtggccgccaagagcaagtccctcggcgatctgacagctgacgactttgccccttctttcgagggcgggtctaggcgattgtctcatagcttaggtctgcccggaggtaccagaagggttagcggtcccggcgtgcggagagataccctcaccgagcagctgagatggcttactgtgttccagcaggctggggacattacgagtccaacgtccctgggcccagccggcgaaggcgtagcaggcggacccggattcgtaagaaggtcgtcttcacgatctcattcacgagtgcgagccattgctagtagagcaaggcaagctcaggagcgccagcagcggctccaagggttgggaaggcaaggccctcctgaggaagaacgcgggaccccagagggagcttgttcagtgggccacgaaggcagcgtggacgctccggctccctccaagggggcactgggacccgcctcagcagccgctgagaaccttgttttactgcggctatag

SEQ ID NO: 199528 - DNA, 2136 bp, synthetic construct
  misc_feature 1..2136: note = Description of Artificial Sequence: Synthetic coding sequence
  source 1..2136: mol_type = other DNA
tgagccctgaactaccagagcgagggccggatgctgcagctgaacagggcaaagttttctgcgaatggcggatgtgggtacgtcctaaagccaggatgcatgtgccagggagtcttcaatccgaactcagaagatccccttcccggacagttaaaaaagcaactcgtgttaaggataatatccggtcagcagctccctaagccccgagattcgatgcttggggatagaggcgaaatcattgaccccttcgtggaagtcgaaatcatcggactgcccgtggattgctcaagagagcaaactagagtggtggacgataatggctttaacccaacctgggaagaaaccctggtctttatggtgcacatgcctgagatcgcgttagtcaggttccttgtgtgggaccacgatcccattggcagggattttatcggccaaagaaccttagctttcagttctatgatgcctggatatcggcacgtttacctcgagggtatggaggaggccagcatcttcgtacatgtggctgtcagcgatattagtgggaaagtcaagcaggccctgggtcttaaaggactgttcctgcggggaccgaaacctggcagtctggattcacatgcggccggacgcccccccgccaggccttccgtgagtcagcggatactgcggcggacagcctctgccccgaccaagtcacaaaaacctggacgtaggggttttccagaattggtccttggcacacgcgacaccggcagtaaaggcgttgccgacgatgtggtgccacctggacctggaccagcccccgaagccccagcccaggagggaccaggttcgggctcacctcgtgacacgcggcctttgagcacccaaaggccactcccacccctgtgttccttggagacgatcgcagaagagcccgctcctggccccgggccacccccccccgccgccgtccctacttctagctcacagggccgtccaccctaccccaccgggcccggtgctaacgttgccagtccgctggaggacacagaagaaccccgcgacagcagaccccgaccttgcaacggagagggtgctgggggggcctatgagcgggcccctggcagccagactgatggtagaagtcaaccacggacacttgggcacctgcctgtgatccgaagagttaagagtgagggccaggtccccactgagccacttgggggctggcgaccactcgccgctccatttcctgcaccagcagtttacagcgacgctaccggctccgatccactctggcagcgtctagaaccgtgcgggcacagggactcagtgagttcctctagcagcatgtcttcatctgatacagtgattgatctgtcactaccaagcctcggcctcggacggagcagagagaaccttgcaggggcccacatgggcaggttgcctccacgcccgcacagtgctagtgccgcacgtcctgatctgccaccagttacaaaaagcaagagcaaccccaatcttcgcgccaccggacagcgtccccctatccctgatgaactgcagcctcgtagtcttgcccctagaatggccggcctccctttccgtccaccgtggggatgtctatctctggtcggcgtccaagactgccctgtagcagcaaaaagcaagtcactcggagatttgacagcagatgattttgccccatcctttgaggggggctccaggcggctgtctcattctctgggactgcctggtgggacaagacgggtaagcggccccggcgtaagaagagataccctgacagagcagttgcgttggctaaccgtgtttcagcaggcaggagatatcacttcacccacgtccctcggccctgctggcgagggagtggctggtggccccggtttcgtcagaaggagctctagcaggagccattctcgggttcgggctattgcatcccgtgctagacaagctcaagaaagacagcagagattgcagggtttggggagacaggggccacccgaagaggagagaggaactccggagggggcatgttcggtgggacacgagggttctgtggacgcccctgcgccatcgaaaggggctctcggccctgcctctgcagccgccgaaaacctagtgctgctgcgactgtag

SEQ ID NO: 199529 - DNA, 3390 bp, synthetic construct
  misc_feature 1..3390: note = Description of Artificial Sequence: Synthetic coding sequence
  source 1..3390: mol_type = other DNA
atggaggagcccggcccccccggcggcctgagccaggaccaggtggaacgatgcatgggagcgatgcaagagggtatgcagatggtgaaactcagagggggcagtaagggactagtgcgcttttactatttggacgagcaccggagttgtatacgatggagaccctcccgcaagaacgaaaaggctaagatctcaattgactctattcaagaggtttccgaggggcggcagtccgaggtgttccagcggtacccagacgggagcttcgatcctaactgctgtttctctatctaccatggcagccaccgagagagtctggacctggtgtctacaagttcagaagtggcaagaacttgggtgacaggcttaagatatcttatggccgggatctctgatgaagacagccttgcgagacgacaaaggacacgggaccaatggctgaaacaaacatttgacgaggcggacaaaaacggcgacggttctttgagcataggtgaagtgctgcagctcctccacaagttgaacgtcaacctgcctagacagcgagttaagcagatgttcagggaggctgatacagacgatcaccaggggaccttgggctttgaagagttttgtgccttctataagatgatgtccacccggagagacttatatctactgatgctcacctattctaaccacaaggaccatttggacgctgcctccctgcagcgatttcttcaggtcgagcaaaaaatggcaggagttactctggaatcctgtcaggacataattgagcagtttgagccatgtcctgagaacaagtctaagggtctgctcggcatcgacgggtttaccaattatacaaggagtcccgccggggacatcttcaacccagagcaccaccatgtacaccaagatatgacgcagcctctgtcccattactttattaccagcagtcacaacacatacctcgttggcgaccagcttatgtcgcagtctagggtggatatgtacgcatgggtgctgcaggccggctgcagatgtgtggaggtggattgttgggatggcccagacggagagccaattgtgcatcatggatacacactgacatcaaaaattttattcaaagacgtgatcgagaccattaacaaatacgcctttattaagaatgaatatcctgtgattctgagcatagagaatcattgctcagtgatccagcaaaagaagatggctcagtacctcactgatatcttgggcgataaactcgacctatcttctgtatcaagcgaggatgcgacaactcttccaagcccccagatgttgaagggcaagatacttgtcaaaggcaagaagctgccagccaatatcagtgaggacgctgaggaaggtgaggttagcgatgaggatagcgcggatgaaattgacgatgactgtaagctgctgaacggcgacgcaagtaccaaccggaaaagagtcgaaaacaccgcgaagcgcaagctggactcgctgattaaggagagcaaaatccgtgactgtgaagaccccaataatttttccgtttctactttgtccccatcggggaagctcggccggaaaagtaaagccgaggaggacgtcgaaagtggagaagacgcaggggctagtaggaggaacgggagattggttgtcggttcctttagccgcaggaaaaagaagggctccaagcttaaaaaggcagcaagcgttgaagagggcgatgagggccaggactctccgggcgggcaatccagaggagctacgagacaaaagaaaacgatgaaactctccagggctctgtctgacctggttaaatacaccaaatccgtcgccacgcacgatatcgagatggaggccgcatcttcatggcaggtgtcttctttcagtgaaacaaaagcccaccagattctccagcagaagcctgctcaatacctccgcttcaaccagcagcagctctctagaatctacccctcaagttacagagtcgattcttcaaattataatcctcagccattctggaacgccggatgtcaaatggtcgccctgaattatcaatccgagggccggatgctgcagctgaaccgggctaaatttagcgctaatgggggctgtggttacgtgctgaaacccgggtgtatgtgccaaggcgttttcaatcccaactctgaagatcctctgcccggacaactcaagaagcaactcgttctgcgcatcataagcggtcagcaattacctaagccaagagactcaatgctaggcgaccgcggagagattatagacccctttgtcgaggtggaaataatcggcctgcccgtggactgctcccgtgaacagactcgggtggtggacgataacggattcaaccctacatgggaggagacccttgtgttcatggttcatatgcctgagatagccctggtaaggttcctggtctgggaccacgacccgattggtcgggatttcataggacagaggacactcgccttttctagtatgatgcctgggtatcgccatgtctacttggagggtatggaggaagctagtatatttgtgcatgttgcggtgagtgatatctctggcaaggtgaagcaggccctggggttgaaggggttattcctacgtggtccgaaacctggcagccttgatagccacgcggctggacgaccgcccgcacgcccaagcgttagtcaaagaatcctacgacggacagcctctgctcctaccaaatctcaaaaacccgggagacgaggatttcccgagctcgtactggggactcgggatacagggtccaaaggggtggccgacgacgtggtaccaccagggccaggaccagcaccagaggctcctgcgcaggagggccctggatccggctcgccccgtgggaaagctccagccgccgtggccgaaaaatctcccgtaagagtgaggcctcctagggtgttagacggccccgggcctgccggcatggccgctacctgtatgaagtgcgtcgttggctcatgcgctggggtcaacacagggggtttgcagcgagaacggcccccatcccccggacctgcttctcggcaggctgctatcagacagcagcctcgggctagggccgatagccttggcgctccctgctgcggactcgacccgcacgccattcctgggcgcagcagagaggcgcccaaaggcccaggagcatggcgtcagggtcccggcggatcaggtagtatgtcgtctgactctagcagcccagacagcccaggtattcctgaacggtctccacggtggccagagggagcatgccgccagcctggcgccctccagggcgaaatgtccgccttattcgctcagaagctcgaagaaattagaagcaaatcacctatgttttccgctgtgcggaactag

SEQ ID NO: 199530 - DNA, 1827 bp, synthetic construct
  misc_feature 1..1827: note = Description of Artificial Sequence: Synthetic coding sequence
  source 1..1827: mol_type = other DNA
atggagatgcggtggttcctgagcaagatccaggacgacttccgggggggaaagataaacctcgagaagacccagagactgctggagaaacttgacatccggtgctcctatatccacgtaaaacagatttttaaagacaacgataggcttaagcaaggaaggatcacaatcgaggaatttcgagctatatatcggataattacccatcgagaggagataatcgaaatattcaatacctactccgagaaccggaagatattattggcttccaatttagcgcagtttcttacccaagagcagtatgcagcagaaatgtccaaagcaatcgccttcgaaattatccagaagtacgaacccatagaggaagttagaaaagcgcaccagatgtccctggaggggtttacgaggtatatggactctcgggaatgcttactctttaagaacgaatgtaggaaggtgtatcaggacatgacccacccattgaatgactacttcatcagttcctcacataatacttatctagtgagcgaccaactccttggtccctctgacctgtggggatacgtgagcgccctggtcaaaggctgtaggtgtttggagattgactgctgggatggcgctcagaatgagcccgtcgtgtatcacggatacacactgacatcaaagctcttgtttaagacagtgatccaggcgatccacaaatacgcttttatgacttcggattatccagtggttctcagccttgaaaaccactgttcgacggcgcagcaggaggtgatggcagacaacctgcaggccacgttcggagaatctttgctctcagatatgctggatgatttcccagatacccttccatctcccgaagcgctgaaattcaagatcttagtgaagaacaagaagataggaactcttaaggagacccatgagcggaagggttcggataaacgcggagacaatcaggacaaagagactggggtgaagaaactgccgggcgtcatgctcttcaagaaaaagaagactagaaaactaaaaatcgccctagctctttcagacttggttatctatacaaaggcagagaaatttaagtcttttcaacacagcagactgtaccaacagttcaacgagaacaattccatcggcgagacacaagctagaaagctctccaagctccgagtgcatgagttcatttttcacactcgaaagttcattactcgcatatatcccaaggcaacacgtgcagatagcagcaactttaacccccaggaattctggaacattgggtgtcagatggtggccttgaactttcaaactccaggactgcctatggacttgcaaaatggaaaatttctcgacaacggagggagcggctatatcctaaagccgcactttcttagggaaagcaagtcttatttcaatcctagcaatatcaaagaaggcatgccaatcacattgacgatccgcttgatatcggggatccagctccccctgactcactcatcatccaacaagggcgactccttggtgattattgaagttttcggcgtgccgaacgatcagatgaaacagcaaacaagagtcataaagaagaatgcattctccccacgatggaatgagacttttacattcattatccatgtacccgagctagcactgatcagattcgttgtggaaggccaaggcctgatagcaggcaatgagttcctgggtcagtataccctccccctgctttgcatgaacaagggatatcgaaggatcccacttttcagcagaatgggggagtctctcgagcccgccagtctgtttgtgtatgtgtggtacgttagatag

SEQ ID NO: 199531 - DNA, 1242 bp, synthetic construct
  misc_feature 1..1242: note = Description of Artificial Sequence: Synthetic coding sequence
  source 1..1242: mol_type = other DNA
atgcggtggttcctgagcaagatccaggacgacttccggggcggcaaaataaacctcgaaaaaacacagcgtctcctggagaaattggatattcgatgcagttatattcatgtgaaacaaatctttaagaccagtgattaccccgtggttctgagcttggaaaatcactgctccaccgcgcagcaggaagtgatggccgacaacttgcaggcaacattcggagagagtctgctcagcgatatgctggacgattttcctgacacactgccgagtcctgaggctctgaaattcaaaattctggttaagaacaagaaaattggtaccttgaaagagacacacgagcggaaaggatctgacaaaagaggcgataatcaggataaggaaacgggggtgaaaaagctgcccggggtaatgcttttcaagaagaagaagactcgaaagttgaagatagcgctcgctctgagcgaccttgtgatttacacaaaagccgagaagttcaaaagcttccagcatagcaggttataccagcaattcaatgaaaacaactccataggcgagacccaggcgcgcaaactgtccaaactacgggtgcacgagttcatctttcacacccgaaagtttataacacgtatctatccgaaagccactagggcagattccagcaattttaatccccaagaattttggaatattgggtgccaaatggtggcgctgaacttccaaacgccaggattgccaatggacctgcaaaatggcaagtttcttgacaatggcggtagcggatacattctgaagcctcactttttgcgagagagcaagagctacttcaaccctagcaatataaaggagggcatgccaattacgcttaccattagactcatttcagggatccagctccctctgacccattcatccagcaacaaaggtgactccttggtgataatcgaggtcttcggcgttcctaatgaccagatgaaacaacaaactcgtgtcattaagaagaacgccttttctccaaggtggaatgagacctttacattcatcatccatgtgcctgaacttgcattaattaggtttgtggtagaaggacagggcctgatagcagggaatgagtttctcggccagtatacccttcctctgttatgtatgaacaaagggtaccgcaggatcccactgttctctagaatgggtgagtcactggagccagcctccctttttgtctacgtgtggtatgtccgatag

SEQ ID NO: 199532 - DNA, 1821 bp, synthetic construct
  misc_feature 1..1821: note = Description of Artificial Sequence: Synthetic coding sequence
  source 1..1821: mol_type = other DNA
atgcggtggttcctgagcaagatccaggacgacttccggggcggcaagattaacctcgaaaaaacccagcggcttctcgaaaaactcgacatcaggtgctcctacatccatgttaagcagatttttaaagataatgatcggctgaaacaggggagaatcacaatcgaggagtttagggcaatctacaggattattacgcaccgggaagagatcatcgagatctttaacacatactcagaaaatcgaaagatcctgctggcttcaaatttagcacaattcctcacacaagagcaatatgcagctgaaatgagtaaggcaatcgcattcgagattatccagaaatatgagccaattgaggaagtaagaaaggctcatcagatgagcctggagggcttcacccgctatatggattcaagagagtgtcttttatttaaaaacgagtgtcggaaggtgtaccaggacatgacccatccactgaatgactattttatctcttcatctcacaatacatacctggtgtctgatcaactgctgggcccctccgatctgtgggggtacgtcagtgcactggttaaaggctgccggtgtctggagattgactgctgggacggagctcaaaatgaaccagtggtgtatcacggctataccttaacatccaagctcctgtttaaaaccgtgattcaggccattcataaatatgcatttatgacgtccgattacccggtggtcctttccctggagaaccattgttcaacggcacagcaggaagtgatggccgataatcttcaggctaccttcggagagagtctcttgagtgacatgttggacgacttccctgacacactcccatctcccgaggctttaaagttcaaaattttagttaagaataagaagatcggcaccctgaaagagacccatgagcgtaaagggtccgacaagcggggtgataatcaggacaaggaaacaggtgtgaaaaaattacctggggtgatgctgttcaagaaaaaaaaaaccaggaagttaaaaatcgccttagctttgtctgatttggtgatctacacaaaggctgaaaagtttaagagctttcagcacagcaggttgtatcagcaatttaatgagaataattcaatcggggagacacaggccagaaagttgtctaaacttcgggttcatgagtttatctttcacacccgtaagtttataacgaggatctaccctaaggccacgagggccgattcgtccaatttcaacccccaagaattctggaatatcgggtgccagatggtcgctctgaacttccagaccccaggcctgcccatggatctccagaatgggaagttcctggataacggcggctctggatatatccttaagcctcatttcctgcgggagtcaaagagctacttcaatcctagtaacattaaggaagggatgcctattactctgactattagactcatctctgggatccaacttcctctgacacattctagcagcaataagggggacagtcttgtgattatagaggtcttcggcgtcccaaacgatcaaatgaagcagcagacccgcgtgatcaaaaagaatgccttctctccaagatggaacgagaccttcacatttatcatccatgttcccgaattggctctgattcggtttgtggtcgaaggccaaggcctgattgccgggaatgagtttctgggtcagtatactctccctcttctttgtatgaacaaaggataccgtaggataccattgtttagtcgcatgggggaaagccttgagccggccagtcttttcgtgtatgtttggtacgtcagatag

SEQ ID NO: 199533 - DNA, 1248 bp, synthetic construct
  misc_feature 1..1248: note = Description of Artificial Sequence: Synthetic coding sequence
  source 1..1248: mol_type = other DNA
atggagatgcggtggttcctgagcaagatccaggacgacttccggggtggaaaaataaatcttgagaagacacagcggctgctcgagaagctggatatcagatgctcatacatacatgtgaaacagatcttcaaaaccagcgattaccccgtagtgctgagccttgaaaaccattgtagcaccgcgcaacaggaggtgatggccgacaacctgcaagccaccttcggggagtccctgctgtcagatatgttagatgattttcccgacacactccctagtccagaagccctgaaattcaagatcctggtgaaaaacaaaaaaatcgggactctgaaggaaacccatgagcgcaagggaagtgataaaagaggggataatcaggacaaagaaactggcgtgaagaaactgccaggggtgatgttgttcaagaagaaaaagacccgcaagctgaagatcgcgctggccctcagtgatctcgtaatctacaccaaggccgaaaagtttaaatcttttcagcatagcagactgtaccagcaatttaacgagaataatagcatcggggaaacccaggctcggaaactttccaagctaagagtgcatgaattcatctttcacacccggaaattcataacccgcatttaccctaaagcaacaagagcagactcctccaacttcaatccccaagagttctggaacatcggttgtcagatggtagccctaaactttcagaccccagggttgccaatggacctgcaaaacggaaaattcctggataatggtggatcaggatatattctgaagccccactttctacgagagtctaaaagttacttcaatccatcgaacataaaagagggcatgccgattacattgaccatcaggctgatctccggcatccagctgccactgacacactctagttctaacaagggcgatagtctggtaattatcgaagtgttcggcgttcctaatgaccagatgaagcagcagacacgcgtgatcaagaaaaatgcattcagccccagatggaacgaaaccttcacgtttattattcacgtacctgaactcgccctcattcgttttgtggtggagggacagggacttatcgctggcaatgaattcctggggcaatatactttaccgctcctctgcatgaataaaggctatcgacgcataccgcttttttctagaatgggggagtctctggagcccgcctcacttttcgtatacgtatggtacgtgcgatag

SEQ ID NO: 199534 - DNA, 1212 bp, synthetic construct
  misc_feature 1..1212: note = Description of Artificial Sequence: Synthetic coding sequence
  source 1..1212: mol_type = other DNA
atggacagccgggagtgcctgctgttcaagaacgagtgccggaaggtgtaccaagacatgacacaccctctcaatgactatttcataagtagctcacataatacatatctcgtaagcgaccagcttctcgggcccagtgatttgtggggctacgtgagcgcactcgtgaagggttgtaggtgcctcgagattgactgttgggacggagctcagaatgagcctgtcgtgtaccatggttatacactcactagtaaactgctgttcaagaccgtgattcaggccattcataaatacgcctttatgacgagtgattacccagtggttctgtcacttgagaaccattgctccactgcccagcaggaggttatggccgataatcttcaagccaccttcggggagagccttcttagcgatatgctggacgacttcccagacactctacccagccctgaagctcttaaatttaagatcctggtgaagaacaaaaaaattgggaccctcaaggagacacatgaaagaaaagggagcgataaacggggcgacaatcaggacaaggagacaggcgtcaagaagctgccaggtgttatgctcttcaagaagaaaaaaactcggaaattgaaaattgccttggcactgtctgatttagtgatttacaccaaggccgagaagtttaagtccttccagcactcaagattgtatcaacaattcaacgagaataattctatcggggagacccaagctaggaaactcagtaagctgcgggtccacgaattcatattccatacacgcaaatttattacgcgcatataccccaaagccacgagagctgactcatcgaacttcaacccccaggagttctggaatattgggtgccagatggttgcactgaatttccagaccccaggcctacccatggatttgcagaatggcaagtttctcgacaacggcggaagcggctatatcctaaaaccccactttcttagggagagcaaatcttatttcaacccttccaatataaaggagggaatgcccattacactgacgatacgcctgatctccggtatccaattgccactcacccactcatcttccaataagggcgacagtctcgtgatcattgaggtgttcggcgttcctaatgatcagatgaaacagcagacacgggtgatcaaaaagaacggccagggaaatatggtcattatccctgcatag

SEQ ID NO: 199535 - DNA, 3387 bp, synthetic construct
  misc_feature 1..3387: note = Description of Artificial Sequence: Synthetic coding sequence
  source 1..3387: mol_type = other DNA
atggccgactgcgtgcggggctgggccgccgtgggcggcgccctgccaaccagtccagggccttctctgggagccaaaggggctctgaaggccggcgttggagaggacggagttggcggcggacgtctggtgcatgggcgagccaggtatgactctggcggcgtgagcaacggagattgtagcctaggcgtttccggtgacgaagcccgcgcgagcccaactagaggaccaagaggagtggccctagcacctacccccagtgccgtcgtttgtaccctacctcgagagagtaaacctggtgggcttccaagacgctcaagcatcatcaaggacggaaccaaacaaaagagagaaaggaagaagaccgttagcttctccagcatgccaacagaaaagaagatctcgagcgccagcgattgtattaacagcatggtggaggggtcagagctcaagaaagttagatccaatagtcggatctaccataggtacttcctgttggacgcagacatgcagtctctgaggtgggaaccatcaaagaaggactctgagaaagcgaagatagatatcaagagcattaaggaggtgcgaaccgggaagaacaccgatatttttagatccaacggcatctctgaccagatctccgaggattgtgcgttctcagtgatttatggcgagaactacgagtctttggacctggtagcaaacagcgccgatgtggccaatatttgggtgaccggactgaggtatcttatcagctatggcaaacacacactggacatgcttgaatcctcacaagacaatatgaggacaagttgggtgtctcagatgttcagtgagatagacgtcgacaatctgggccacatcactctttgtaatgccgtgcagtgcatccgcaaccttaacccaggattaaagacctcgaaaatagagctgaaatttaaagaactgcacaagtccaaagacaaggccgggactgaggtcacaaaggaagagttcattgaggtatttcacgaactttgcacccggcccgaaatctacttcctgcttgtccagttttcctcgaacaaagagtttctagatacaaaagacctcatgatgttcctcgaggcagagcagggggttgctcatattaatgaggaaatttcactggagattattcataagtacgagcctagcaaagagggccaagaaaagggatggctttctattgatggatttacaaactacctaatgtcacctgactgttatattttcgatcccgagcataaaaaggtgtgccaagacatgaaacagcccctttcgcactactttattaattcttcccataacacctatcttattgaggaccagttcagaggacctagcgatattacagggtacattcgggccctgaagatgggttgcaggagcgttgaactggatgtgtgggacggaccagacaatgagcccgtcatatatacgggacacacaatgacgtcccagatcgtatttcgatcggtgatcgatattatcaacaagtacgcctttttcgcaagcgaataccccctgattctgtgcctggagaaccactgcagcatcaagcaacagaaggtgatggtccaacatatgaaaaagctcttgggcgacaaactgtataccacctcccccaacgttgaagagagctatctgcccagcccagatgtactgaaagggaagattttgattaaggccaagaagctgagtagtaactgctcaggggtggagggcgacgtcaccgacgaggacgaaggagcggagatgagccaacgcatgggtaaagaaaatatggaacagcccaacaacgtgcccgtcaaacgtttccagctgtgcaaggaactaagtgagctggtcagcatttgtaagtctgtccagttcaaggagttccaggtgtctttccaggtgcagaaatattgggaagtatgctcctttaatgaagtgctcgcatctaagtatgctaacgagaaccctggagacttcgttaactacaataagaggttccttgcccgggtcttcccatccccgatgcgaattgattcttccaatatgaatcctcaggatttttggaaatgtggatgccagatcgtggccatgaacttccaaactcctgggttgatgatggacctgaacattggatggttcagacaaaacggtaactgtggatacgttctgcgacccgccatcatgagagaggaggtgtcgttcttctctgcgaacactaaggactcagtgcccggggtgagccctcaactgctacacatcaaaattatctccgggcagaacttcccaaaacctaagggatccggggccaagggcgacgtagtggatccttatgtgtacgtcgaaattcacgggatccctgctgattgcgccgagcagcgcactaaaactgtccaccaaaacggggatgcgccaatttttgatgagtcttttgagttccagatcaatttaccggagctcgcaatggtgagatttgtggtgttggatgatgactacatcggtgatgagtttatcgggcagtacactatcccttttgaatgcctgcagacaggctatcggcacgttccacttcaaagtctgaccggtgaggttttggcacacgccagcttattcgtgcacgttgccatcactaatcgaagggggggcggaaaaccacataaacgcggcttgagtgtccgaaaaggtaagaagtctcgagagtacgcaagcctcaggactctatggattaaaaccgtggacgaggtgttcaaaaacgctcagccccctattcgagacgcaaccgacctgcgtgaaaacatgcaaaatgcagtagtgagcttcaaggagctatgtggcctgtcctcagttgccaacctaatgcaatgtatgcttgctgtctcccccagatttcttggacccgacaacacaccactggttgtgctaaacctgtccgagcagtatccaactatggaactgcagggcatcgtgcctgaagtactgaaaaaaatagttacaacctacgacatgatgattcaaagcctcaaagctctcattgaaaatgcagatgctgtctacgagaagattgtgcattgtcagaaagctgcaatggagttccacgagcaccttcattctataggcaccaaagaaggtttaaaggagaggaaactgcagaaagctgtggaaagcttcacttggaatattaccatcttgaaggggcaagcagatctactaaaatatgctaagaacgagacgctggagaatctcaaacagattcacttcgcagctgtaagctgtggactgaacaagcccggcacagagaacgcggacgtgcagaagcctagacgcagtctagaagtgattcccgagaaagccaatgacgaaacaggtgaatag

SEQ ID NO: 199536 - DNA, 2883 bp, synthetic construct
  misc_feature 1..2883: note = Description of Artificial Sequence: Synthetic coding sequence
  source 1..2883: mol_type = other DNA
atgcccaccgagaagaagatcagcagcgccagcgactgcatcaacagtatggtggaggggtccgagctgaagaaagtacgatccaacagtaggatttaccaccgctacttcttactggacgcagatatgcaaagtctcagatgggaaccgagtaaaaaggatagtgaaaaggcaaagatcgacattaaaagcatcaaggaggtgcgaacgggaaagaatacagatatcttcaggtccaacggaattagtgaccagatcagtgaagattgcgcgtttagcgtgatttacggcgaaaattatgaaagcctagacttagttgcaaactcagccgacgtggccaatatatgggtaaccggcctgcgatatctgattagctacggcaagcatactctggatatgttggagtcatcacaggataacatgcggaccagctgggtgtcccagatgttctcagagatagacgtggacaacctgggtcacatcaccttgtgcaatgctgttcagtgcatccgtaacctgaatcctggtctaaaaaccagcaaaatcgagctaaagttcaaagagttgcacaaatctaaggataaggcaggcacagaagttacaaaggaagaatttatcgaggtctttcatgaactgtgcaccagacctgagatttactttctcctcgtgcagttttcatcaaataaagagtttcttgatactaaggatctgatgatgtttctcgaggcggagcagggtgtggcccacattaacgaagagatctccctcgaaataattcacaagtacgagccgtcgaaagagggacaagagaaaggctggctgtctatcgatgggttcaccaactatctgatgtccccggattgctatatttttgatcctgagcataagaaagtgtgccaggacatgaaacagccactgtcccattactttattaacagttcccataacacatacctcatagaagaccagtttaggggaccgtcagatattactggctacattagggccctgaagatgggctgccgttctgtcgagttggacgtgtgggatggccccgacaatgaacctgtaatttataccggacatactatgacctctcagattgtttttcggagtgttatcgatatcattaacaagtatgcattttttgcctccgagtacccactgattctgtgtctcgaaaaccactgctccattaaacagcagaaagtgatggtacagcacatgaaaaaacttctaggggataaactttacaccaccagccccaatgtggaggaatcttacctgccctcccctgatgtcctgaaaggaaaaattctgataaaagccaagaagctcagctctaattgttcgggcgtggagggtgatgtgaccgatgaggatgagggggccgaaatgagtcaacgaatgggcaaggagaatatggagcaacccaacaacgtaccagtgaagaggttccagttatgcaaggagctgtctgagctcgtcagcatttgtaagtctgttcaatttaaagaattccaggtgagcttccaggtacaaaagtactgggaggtgtgctccttcaatgaggtgcttgcctcaaagtatgccaatgagaatcctggggattttgtaaattacaataagaggtttctcgcaagagtgttcccgtctcccatgaggattgactctagcaacatgaatccacaagatttttggaagtgtggatgccagatcgtggctatgaatttccaaacccctggtcttatgatggatctgaacatcgggtggtttagacagaacggtaattgtggatatgtgctgcggcctgctataatgcgagaggaggtgagtttcttttccgccaataccaaggactcagtcccgggcgtaagtccccagcttttgcacatcaagatcatcagcggccaaaacttcccaaaacctaaaggatctggagctaaaggcgatgtggtggacccttatgtgtatgtagagattcatggcattcctgcagattgtgccgagcagcgcaccaagaccgtacaccagaacggcgatgccccaattttcgacgagtctttcgaattccagatcaaccttccggagttagccatggtgcggttcgtggtcttagatgacgactacatcggcgacgagttcatcggacagtacaccatcccatttgagtgtctgcagaccggttataggcatgtccctctccaatccctcaccggagaagtcctagctcatgcttccctctttgtgcatgtggccataaccaatcgcagaggaggcggcaaaccccacaagcgcgggctcagcgttcggaaaggcaagaagtcgcgggagtacgccagtctgagaacactctggatcaagacagtggatgaagtattcaagaatgcccagccaccgattcgggacgccactgatctccgggagaatatgcagaacgctgtcgtttcgttcaaggaactctgcggactgagcagcgttgctaaccttatgcagtgtatgctggccgtgtctccacgtttcctgggccctgataatacaccactggttgtgctgaatttgagcgaacagtatcctaccatggaattgcagggcatcgtgccagaggtgttaaagaagattgtgacaacctacgacatgatgatccagagcctgaaggcgttaattgagaacgctgacgccgtctacgaaaagattgtacactgccagaaggcagccatggaatttcacgaacacttgcactccatcgggacaaaggagggtctcaaagagcgaaaattacaaaaagccgttgaaagcttcacatggaacattactatcctcaaaatcaggaagaccggaaggaggtccattttcgtgccgcagacgccaatcatggtttag

SEQ ID NO: 199537 - DNA, 3006 bp, synthetic construct
  misc_feature 1..3006: note = Description of Artificial Sequence: Synthetic coding sequence
  source 1..3006: mol_type = other DNA
atgcccaccgagaagaagatcagcagcgccagcgactgcatcaactctatggtagagggatccgagttgaaaaaagttcgatccaacagccgtatctaccataggtacttcttactcgacgctgacatgcagtccctgagatgggagccttccaagaaagattctgagaaagctaaaatagacatcaagtcgataaaggaagttcggaccggcaagaacacagatattttccgatccaatggaatatctgaccagatctctgaggactgcgcgttttccgtgatctacggggaaaactatgaaagcctggacctagtagccaatagtgcagatgtggccaatatttgggtgactggacttcggtatttgataagctatggtaagcacacccttgacatgctcgaaagcagccaggacaatatgcggacatcctgggtgagccagatgttttccgagatcgacgtggataacctagggcatatcacgctctgtaatgccgttcagtgcatcagaaaccttaatccaggcctaaagacctccaagattgaactgaagttcaaagagctgcataaatccaaggacaaggcaggcactgaagtgactaaagaggaattcattgaggtctttcacgaactctgtactcgacccgaaatatatttcctcctcgtgcagtttagcagtaacaaggagttcctggacacaaaggacttgatgatgttccttgaggcagagcagggggtggcacatattaacgaggagattagccttgagataattcacaaatatgagccaagcaaggagggacaggagaaagggtggctctctatcgacgggttcaccaactacttgatgtctccagactgttacattttcgaccctgaacataagaaagtgtgccaggacatgaagcagccattatcacactacttcattaactctagccacaatacctatctgatcgaagaccagttccgtggaccaagcgacattacggggtacatccgcgctctgaagatgggctgtaggtctgtggagctggacgtgtgggatggccctgacaacgaacctgttatttacactgggcatactatgacttctcagattgtcttcagatccgtgattgacataattaataaatacgcgttttttgcaagtgaataccctttgatcttgtgtttggaaaaccactgttccattaagcaacagaaggtgatggtgcagcatatgaagaaactgctcggagacaaactgtacaccacttcgccaaacgtggaggagtcgtacctgcccagtcctgatgtgctgaagggcaagattcttatcaaggccaagaagctctctagcaattgctctggggtggaaggtgatgtgaccgacgaggacgagggagctgagatgagccagaggatggggaaggagaatatggaacagccaaacaacgtcccggtgaagcggttccagctgtgcaaagagcttagcgaattagtttcaatttgcaaaagcgtgcaattcaaagagttccaggtgagctttcaagtccaaaagtattgggaagtgtgctcattcaacgaagtactggcgtccaaatatgccaatgagaaccccggtgatttcgtcaattataacaagcggttcctagcccgggtctttccttccccaatgcggatcgactcttccaacatgaatcctcaggatttctggaaatgcggctgccagatcgtcgcaatgaacttccagacccctggattgatgatggatctgaacattggttggttcagacagaatggcaactgtggctacgtactgcgacccgccataatgcgcgaggaagtgtccttctttagtgctaatacaaaggacagtgttcccggagtttcccctcaactcttgcatattaagatcatctccggacagaatttcccaaagcctaaaggcagcggtgcgaaaggggacgtcgtcgatccatacgtttatgtcgagattcatggaattcccgccgattgtgctgaacaaaggacaaagacagtgcaccagaacggcgatgctccaatttttgatgagagcttcgaatttcagattaacctcccagagctggcaatggtccgctttgtggtgcttgacgatgattacatcggcgatgaattcatcgggcaatacactattccctttgaatgtctccagactggatatcgacacgtccccttgcaatcgttgaccggagaagttctggcccacgcatccctctttgtacacgtggcaattacaaatcgccggggcggaggcaaacctcataaaagaggcctgagtgtgaggaaaggcaagaagtctagagaatatgccagtctccgcaccctctggattaagacagtggatgaagtgtttaaaaacgcccagcctcctattagggatgcaactgatctgcgtgaaaatatgcagaatgccgtggttagctttaaggagctttgtggtctgagcagcgtcgcgaatctaatgcaatgcatgttagccgtttctcctcgctttctgggacccgacaatactccgcttgttgtcctgaatttgtctgagcagtatcccactatggaactgcagggaatcgtgcccgaggtgctgaaaaaaattgttacaacctatgatatgatgatccagagtttgaaagcactgatcgaaaatgccgatgccgtatatgagaaaattgttcattgccagaaagctgcaatggaatttcatgaacacctgcactccattggtactaaggagggactgaaagagaggaagttgcagaaggccgtggagagcttcacctggaacataaccattctgaagggccaagccgatttgctgaaatatgcaaagaacgagacgctcgaaaatctgaaacagattcacttcgccgcagtctcctgcgggctcaataagccaggaacggagaatgccgacgtacagaaacctcgccgctcgctggaagtgattcccgagaaagccaacgacgagacaggggagtag

SEQ ID NO: 199538 - DNA, 3006 bp, synthetic construct
  misc_feature 1..3006: note = Description of Artificial Sequence: Synthetic coding sequence
  source 1..3006: mol_type = other DNA
atgcccaccgagaagaagatcagcagcgccagcgactgcatcaactctatggtagaagggagcgaactcaagaaggtaagaagtaattccaggatttaccatagatatttcttactggatgcagatatgcagtccctgcggtgggagccatctaagaaggatagcgaaaaagctaaaatcgatattaagagtatcaaggaggttcgcacgggtaagaataccgacatattccggtccaatggaatctccgatcagataagtgaagactgtgctttcagtgtgatatatggggagaactatgaaagtctggatctcgttgccaacagtgccgacgtggcaaatatctgggtcacgggcctgaggtacctgataagttacggtaagcacaccctcgatatgcttgagagcagtcaggacaacatgcgcacttcgtgggtctcccagatgttctccgaaattgatgtcgacaatctcggacatatcacactgtgtaatgctgtgcaatgtatacgcaacttgaaccccggattaaagacctccaaaattgagctgaagttcaaagagcttcacaagagtaaggataaggcagggaccgaggtcactaaggaggagttcatcgaggtcttccatgagctgtgcaccagaccagaaatttactttctgttagtgcagttctccagtaataaggaatttctggacacaaaagatttgatgatgtttcttgaagctgaacaaggcgtggcacatatcaacgaggaaatttcgcttgagataatccacaaatatgagcctagcaaggagggtcaggagaagggctggctgtccattgacggattcacgaactatttgatgagtcctgattgctatatcttcgatcccgagcataaaaaggtctgccaggacatgaaacagcccctgagccactactttattaactcctcacacaacacttatctgatcgaagatcaattcaggggtccctctgacattactggttatatccgcgcactgaaaatggggtgcagaagcgtcgaactggatgtttgggatggccccgataatgaaccagtcatttataccggacatacaatgacctcccagattgtatttcgtagtgttatcgacataatcaataagtacgcttttttcgcaagtgagtatccactcattctctgtctggaaaaccattgttccattaaacaacagaaggtcatggtgcaacatatgaaaaagctcctgggtgacaaactgtatacaacctcccctaacgtcgaggagtcatacctgccctctcctgacgtgctaaaaggcaaaatcttgataaaggcaaaaaagctgtcttctaactgttcgggcgtggaaggcgacgtcactgatgaggacgagggcgcagagatgtcccaaaggatgggcaaggaaaacatggagcaacctaacaacgttccagtcaaaaggttccagctctgcaaagagctgtccgagcttgtgtcaatttgcaagtcagttcagttcaaggaattccaggtgtcatttcaagtccagaaatattgggaagtgtgcagcttcaacgaagtcctagcatccaagtacgctaatgaaaaccccggggatttcgtgaattacaacaaacggttcctagcccgtgtgtttccctcccccatgcgtatagattcctctaacatgaaccctcaagacttctggaaatgcggttgccagatcgtggccatgaacttccagacacctgggctgatgatggacttgaatattggttggttccgtcaaaacggcaattgcggctatgttctgagacccgccatcatgagagaggaggtgtctttcttttctgccaacactaaggactctgttcccggcgtgagcccacagctactgcacatcaaaatcattagtggtcaaaactttcctaagcctaaaggatctggtgctaagggtgatgtggtagacccatacgtgtatgtggaaatccatggaatcccggcagattgcgcagagcagaggacgaaaacagtgcaccagaatggcgatgcccctatttttgacgagtctttcgaattccagataaaccttcctgaactggcaatggttaggttcgtggtgttagacgacgactacattggggatgaattcattggtcagtataccatccccttcgagtgcctgcagacaggatacagacacgttcctctgcagagtcttaccggtgaagtgttggcacatgcctccctgttcgtgcacgtggccatcacaaatcgccgaggcgggggaaagccccacaaacgaggattgtccgtccggaaaggcaaaaagtccagggagtacgcttctcttcgcactctttggatcaagaccgtggacgaagtgttcaagaacgcacagccccctatccgtgatgccaccgacctgagagagaacatgcagaatgcagtcgtgagcttcaaggagctgtgcggtctgagtagtgtggctaatctcatgcagtgtatgctggccgtgtctccacgctttttgggaccagataatactcctttggtcgtcttgaacctttctgagcaatatcccaccatggaactccagggtattgtccctgaggtgctgaagaagatagttacaacttacgacatgatgatccagagcctgaaggctctcatcgagaacgcagacgccgtttacgagaagatcgttcactgccagaaagccgcaatggaatttcacgagcacctgcattctatcggcacaaaagaagggctaaaagagcgcaagcttcaaaaggccgtagagagctttacgtggaatatcacgattctgaaggggcaagccgacctcctgaagtatgctaaaaacgagacactggagaacctgaagcagatccactttgctgcagtgtcctgtgggttgaataagcctggcactgaaaatgcagacgtccagaagcctcggcggtcactcgaggtgattcccgagaaagccaatgatgagacaggggagtag

SEQ ID NO: 199539 - DNA, 2802 bp, synthetic construct
  misc_feature 1..2802: note = Description of Artificial Sequence: Synthetic coding sequence
  source 1..2802: mol_type = other DNA
atgaccgccacccccgagagcctgttccccaccggcgacgagctggattcctcccaattgcagatggaatcggacgaagtcgacaccctcaaagagggcgaggaccccgctgatagaatgcacccttttcttgcaatatatgagctgcagtcgcttaaggtgcacccactggtctttgcccccggtgttcctgtgaccgcacaagtggtcggcacagagcggtacacctccggcagcaaggtagggacatgtactctgtactctgtgcgcctgactcatggcgatttttcttggactacgaagaagaaatacagacacttccaagagctgcaccgagacctacttaggcacaaggtgctaatgtccctcctccccctcgcccgttttgccgtcgcatactctcctgcgcgcgacgccggaaatagggagatgcccagccttccacgtgccggacctgaagggtctacaagacacgctgccagcaagcaaaagtatctggagaattatctgaacagacttctgacaatgtcattctataggaactaccacgcaatgacagagttcttagaggtcagtcaactctcattcatacctgatctcggtaggaaaggtctcgagggcatgatcagaaagcgatcaggaggccacagagtgcctggcctcacatgttgtgggcgggaccaggtgtgttaccgctggagtaagaggtggctggtggtgaaggattctttcctcctatatatgtgcctggagaccggggccatcagttttgtacaactcttcgacccaggatttgaggtccaagtcgggaaaaggtcaactgaggcacggcacggcgtgcgcattgatacttcccacagatcgctgatccttaagtgcagttcttaccggcaggcccgatggtgggcccaagagattactgaattggcacaaggacccggtcgggattttcttcaacttcataggcatgacagttacgctccgcctcggccaggaactctggcccggtggttcgtgaatggggctggatactttgctgccgtggctgacgcaatcctgcgagcccaggaagagatattcatcacagactggtggctgtctccagaggtgtatttgaagcggcctgctcatagtgatgactggcggctcgacattatgctcaaaaggaaagcagaagagggagtgagggtgagcatactgctgtttaaggaggtggagttggctcttgggatcaacagcggatatagcaagagagctttaatgctgctccacccgaacatcaaagtgatgaggcatccagaccaggtgacattgtgggctcatcacgaaaagttgctagtggtcgaccaggtcgttgcattcctgggcggtctggaccttgcctatggcaggtgggatgacctccattaccgcctcaccgacctgggcgactcctcagaaagcgcagcctcgcagccaccaacacctaggcccgattcgcccgctacccctgatttaagccataatcagttcttctggctggggaaagattactcaaacttgatcaccaaagactgggtgcagctcgacaggccctttgaggacttcattgaccgtgagaccacaccaaggatgccttggcgcgatgtaggcgttgtggtgcacggcctgcctgcgagggacttggctagacactttatccaaaggtggaatttcacaaaaactaccaaggccaaatacaaaactcccacatacccctatctgctgcctaagtctacatcaaccgctaatcagctgcctttcacactgcccggtgggcagtgcacaacagttcaggtgttgcgatctgtggaccgctggagcgcaggtacgctagaaaactcaattctaaacgcttatctacatactatacgcgaaagtcagcacttcctgtacattgagaatcagttcttcattagctgttctgatgggagaacagtcctgaacaaagtgggcgacgagatcgtagataggatcctgaaggcccataaacaaggatggtgctatcgggtatacgtcctcttgcccttactaccaggattcgaaggcgatatctccacgggcgggggaaacagcatccaggccatcttgcactttacataccgcacgctgtgtcgcggtgaatattcaattttgcacagactgaaggccgccatgggcaccgcctggcgtgactacatctcaatatgcggacttcgcacccacggagagctcggaggccatcccgtgtccgagttaatttacatccactcaaaagtactcattgctgatgacagaactgtaatcatcggtagtgccaacattaatgatcgatccttactgggcaagcgtgatagcgaactggctgtgctgattgaggatacagaaaccgagcccagcctgatgaacggtgccgagtatcaggcaggacggtttgccctgtcactgaggaagcactgtttcggtgtaatactgggggccaatacgagaccggatctggacctcagggatcccatctgtgatgacttttttcaattgtggcaggacatggccgagtctaacgcaaacatctatgaacagatatttagatgccttccatccaacgctactcgatccttacgtactttgagggagtacgtcgccgtggaaccacttgcaaccgtcagtccccctctcgctagaagcgaattgacacaggtgcaaggtcatctggtgcatttcccgctcaaatttctagaggatgagtcgttactgccaccgctgggaagtaaagagggtatgataccactggaagtgtggacttag

SEQ ID NO: 199540 - DNA, 2769 bp, synthetic construct
  misc_feature 1..2769: note = Description of Artificial Sequence: Synthetic coding sequence
  source 1..2769: mol_type = other DNA
atgaccgccacccccgagagcctgttccccaccggcgacgagctggattcctctcagctgcaaatggagtctgacgaagtggataccctcaaagaaggggaagatcccgccgatcgcatgcacccgttcctcgcaatctatgagttgcagagcctgaaggtacatcccttagtattcgcgcccggcgtgccagtgacggctcaagtggttgggactgaacggtacacttctggctctaaggttggaacgtgtactctgtacagcgttcggcttacgcacggcgacttcagctggactaccaaaaagaagtaccgacattttcaggagctgcaccgggatctactgagacacaaggtgttaatgtcactcttgcctttggctaggttcgctgtcgcctatagcccagcacgggacgccgggaacagagagatgccctccctgccaagagctggaccagaaggcagtacgaggcacgctgccagcaaacaaaagtatctcgaaaattacctaaatcggctgctcacaatgtccttctatcgaaactaccacgctatgaccgaatttcttgaggtgagccagcttagcttcataccggacttgggtaggaagggcctggagggtatgattcggaagcggagtgggggacatcgcgtacccggcctaacctgttgtggcagggatcaggtctgctatcgctggtcaaagcgttggctggtggtgaaggattcatttttgctctacatgtgtcttgaaacaggagccatttcgtttgtgcagctgttcgatcccgggttcgaagtccaggtcggaaaacgatctactgaggctagacatggagtgcggattgatacttctcacaggagcctcatcctgaaatgctcttcctacagacaggcccggtggtgggctcaagagatcacggagctagctcagggcccgggaagggactttttgcagctgcatcgtcatgattcctatgcgcctccacgccccggtacactggctaggtggttcgtaaacggcgccggttattttgctgccgtcgctgatgccatactgagggctcaggaagagatttttattaccgactggtggctgagtcccgaggtatatctaaagcgaccagcccactcggatgattggcgcctggatattatgttaaagaggaaggcagaagaaggtgtgagggtgagcatactcttgtttaaagaagtggagctggccctgggtattaattcaggctattccaagcgggctctgatgctcttacaccctaatattaaagtgatgcgacaccctgaccaggtcactctttgggcgcaccatgaaaaattactcgttgtagaccaagttgttgctttcctgggaggtctggatctggcttacgggcgctgggatgatcttcactataggcttacagacctgggagattcttcggagtccgctgcgagccaacctcccacccctcgaccagattctccggctactccagatcttagtcacaatcagttcttttggctgggtaaagactacagcaatctgattacaaaagattgggtgcaactggacaggccttttgaagatttcatagacagggaaacaacccctcgcatgccatggcgcgatgtgggagttgtggtccacggactgccagctcgggacctagcccgccacttcattcagaggtggaacttcaccaagacaactaaggccaagtacaagactcccacgtatccatacctgctgcccaaaagcacgtccactgccaaccagctgccgtttaccttacctggcggccagtgtacaactgtccaggttctaaggtccgtcgatcgctggtccgccggcactctcgagaactctatcctcaacgcctacctgcatactatccgcgagagccagcactttctgtacattgaaaatcagttttttatctcatgctcagatggtaggaccgtgttgaacaaggtgggagacgagatcgtcgataggattctgaaagcccacaagcaggggtggtgctacagagtatatgtgctgctacctctgcttcccggatttgaaggcgatatcagtacgggggggggtaacagcattcaggctatcctccacttcacttacagaactctgtgtaggggagaatatagtattcttcacagactgaaggccgcaatgggtactgcatggcgcgactacattagcatctgtggtttacgaactcatggagagttgggaggacaccctgtcagcgaactgatctacattcacagcaaagtgttaatcgcagacgatcgaacagtcattataggcagcgccaacatcaacgatcggtccttgcttggcaaaagagattctgagttagcggtgttgatagaagacacagaaactgagcctagtctgatgaacggcgccgagtaccaggcggggtccgtcatccttggagccaacacacgccccgatctggacctccgggaccctatttgcgacgattttttccagctttggcaagatatggccgaaagtaacgccaatatttacgagcaaatcttccgctgtcttcctagtaacgccacccgatccctgaggaccctccgcgagtacgtagcagtcgagcccctcgccacagtgagccccccattagccaggtcggagcttacccaggtccaaggccaccttgtgcattttcctctgaagtttctggaggatgaatccctactgcctcccctgggtagcaaggaaggcatgatcccactcgaagtctggacatag

SEQ ID NO: 199541 - DNA, 957 bp, synthetic construct
  misc_feature 1..957: note = Description of Artificial Sequence: Synthetic coding sequence
  source 1..957: mol_type = other DNA
atggacaagcagaacagccagatgaacgccagccaccccgagaccaatctccctgttggctacccaccccaataccctccaaccgcgttccagggccctccgggatactccgggtatcccgggccccaggttagttatccccctcccccagccggccactctggtcctggccctgcaggattcccagttcccaaccagccagtatataaccagcccgtatataatcagcctgtcggagctgccggagtcccttggatgcccgcaccgcagccccctttgaattgtccccctgggctggagtacctctcgcagattgatcagatcttgattcaccaacagatcgaattgctcgaagtgctcacaggatttgaaactaacaacaaatatgaaatcaaaaattcttttggtcagcgggtctattttgcagcagaggatacggactgttgcacgagaaactgttgtgggcctagtcgcccctttaccttacggattatcgataatatgggacaagaagttatcactttagaaagacctcttcgctgctcttcctgctgttgtccatgttgtctccaggagatcgaaatccaggcgccccctggagtgcctatcggctatgttatccagacgtggcatccgtgtctgccaaaattcactatacagaacgagaagagggaagacgtgttaaaaatctccgggccatgtgtggtgtgttcctgctgtggcgacgtagatttcgagataaagagtctggacgaacaatgcgtcgtggggaaaatttcgaaacactggaccgggattctcagagaggcctttaccgacgcggataattttggaatacagttccctctggacctggatgtgaagatgaaagccgtgatgatcggggcctgcttcttgattgatttcatgttcttcgagtccaccggtagccaggaacaaaaatctggagtgtggtag

SEQ ID NO: 199542 - DNA, 93 bp, synthetic construct
  misc_feature 1..93: note = Description of Artificial Sequence: Synthetic coding sequence
  source 1..93: mol_type = other DNA
atgaaggccgtgatgatcggcgcctgcttcctgatcgacttcatgttctttgaaagtacaggatctcaagagcagaaaagcggcgtctggtag

SEQ ID NO: 199543 - DNA, 750 bp, synthetic construct
  misc_feature 1..750: note = Description of Artificial Sequence: Synthetic coding sequence
  source 1..750: mol_type = other DNA
atggacaagcagaacagccagatgaacgccagccaccccgagaccaatctgccggtgggctatcccccccagtacccacctactgcctttcaggggccacccgggtactcgggctaccctggcccccaggtcagctacccccctccgcccgctggccacagcggaccagggcctgccggctttccggtcccgaatcagccagtgtataaccagcccgtctacaaccagcctgtcggggctgccggcgtgccttggatgccagcacctcagccacccctgaactgcccacctggcttggagtacctctcacagattgaccagattctcatccatcaacagattgagctgctcgaggtgttaactgggttcgaaactaataacaaatacgagatcaagaactcatttggtcagcgggtctatttcgcagctgaagatacagattgttgtactagaaattgttgtgggccgtcaagaccttttacattgagaattatagataatatgggccaggaagttatcaccctggaacggcctcttcgatgcagcagctgttgctgtccttgttgtcttcaggagatcgagatccaagcaccacctggtgttcccattggatatgtcattcagacgtggcacccttgcttgcccaaatttaccatccagaatgagaagagagaggatgtgttgaagataagcggcccatgcgtggtctgctcttgttgcggcgacgtggatttcgagatcaagtcatag

SEQ ID NO: 199544 - DNA, 675 bp, synthetic construct
  misc_feature 1..675: note = Description of Artificial Sequence: Synthetic coding sequence
  source 1..675: mol_type = other DNA
atgcccgccccccccccccccctgaactgcccccccggcctggagtatctctcacagattgacatgatactcatccaccaacagatcgagctgttggaggttctgttttctttcgaatccagcaacatgtacgagatcaaaaactcctttggtcagcggatatactttgccgccgaggacacgaatttttgtatacgaaactgctgtggccgctcacggccgttcaccctgaggataacggacaatgtcggcagagaggtgattaccctggagaggcctctaaggtgtaactgttgctgttgcccgtgttgtctgcaggagattgagattcaggcacctccaggcgttcccgtggggtacgtcacccaaacgtggcacccctgtctcactaaatttactataaaaaaccaaaagagagaggatgtgctgaaaataagtgggccttgtatcgtctgctcctgtatagctggagtggacttcgagatcacgagcttggatgaacagatcgtggtgggacgtatttccaaacattggtccggtttcctgcgcgaggcttttacagatgctgacaatttcggcatacagtttccacgcgacttagatgtcaagatgaaggccgtaatgatcggggcatgtttcttgattgactacatgttcttcgaaagaactcgatag

SEQ ID NO: 199545 - DNA, 486 bp, synthetic construct
  misc_feature 1..486: note = Description of Artificial Sequence: Synthetic coding sequence
  source 1..486: mol_type = other DNA
atgcccgccccccccccccccctgaactgcccccccggcctggagtacctcagccagatcgacatgatcttgattcatcagcagattgagctgctggaggtgctgttttcatttgagtccagcaacatgtatgaaataaagaactcattcgggcagcggatatacttcgctgccgaagacactaacttctgcatccgaaattgctgcggccgttcccgccctttcacactaagaatcactgataatgtcggacgcgaggtgattacattggaacgcccccttcggtgcaactgttgttgttgcccttgctgcttacaggagatcgagattcaggcaccgcccggggtgcctgtgggatacgtgactcagacctggcacccgtgtctgacgaagtttaccattaagaaccagaaacgtgaggacgtgctgaaaattagtgggccatgcatcgtttgctcttgcatagcaggcgtggatttcgaatag

SEQ ID NO: 199546 - DNA, 894 bp, synthetic construct
  misc_feature 1..894: note = Description of Artificial Sequence: Synthetic coding sequence
  source 1..894: mol_type = other DNA
atgcggagctggaacagcctgttctgcctgaacagcagccggcccccagggcatatcgtgtaccctaaacaccaagccggacataccggtaagcaggccgatcatctgggctctcaagccttttaccccgggagacagcatgactatttggttcccccagccggcaccgctggcattccggtgcagaatcagcccggacgccctgagggcgtgccgtggatgcccgctcctccgcctccactaaattgcccgccaggacttgagtatctgtcgcaaatcgacatgatcttgatccaccagcaaattgagcttttagaggtactcttctcctttgaaagcagtaacatgtacgaaataaaaaactctttcggccagagaatttattttgccgctgaagacacaaatttttgcatacggaattgttgcggaaggagtcgccctttcaccctccgaattacagacaatgtgggccgggaggtgataacgctggaacggccattgaggtgcaattgctgttgctgcccctgctgtctgcaggaaattgagatccaggctcctcccggagtacccgttggctatgtgacccagacctggcacccctgtttgactaagttcactattaaaaaccagaagcgcgaggatgtcttgaagatttctggtccgtgcatagtatgcagctgtatcgccggagtggactttgaaatcacatccttagacgaacagatcgtcgtgggcagaatatcaaagcactggtccggctttttgagggaagcctttaccgacgccgataactttggtatccaatttccccgcgatctggatgtgaagatgaaggcagtgatgattggagcatgcttcctaattgattatatgtttttcgaaaggaccagatag

SEQ ID NO: 199547 - DNA, 951 bp, synthetic construct
  misc_feature 1..951: note = Description of Artificial Sequence: Synthetic coding sequence
  source 1..951: mol_type = other DNA
gtgagcgcccacctgcggttcttcctggccatcatcctgcgggactccgggctgtgggcagagtggcgaatgaaacctttccagatccacctcccggggccaccgggccatatcgtatatcccaagcaccaggccggtcatactggaaaacaggcagatcatttagggagccaggcattctaccccggacgtcagcatgattaccttgtcccacctgccgggactgcaggcatccccgttcagaatcagcctgggcgcccagagggcgtcccctggatgcccgcccctccgccgccattaaattgccctccagggttggaatatcttagccaaatcgacatgatcctgatccatcagcagattgagctcctggaggtcttgttcagctttgagtctagcaacatgtatgaaatcaagaactcatttggacaacgcatatatttcgctgcagaagataccaatttttgtattcgcaactgttgtggacggagcagaccctttacactccgcattacggacaatgtggggcgagaggtgattaccctcgaaagaccactccgatgcaactgctgctgttgcccatgctgtctgcaggaaattgagatccaagctccgccaggagttcctgttggctatgttacacagacctggcacccttgtctcactaagtttaccattaagaatcagaaaagggaggacgttctgaagatatccggcccttgcatagtctgtagttgcatcgcaggggttgattttgaaattaccagcctggatgagcagatcgtagtggggaggattagcaaacattggtctggttttttaagagaagcatttactgacgcggataatttcggaatccaattccccagggacttggacgtcaaaatgaaagctgtgatgatcggcgcatgcttcctgatcgactatatgtttttcgaacgtacccgatag

SEQ ID NO: 199548 - DNA, 888 bp, synthetic construct
  misc_feature 1..888: note = Description of Artificial Sequence: Synthetic coding sequence
  source 1..888: mol_type = other DNA
atggccggctacctgccccccaagggctacgcccccagcccccccccaccatacccagttactccagggtaccctgaacccgctctgcacccaggacccgggcaggccccagtgccagcccaagtgcctgctcccgcaccaggattcgctttgtttccctccccgggaccggtagccctgggttctgctgcaccgtttctacctcttccgggggttccatctgggctagagttcttagtgcaaattgatcagatactgatacaccagaaggctgaaagggtggagacgtttctaggctgggagacctgtaatcgctatgagctcagaagtggggctggtcagcctttggggcaggcagccgaggaatccaattgctgtgctagactctgttgtggcgccagaaggcccctgagagtccgtttggcagatccaggagaccgcgaagtgttgcgactgttgcggcctctacattgtggctgctcttgctgcccttgcggtttacaggaaatggaagtccaagcgcctcccggcaccaccataggacatgtcctccagacctggcaccccttcctacccaaatttagtatccaagacgcggaccgacaaaccgttcttagagtggtgggcccctgctggacatgtggctgcggaaccgataccaactttgaggtcaaaacccgggatgagagcagaagtgtcggcagaatctcaaagcagtggggcgggttggtgcgggaagccctaacagacgccgacgactttgggctgcagttcccacttgatttggatgtccgggtgaaggccgtgctgctgggagctacctttctcattgactacatgttttttgagaagaggggcggcgctggaccctctgccgtgacgagctag

SEQ ID NO: 199549 - DNA, 672 bp, synthetic construct
  misc_feature 1..672: note = Description of Artificial Sequence: Synthetic coding sequence
  source 1..672: mol_type = other DNA
atggccggctacctgccccccaagggctacgcccccagccccccccccccctatcccgttacaccggggtatccagaaccagcactgcatccaggccccggccaggccccggtgccagctcaggtccccgcacccgcaccgggatttgcactcttcccgtctcctggacccgtcgcactgggctcagcagctccgtttctgcctctccccggagtgccttccggcctcgaatttctggtccagatcgatcaaatcctgatccaccagaaagcggaaagggtggagaccttcctagggtggagacccgtcatcgggatgaattgtgccctcggccctgggagcccttgggttaggagaccccgtcgggcaacagctgcccctgtctgtgccgtggcacccgcaggtcgttgtgtgtcagcctggccaactcctggaactgtgagatgttgcgtctgcagcgctcggtgtactgtagccgcagcggcagcccccgttgcttcaaggcggtggaagtatcgcttacaccaggcaccccctctggctacctgctatcggccggggatccctagcagccctagcagcccttccaggatgcctattgcgcgccagtcctgtgagtggtggggccccgccggccccgtggctgtcgcccaaacacccaccctgcgatag

SEQ ID NO: 199550 - DNA, 888 bp, synthetic construct
  misc_feature 1..888: note = Description of Artificial Sequence: Synthetic coding sequence
  source 1..888: mol_type = other DNA
atggccggctacctgccccccaagggctacgcccccagccccccccccccttatccagtcactcctggctaccccgagccagctctgcatcccgggcccggccaggcgccggtgcccgcccaagtaccggctccggcgccaggtttcgccctgttcccgtccccgggtcccgtggctttgggatctgccgctcccttcctgcctttgcccggggtgccctcaggcctggagtttctggtgcagatagatcaaattctgatccatcagaaggccgagagggtcgagactttcctggggtgggagacttgtaatcgttatgaattgagaagtggagcaggccaaccattggggcaggcggcggaggagagtaattgctgtgcgcgactttgttgtggtgctaggaggccgttgagggtgcgactcgctgatccaggagatagagaggtgcttagactcctgcgtccgctccattgtggatgttcatgctgcccttgcggcctacaggaaatggaagtccaggcccctcccggcaccacaattgggcacgtcttacagacctggcatccgttcctacccaaattctctatccaagacgctgaccgccagactgtattgagggtggtcggcccatgttggacctgcggctgtggcactgatacaaattttgaggttaagacgagggacgaatcgagatcagtgggtagaatcagcaaacagtggggcggtctagtcagagaagccttgacggatgctgacgatttcgggctgcagtttcctctggacctggatgtgcgggtaaaagcagttctactgggcgctaccttcttgattgattacatgtttttcgaaaagagaggcggagcagggccaagcgcggtaacctcatag

SEQ ID NO: 199551 - DNA, 888 bp, synthetic construct
  misc_feature 1..888: note = Description of Artificial Sequence: Synthetic coding sequence
  source 1..888: mol_type = other DNA
atggccggctacctgccccccaagggctacgcccccagccccccccctccatatcccgtgaccccaggttaccctgagcccgccctgcaccctggtcctgggcaggctcctgtacctgcccaagtgccagcgccagcaccagggtttgcacttttccctagccccggcccagtcgccctgggatcagcagcccccttcctgccgctgcccggcgtgccctccggtttagaattccttgtccagattgaccagatcctcatccaccagaaggccgagagagttgaaactttcctgggatgggaaacctgcaataggtatgaactcagaagcggcgctgggcaacctttaggccaagcagccgaagagtccaactgctgcgcaagactttgttgtggagcgcgacgccccctcagggtacggctcgccgatcccggcgaccgggaagtgcttcggctcctcagaccccttcactgtggatgcagctgctgcccctgcggactgcaggagatggaggtgcaggctccaccaggcacgacgattggccatgtgctgcagacctggcacccgtttctccccaaattttccattcaggatgccgatagacagactgtgctgcgggtggtgggcccttgttggacatgtggatgcggcacagacacgaatttcgaggtgaagacaagggatgagtcacgaagcgtcggacgaatctcaaagcaatgggggggcctcgttagggaagctttgaccgatgcagatgattttgggttgcagtttccattggatttggacgtgcgggtgaaggccgtactactcggggctacattcctcatcgattacatgtttttcgaaaaaagaggcggagctggccccagcgccgtaactagttag

SEQ ID NO: 199552 - DNA, 990 bp, synthetic construct
  misc_feature 1..990: note = Description of Artificial Sequence: Synthetic coding sequence
  source 1..990: mol_type = other DNA
atgagcggcgtggtgcccaccgcccccgagcagcccgccggcgagatggagaaccagactaaaccgcccgaccctaggccagacgcacctcctgaatataattcccacttccttcccgggccccccggcacagccgtgcctccgcctaccggttatcccggcggtctcccaatgggatactactctccacagcaaccctctaccttccccctgtaccagcctgtcggtgggattcatcccgtgcgatatcagccaggaaaatacccaatgcccaaccagtccgtccccataacatggatgccgggtcccacacctatggcaaactgcccaccaggcttagaatatctagtgcagttagacaatatccacgttctccagcattttgaaccactggagatgatgacctgttttgagacaaacaaccgttacgacattaagaacaactccgatcagatggtctatatagtgaccgaggacaccgatgactttacccggaatgcctacaggactctccggccttttgtgctgagagtgactgactgcatgggtagagaaataatgactatgcagaggcctttcagatgtacctgttgctgtttctgctgcccttccgcccgacaagagctggaggttcagtgcccgcctggagtcactattgggttcgttgcagagcactggaatttatgcagggctgtgtactccatacagaacgagaagaaggagaatgtcatgcgcgtgcgaggcccatgctccacttacggttgtggcagcgatagcgtatttgaggttaagagtctggacggaatctcaaacatcggcagtatcatccggaagtggaatgggttattaagcgctatggccgatgccgatcactttgacatccactttccactggacctcgacgtgaagatgaaggccatgatttttggcgcctgttttcttatcgactttatgtactttgagcgtagtccacctcagcgaagcaggtag

SEQ ID NO: 199553 - DNA, 720 bp, synthetic construct
  misc_feature 1..720: note = Description of Artificial Sequence: Synthetic coding sequence
  source 1..720: mol_type = other DNA
atgagcggcgtggtgcccaccgcccccgagcagcccgccggcgagatggagaatcagactaaaccacctgatccccggcccgatgcgcctcctgaatataatagtcacttcctccccggccctcctgggacagccgtacctcctcctacaggataccctggtgggctgcctatgggctattactcccctcagcagccatcgacatttcctctttaccaacccgttggagggatccatccggttcggtaccagccaggcaaataccctatgcctaaccagtctgttccaatcacgtggatgcccgggccgacccctatggccaattgccccccgggtcttgaatatctcgtacagctggaagttcagtgccccccaggcgtcacaatagggtttgtcgccgagcactggaatctgtgccgggctgtttattcaattcagaatgagaagaaggaaaatgtgatgagggtcaggggcccctgcagcacctacggttgtggttctgacagtgtgtttgaagttaaaagtctggatggaatctctaacattggcagtattatccgcaagtggaacgggctgctctcggcaatggctgatgctgatcactttgacattcatttccccctagacctggatgtgaaaatgaaggccatgatattcggcgcctgctttctgatcgactttatgtactttgaacgaagcccacctcagcgctcccgatag

SEQ ID NO: 199554 - DNA, 990 bp, synthetic construct
  misc_feature 1..990: note = Description of Artificial Sequence: Synthetic coding sequence
  source 1..990: mol_type = other DNA
atgagcggcgtggtgcccaccgcccccgagcagcccgccggcgagatggagaatcaaactaagcctccagaccctagacctgatgccccacctgaatacaactcccattttctcccgggacccccggggaccgcagtgcccccccccactgggtatcccgggggcttaccaatggggtactatagcccacagcagcccagcaccttccccttatatcagcccgtggggggaattcatccggtccggtatcagcctgggaaatacccaatgccaaatcagagcgtcccaatcacgtggatgcccggccccacaccgatggccaattgcccacccgggctcgagtacctggtgcagttggataatatccatgttctacagcattttgaacctctggagatgatgacttgtttcgagacaaataaccgctacgatatcaaaaacaacagtgaccaaatggtttatatcgtgaccgaggatactgacgatttcacacgcaatgcttatagaactttgagacctttcgtcttgagggtgacagactgtatggggcgggagatcatgaccatgcaacggcccttccgctgtacctgctgttgtttttgctgtcctagcgcccggcaggagctggaggtgcagtgccctcctggggtgacgattgggttcgttgccgagcactggaatctgtgcagggcagtatactctattcagaacgagaaaaaggaaaacgtgatgcgcgtccggggcccttgttcaacatacggctgcggctcagactcagtgttcgaagtgaagtctctcgacggaatttcaaatatcggaagtattatccgcaaatggaacggtttattaagcgctatggccgacgctgaccacttcgacatccatttccccttggatctggacgtcaagatgaaggctatgatcttcggcgcatgtttcctgatcgacttcatgtacttcgaacgaagtccaccacaaaggagccggtag

SEQ ID NO: 199555 - DNA, 789 bp, synthetic construct
  misc_feature 1..789: note = Description of Artificial Sequence: Synthetic coding sequence
  source 1..789: mol_type = other DNA
atgagcggcgtggtgcccaccgcccccgagcagcccgccggcgagatggagaaccagacgaagccccctgatccacggcccgacgcaccacccgaatacaacagccacttcctgcccgggcctcctgggacggcagtgcccccacctacaggctacccaggaggactaccaatggggtactattccccccagcagccctctacctttcctctgtatcagcccgtgggcggcatacaccccgtgaggtatcagccaggtaaatatcccatgcccaatcagagcgttccaattacatggatgccagggcccaccccgatggccaactgcccccctggtctagagtatttggtgcaactggacaacatccacgtactgcagcatttcgaacctctggagatgatgacgtgtttcgagacgaacaaccgctacgatatcaaaaacaattccgaccagatggtgtacattgtcacggaggataccgacgattttacaagaaacgcctatcggaccctgagaccatttgtgctccgggttactgattgtatgggcagggagataatgaccatgcagcgcccatttcgatgcacttgttgctgcttctgttgcccctctgcacgtcaggagctggaggtgcaatgcccccccggcgtcactattggattcgttgccgaacactggaacctctgtcgcgctgtgtatagtatacagaacgagaaaaaagagaacgtaatgcgcgtgagaggcccttgctcaacttacgggtgcgggagcgacagtgtattcgaatag

SEQ ID NO: 199556 - DNA, 627 bp, synthetic construct
  misc_feature 1..627: note = Description of Artificial Sequence: Synthetic coding sequence
  source 1..627: mol_type = other DNA
atgagcggcgtggtgcccaccgcccccgagcagcccgccggcgagatggaaaatcagaccaagccgcctgatcccagacccgacgccccccccgagtacaactctcattttttgcctggaccgcccgggacggctgtgcccccccccactggataccccggtggtctgcctatggggtactattctccccagcagccgagcacttttcccctataccagcccgtagggggcatacatcccgttcgttaccagcctggcaagtaccccatgcctaaccaatctgttccaataacctggatgcctggaccgacaccaatggcaaactgcccccctggactggagtatctggtgcagctagataacatccacgtgctgcagcatttcgaaccactggagatgatgacatgcttcgaaactaacaacagatacgacattaaaaacaattctgatcagatggtgtatatcgtaacagaagacacagacgacttcacccgtaatgcttaccgcacactacggccatttgttctccgggtcaccgactgcatgggtagggagattatgacaatgcagcggccgtttcgctgcacctgctgctgtttttgctgcccatctgcaagacaggaatag

SEQ ID NO: 199557 - DNA, 429 bp, synthetic construct
  misc_feature 1..429: note = Description of Artificial Sequence: Synthetic coding sequence
  source 1..429: mol_type = other DNA
atgagcggcgtggtgcccaccgcccccgagcagcccgccggcgagatggaaaatcagaccaagccgccagacccacgaccagatgcaccacccgagtacaactcacacttcctgcctggtccacccgggacagccgtccccccacccactggttaccctggcgggctgccaatgggatattatagcccccaacaaccttctacatttcctctgtaccagccagttggcgggatccatcccgtgcgctaccagcccgggaaataccccatgcctaaccagtccgtgcccatcacatggatgccgggacctacacccatggccaattgtccacccgggttggagtatttggtgcaactggacaatattcatgtcctgcaacatttcgaacctcttgagatgatgacctgcttcgaaactaacaatcgttag

SEQ ID NO: 199558 - DNA, 990 bp, synthetic construct
  misc_feature 1..990: note = Description of Artificial Sequence: Synthetic coding sequence
  source 1..990: mol_type = other DNA
atgagcggcgtggtgcccaccgcccccgagcagcccgccggcgagatggaaaatcagaccaagccaccagaccccaggcctgacgcccccccagaatacaacagccactttctaccaggtccgcccgggacagcagtcccaccccccaccggctacccaggcggtctgcctatgggatattactctccacaacagccctctacattccccctgtatcagcccgtcggcggtatccaccccgttcgctaccagcccggtaaataccccatgccaaaccagagcgttcctatcacgtggatgcccggacctacccccatggcaaactgcccccctggactggaatacctggtccagctggacaacattcacgtcttgcaacattttgaaccactggagatgatgacatgctttgagacaaacaaccgatatgacatcaaaaacaatagtgatcaaatggtgtacattgtgaccgaagatactgacgatttcacaaggaacgcgtacagaactctgaggcccttcgttctgagagtgactgactgcatgggcagagagataatgacaatgcagcgtcccttccgttgtacatgctgctgcttttgttgcccctccgctcgtcaggagctggaggtccaatgtcctccaggtgtgacaattggattcgtcgcggagcattggaacctgtgccgtgccgtatatagtatacagaacgaaaagaaagaaaacgttatgagagttcgaggtccttgcagcacatatggctgcgggtcagacagcgttttcgaagtaaagagcctagacggcatcagcaatatcggtagcataatcagaaaatggaatggcctgctgagtgctatggccgatgcagaccatttcgatatccacttcccccttgacctggacgtcaaaatgaaggccatgatcttcggtgcgtgttttcttattgattttatgtatttcgagcgctctcctccacaacgttccaggtag

SEQ ID NO: 199559 - DNA, 297 bp, synthetic construct
  misc_feature 1..297: note = Description of Artificial Sequence: Synthetic coding sequence
  source 1..297: mol_type = other DNA
atgagcggcgtggtgcccaccgcccccgagcagcccgccggcgagatggagaatcaaacaaaacctccagatccacgcccagatgcgccgccagagtataactcgcacttcctcccgggaccgcccggaactgcagtgcctcctccgaccggatacccgggcggacttcccatggggtactactcaccgcagcagccaagcacgttccctctttaccaacctgtgggtgggatccatcccgtgcgataccagccaggtaagtacccaatgccaaaccagtctgtcccgatcacatag

SEQ ID NO: 199560 - DNA, 675 bp, synthetic construct
  misc_feature 1..675: note = Description of Artificial Sequence: Synthetic coding sequence
  source 1..675: mol_type = other DNA
atggagaaccagaccaagccccccgacccccggcccgacgccccccctgagtacaacagccattttcttcctggccctcccgggactgcggtgccccctcccaccggctaccctggaggtctgcccatgggatattattcgcctcagcaaccatctactttccctctgtaccaaccagtgggaggtatccaccccgttagataccagcccggaaaataccccatgcccaaccagtcagtcccgatcacttggatgccggggcctacccccatggctaactgtccacccggcctggaatacctcgtgcagctggaggttcaatgtccacccggcgtgacaatcggattcgtcgccgagcactggaatttgtgcagagctgtgtatagcatccaaaatgagaaaaaggagaatgttatgcgggtgcggggtccttgctctacgtacggttgtggctctgactctgtgttcgaggtaaaatcactggatggaatcagcaacatcggctccatcatcagaaaatggaacggcttgctgtcggccatggcagatgccgaccatttcgatatacacttccccctggacctggacgtcaagatgaaggctatgatcttcggtgcttgttttttgattgacttcatgtactttgaaaggagtcccccacagaggtcccggtag

SEQ ID NO: 199561 - DNA, 1326 bp, synthetic construct
  misc_feature 1..1326: note = Description of Artificial Sequence: Synthetic coding sequence
  source 1..1326: mol_type = other DNA
atggccctgttcggcgccctgttcctggccctgctggccggcgcccatgccgaattccccgggtgtaagatcagagtgacctccaaggcgctggagctggttaagcaggaaggcctaagatttctggagcaggagcttgaaacaatcacaatcccggatctgaggggaaaggaagggcatttctactacaacatttccgaagtgaaagtcacagagctgcagctcaccagcagcgagcttgactttcagcctcaacaggaactcatgctgcaaataactaatgccagtttgggcctccgttttcggagacagttactgtactggtttcttaaagtgtacgactttctctctactttcatcacgagcggcatgaggtttttgctgaatcagcaaatatgcccagtcctttatcacgctggtacagtgctgctgaatagtctgcttgacacagttcctgtccgatctagtgtggacgaactagtcggcatcgattattctctgatgaaggaccccgtggcctctacgtctaatctcgacatggattttcgtggcgccttcttccccttaacagaaaggaactggagcctgcctaaccgggccgtcgagcctcaactccaagaggaggagcggatggtatatgtcgccttcagtgagtttttcttcgactctgcgatggagagttacttccgtgctggcgcactacagctacttctggtcggagataaggtaccacacgatctggatatgctgctgagagctacttacttcggcagtattgtgttgctctccccagctgttattgatagcccactgaaactggaactgagagtccttgcacctccacgttgcacgattaagccgtccggtacaaccatcagtgtgactgctagtgtcacaatcgctttggtgccccctgaccagccagaagttcaactgtcttcaatgacgatggacgctaggttaagcgcaaaaatggcattgcggggcaaggctcttcggacacaactggatctgcggcgcttcaggatatattccaatcacagtgcactagagtcgttggcccttatccctctccaggccccactaaagaccatgctgcaaatcggagtaatgcccatgttaaacgaacgaacttggcgaggagttcagattccattacctgagggtattaacttcgttcacgaagtggtgactaatcatgccggttttctcacaattggtgccgatctgcatttcgccaagggtctgcgtgaagtgattgagaaaaacagaccagcagatgttagagcaagcactgccccgactccaagcactgccgccgtctag

SEQ ID NO: 199562 - DNA, 1482 bp, synthetic construct
  misc_feature 1..1482: note = Description of Artificial Sequence: Synthetic coding sequence
  source 1..1482: mol_type = other DNA
atggccctgttcggcgccctgttcctggccctgctggccggcgcccatgccgagtttccaggatgcaagattcgagttaccagcaaggctctcgagcttgttaaacaagaggggctcagattcttggagcaggaactcgaaaccatcaccatcccggatctgagagggaaggaaggtcacttctattataacatcagcgaggtgaaggtaacagagctacagctcacctcttccgaattggacttccaacctcaacaggaactcatgctccaaattacaaacgcaagtttaggacttcggtttaggcgtcagctattgtactggttcttttatgatggcggctacattaacgccagcgccgagggggtgagcatcaggactggactggagctgtctcgtgaccctgcggggaggatgaaagtgagcaacgtgtcgtgtcaggctagtgtgtcccgtatgcacgcggctttcggcgggaccttcaagaaggtgtacgactttctgtcaacatttattaccagtggaatgcggttcctgctgaaccaacaaatttgtcccgtcttgtaccatgccggcactgttctgctaaattcactgctggacacggtgcccgttcggtcgtctgtggacgagttagtggggattgattacagcctgatgaaagaccctgtagcttctacctctaatttggatatggacttccgaggcgccttcttccctctgacagaaagaaattggtccctgccgaatcgtgccgtcgagccacagctacaggaggaagaaaggatggtgtatgtggctttttccgaatttttcttcgacagcgctatggagtcctattttagggcgggagccctccaacttttgctcgtcggagataaagtcccacatgacctggatatgttactgagggccacctattttggtagtatcgttctcctgtcccctgccgtcatcgatagtccgctcaagctggaacttcgggtgctggcgcccccccgatgcacaattaaaccgagcggcacgacgatatcagtgacggcaagcgtgactattgccctcgtgcctcctgaccagcccgaggttcagctctcctctatgacaatggacgcacggttaagtgccaagatggccttgcgcggcaaggcccttcgcacccagttggaccttaggcgattcagaatctattcaaaccactctgccctggagagcttagccctaattcctctccaggcgcccctgaagactatgctgcaaattggagtgatgcctatgttaaacgagcgtacctggcgtggagttcagataccactacctgagggaattaatttcgttcacgaagtggtgacaaaccacgctggttttctcaccatcggtgctgatttacacttcgctaaggggcttagagaggttatcgaaaagaaccgacctgccgacgtgcgggcctcaacggcgcccaccccgtcaacagccgccgtgtag

SEQ ID NO: 199563 - DNA, 1482 bp, synthetic construct
  misc_feature 1..1482: note = Description of Artificial Sequence: Synthetic coding sequence
  source 1..1482: mol_type = other DNA
atggccctgttcggcgccctgttcctggccctgctggccggcgcccacgccgaattccccggctgtaaaattagagtcacctcaaaagctcttgaacttgtgaaacaggaaggtctgcgcttcctagaacaagaactggagaccataaccatcccagacttgagggggaaggagggacatttctactataacatctccgaagttaaagtgacagaattacagctgacctcttccgaattggatttccaaccacaacaggaactcatgttacaaatcaccaacgcttctctgggactgagatttcgaaggcagttgctctactggttcttttacgacggaggttacatcaacgctagtgccgaaggggtgagtattcgtactggactggagctctctcgggaccctgcagggcgcatgaaggtgtcaaatgtttcgtgccaggcatcagtcagccgcatgcatgctgctttcggtgggacattcaagaaggtgtatgatttcttgtccactttcataacctccggcatgaggtttctactcaatcagcaaatttgccccgtactgtaccacgccggaaccgttctcctgaattctctacttgacacagtgcctgtccgcagtagcgttgatgaactggtgggcatcgattactccctcatgaaggacccagtagcatctaccagcaatctggacatggatttcaggggcgctttctttccactgacggaacgaaattggtccttgcccaatagggctgttgaacctcagctgcaggaagaagagcgaatggtctacgttgctttcagtgaattcttcttcgattctgccatggagtcttatttcagagccggtgctctgcagctgcttctcgtgggagataaggtgcctcacgatctggacatgttactgcgcgcgacctactttggaagtatcgtgctgctgtcccccgccgtcattgactctccgctcaaactagagctcagggtcttagcccccccccgttgcactattaaaccctcgggtactactatctcagttaccgcgtccgttaccatcgcccttgtgccaccggatcagccagaagtccagctctccagtatgactatggacgcaagactatctgctaaaatggcccttaggggcaaggcgctccgcacgcaactggatttgcggcggtttagaatctatagcaatcattccgctctggagagcctggcactgataccactccaagctcccttgaaaaccatgcttcaaatcggcgtcatgcctatgctgaatgagcggacgtggaggggcgttcagattccccttcctgaagggataaactttgttcacgaggtggtgactaatcacgccggattccttactatcggagccgacttgcactttgccaaggggcttagggaagttatagagaaaaaccgccccgctgacgtgcgagcttctacagctccaacaccaagcacagctgccgtatag

SEQ ID NO: 199564 - DNA, 1542 bp, synthetic construct
  misc_feature 1..1542: note = Description of Artificial Sequence: Synthetic coding sequence
  source 1..1542: mol_type = other DNA
atgggcctgagcggcagcgacaacagctgcgaccccacccccccccctggtcccttggcgatggccctgtttggcgcgttgtttctggccctgttggccggcgcccatgctgaattccccggttgcaagatcagagtaactagtaaggcccttgaactcgtgaagcaggaaggactgaggtttctggaacaagaactggagaccatcacaattccagacctgaggggcaaggagggtcacttctattataacatatccgaggtcaaagtgactgagctgcaactgacatcttccgaactggactttcagcctcagcaagagctcatgctgcagataacgaacgcctcattgggtctacgcttcagacgccagctgctgtattggttcttttatgatggcggatacataaacgcttctgccgaaggcgtatctatccgtacagggttagagctttctcgggacccagcagggcgcatgaaagtatcaaatgtttcgtgtcaggcttcagtgtctcgtatgcacgcggcctttggaggcaccttcaagaaggtctacgattttctgtctacttttattacctccggcatgagattcctgctgaatcaacagatctgtccagtactatatcacgccggcactgtcctgcttaactctcttctggacacagtgcctgtacgctcatccgtcgatgagcttgtgggcattgattattctctgatgaaggatcccgttgcttcaaccagcaaccttgacatggattttcgaggagcattctttcccttgacagaaagaaattggtctctccctaatcgggccgtcgagccccagcttcaagaagaggaacggatggtctacgtggctttctctgagtttttttttgactctgcaatggagtcgtattttcgcgctggagccctgcagctgttgcttgtgggcgataaggtcccacacgaccttgacatgctgctccgggcgacttatttcgggtccattgtactgctgtctccagcggtgatcgactcacctctgaagttagaactacgcgtgctggctcccccaagatgcacaattaagccttcaggcactactatctctgtgactgccagcgtgaccatcgccctcgttccccccgaccagcctgaggtccagctatcaagtatgaccatggatgcaaggctgagtgcaaaaatggcgctgcggggaaaagctctgaggactcaactcgacctgcgccggttcaggatttattccaatcactccgccctggagtctctggctttaatacctctgcaggccccgctcaaaacgatgctgcaaattggggtcatgccaatgctcaatgagcgaacatggcgcggggtgcagatccctctgccagagggaataaacttcgtccacgaggtggttactaaccacgccggcttcctaactataggtgcagatctgcatttcgccaagggactgagagaggtgattgagaagaataggcccgcagacgtgcgcgcgtccacagcacctaccccttctactgccgcagtgtag

SEQ ID NO: 199565 - DNA, 1218 bp, synthetic construct
  misc_feature 1..1218: note = Description of Artificial Sequence: Synthetic coding sequence
  source 1..1218: mol_type = other DNA
atgctgcagatcaccaacgccagcctgggcctgcggttccggcggcagctgctgtactggtttttctacgacggcggctacatcaatgcaagcgccgagggcgtgagcattcggacggggctggaactttcaagggatcccgctggaaggatgaaagtgtctaatgtgagttgtcaagcttctgtgagtcggatgcacgccgcatttggcggcacctttaaaaaagtctacgatttcttaagcacgttcattacctctggcatgcgattccttctgaatcagcagatctgtcctgtgttgtatcatgccgggacagtgctactgaatagcttgctggatacagtgcctgtccgcagctcagtggacgaactggtgggtattgactacagcctcatgaaggatccagtggcttccacttccaacctggatatggactttcgcggtgcctttttccctttgaccgagagaaattggtccctccctaatcgcgcggttgagccgcagttacaagaggaggaaaggatggtttatgtagcgttctcagagttcttttttgatagtgccatggagtcgtatttcagggctggagccctccagctgctgctggtgggggataaggtgccccatgatctcgacatgctgctgagagccacatatttcgggagtattgtgctgctctctcccgcggtcatagacagccctctgaaactcgagttgcgagtgctggccccacctcgctgcactattaagccaagtggtacaaccatcagtgtgacagccagcgttaccattgccctggtgcctcctgaccaacccgaggtccaactcagcagtatgacaatggatgctcggctaagtgccaagatggccctccgtggaaaggccctcaggacacagctggatctgcgacggttccgcatctatagcaatcatagtgcgcttgagagcttggccctgattccgttgcaggcacccctgaagacaatgctgcagataggggttatgcctatgcttaacgagcgcacatggaggggcgtgcagatacccctgccagaaggtattaacttcgtccatgaagtggtgaccaatcacgctgggtttctgaccataggcgctgatcttcattttgctaagggcttacgcgaggtcattgaaaagaataggcccgctgacgtgagggcctcaactgctccaaccccaagcacagccgctgtctag

SEQ ID NO: 199566 - DNA, 1197 bp, synthetic construct
  misc_feature 1..1197: note = Description of Artificial Sequence: Synthetic coding sequence
  source 1..1197: mol_type = other DNA
atggccctgttcggcgccctgttcctggccctgctggccggcgcccacgcagaattcccaggttgtaaaattcgagtgacctctaaggctctggaactggtcaagcaggagggactcagattcttggagcaggaactcgagactatcacaatcccggacctacgtggcaaagagggccatttctattacaacattagcgagaaggtctatgacttcctctccacttttatcacaagcggtatgcggttccttctaaaccagcagatttgtccagtactgtaccacgccggcactgtgctgctcaattccctcttagataccgtgccagtgaggtcgtcagtcgacgagctggtggggattgattatagcctgatgaaagaccccgtcgcgtccacctctaaccttgatatggacttccggggagcctttttccccttgacagagcggaactggtccctaccgaatagggcggtcgaacctcagctgcaggaggaggagcgcatggtgtacgtagcattctctgaatttttctttgactccgccatggaatcttattttagggccggtgccctacagcttttgttggtcggggacaaggtgccccacgatctcgatatgcttctgcgggctacgtacttcggttccattgtgttactaagccctgctgtgattgactctccgctgaagcttgaactacgcgttttggctccgccccgttgtaccatcaaaccttcaggtacgacaattagtgttactgccagcgtcacgatcgcactggttcccccggatcagccggaagtccagctttcctctatgaccatggatgcgcgcctgtccgccaagatggctctcaggggcaaggcgttaagaacacagctggacctcaggcgcttcaggatttattccaaccattctgcccttgaatcattggccctgattcccctccaggcgcctctcaagacgatgctacaaatcggcgtaatgccaatgctgaacgaacggacatggcgcggggtgcagatccctctgccggaaggaataaatttcgtccacgaggtggtgacaaaccacgccggctttctcacgatcggtgcagacctacatttcgcaaagggtctgcgggaggtaattgagaagaataggcctgctgatgtcagagcgagtaccgctccaactccttctacggcagcagtgtag

SEQ ID NO: 199567 - DNA, 2343 bp, synthetic construct
  misc_feature 1..2343: note = Description of Artificial Sequence: Synthetic coding sequence
  source 1..2343: mol_type = other DNA
atggccccctacagcctgctggtgacccggctgcagaaggccctgggagttcgccagtatcacgtggcttcagtgctgtgtcagcgcgcaaaagtcgccatgtcacacttcgagccaaacgagtacattcactatgatctcctggaaaaaaatataaacatcgtgcggaagcggttgaatcgccccctgactctgagtgagaaaatcgtttacggacatttggatgatcccgcctcccaggaaatagagagagggaaaagctatctccgactgcgccctgatagagtggccatgcaggatgccacggctcaaatggcaatgttacagtttatttcgtcaggtctttctaaggttgccgtgccaagtaccatccattgtgatcacctgatcgaagcccaagtgggaggggagaaagacctcaggagggcgaaagacattaatcaagaagtttacaactttctcgcaacagctggcgctaaatatggtgtggggttttggaagcctggctcaggaatcatccaccagatcattctggagaactatgcgtaccctggcgtgctgcttattggaacggatagccacaccccgaacggtgggggcttaggcggaatttgcatcggtgtgggtggcgccgacgccgtggatgtaatggcaggcataccgtgggagctcaagtgccctaaggttattggagtaaaactcaccgggtcactgtctggttggtcatcaccaaaagacgtcatcctgaaggtggctggaatactgaccgttaaggggggaacaggggcaatagtagaataccatggtcccggggttgactccatttcctgtactggtatggctacaatatgcaacatgggagccgaaatcggtgcgacaacttctgtgtttccttataaccacagaatgaagaaatacctgagcaaaacaggacgcgaggatatcgccaatctcgccgatgagtttaaggaccacctggtgcccgaccctggctgtcactacgatcaactgatagaaatcaacctctccgaactgaaaccccatatcaatggtccatttactcccgacctggcccaccccgtggcagaggtcggcaaagtcgcagagaaagagggatggcccttggacatacgcgtggggctgatcggttcttgcaccaatagctcttacgaggacatgggaagatctgctgccgtcgcaaagcaggcactggctcatggccttaagtgtaaaagccaatttacaataacgcctggaagcgaacaaatcagagccacaattgaaagggatggctatgcccagatcctgagagatcttggcggcatcgtgcttgcaaacgcatgcgggccatgcataggccaatgggatcggaaagatattaaaaagggggaaaaaaacacgatagttactagctacaaccgcaatttcaccggacgcaacgatgctaacccagaaacccatgccttcgtcacctctcctgaaattgtgacggccctggcgattgccggcacactgaagtttaaccctgagacagactatctaacgggcacagacgggaagaagtttagactcgaggcccctgatgctgatgagctgcccaagggggagttcgaccctggccaagacacataccagcatcctcctaaggattcctctgggcaacacgtggatgtttcccctacttcacagagattgcaattgttggagccgttcgataagtgggatgggaaggatctggaagatctacagatactgatcaaagtgaaagggaagtgcacgactgaccatatatctgctgccggaccctggctgaaatttagggggcatctggataacatcagtaacaatttattgattggtgccataaacatcgaaaacgggaaagccaattctgtgagaaacgccgtaacgcaggagttcggccctgttcccgataccgctcggtactacaagaagcacggaattcgatgggtggtcattggggatgaaaactatggcgagggctcgtcccgcgaacacgccgcattggagcccaggcacctggggggaagagccataatcaccaagtcatttgcacgaatccacgagactaacctgaagaagcaaggactgttgccactgacatttgccgatccagctgactacaataaaattcaccctgtcgacaagctgaccatccagggtctcaaggattttaccccaggcaagcccctcaagtgcattattaaacaccccaacggtacccaagaaactatcctcctgaatcatactttcaatgagacacagattgagtggtttcgagcgggctcagctctcaacaggatgaaggaactacagcagtag

SEQ ID NO: 199568 - DNA, 741 bp, synthetic construct
  misc_feature 1..741: note = Description of Artificial Sequence: Synthetic coding sequence
  source 1..741: mol_type = other DNA
atggccgcccccggccccgccctgtgcctgttcgacgtggacggcactctcaccgccccacgccaaaaaatcactaaggagatggatgatttcctgcagaagctgaggcagaaaatcaaaattggcgtcgttggaggctccgatttcgagaaggtgcaagagcaattgggcaatgacgtggtagaaaagtatgactacgtgtttccagaaaacggcctggtagcatacaaagatgggaagctcctgtgcagacagaacattcagagccatcttggagaagccttaattcaggatctgattaattattgtttaagctacatcgccaaaattaagttaccaaaaaagcggggcaccttcatcgaattccgcaacgggatgctgaacgtgagccccattggccgtagctgttcacaagaggaacggatcgagttctatgaactggacaaaaaagaaaacatccgccagaaattcgtcgccgatctcagaaaggagttcgccggaaagggcctgacattttcaatcggtggccaaattagcttcgacgtgttccccgacggttgggataagagatactgcctgagacacgtggagaacgatgggtataagactatctacttcttcggggacaagaccatgccaggagggaatgatcacgagatttttactgaccctcgcacaatggggtatagtgtgaccgcacccgaagacacccgtcggatttgcgagttgttattctcctag

SEQ ID NO: 199569 - DNA, 366 bp, synthetic construct
  misc_feature 1..366: note = Description of Artificial Sequence: Synthetic coding sequence
  source 1..366: mol_type = other DNA
atgctgaacgtgagccccatcggccggagctgcagccaggaggagaggatcgagttctacgagctcgacaagaaggagaatatcaggcagaaatttgtggcggatctacggaaggaattcgccggcaagggactcacattcagcatcgggggacagatctcttttgatgtgtttcccgatggatgggataagcgctattgtctgaggcacgtcgaaaacgacgggtataagactatctatttttttggcgataaaactatgccaggcgggaacgaccatgagatcttcacagaccccagaactatgggatatagcgtgacagcaccagaagataccagaaggatatgcgaattgttgttctcatag

SEQ ID NO: 199570 - DNA, 492 bp, synthetic construct
  misc_feature 1..492: note = Description of Artificial Sequence: Synthetic coding sequence
  source 1..492: mol_type = other DNA
atgatgaacatccagagccacctgggcgaggccctgatccaggacttgatcaattattgtctgtcttatatcgccaagatcaagttaccaaaaaaaagggggaccttcatcgagttccgaaatggcatgctgaacgtatcacctattggacggagctgctcgcaggaggagagaatcgaattctacgagttagacaagaaggagaacatccggcagaagtttgtcgccgacttacggaaggagtttgcagggaaggggttgaccttcagcattggtggacagatttcctttgacgtgttccccgacggctgggataagcggtattgccttcgccatgttgaaaatgatgggtacaaaactatctatttctttggtgacaagacgatgcccgggggtaatgatcatgagatcttcactgatcctcgcacaatgggatattccgttaccgcaccagaagacacaaggaggatttgcgaacttttattctcatag

SEQ ID NO: 199571 - DNA, 579 bp, synthetic construct
  misc_feature 1..579: note = Description of Artificial Sequence: Synthetic coding sequence
  source 1..579: mol_type = other DNA
atggcccccctgggcggcgccccccggctggtgctgctgttcagcggaaaacgcaagagcggcaaggattttgtcacagaggcattgcagagtcggctcggtgcggatgtctgcgctgtgctgcggctgtctgggccacttaaggaacagtatgctcaagagcacggcctcaatttccagaggctgctcgacacttccacgtacaaggaggcttttcgaaaggacatgataagatggggagaagaaaagcgacaggcagaccccggcttcttttgccggaagatcgtcgaggggattagccagcccatttggctagtgtccgatactcgcagagtgagcgacatccagtggtttagggaagcatatggggcagtgacccagaccgtgcgcgtggttgctctcgagcagtctagacaacagcgaggctgggtttttacccctggggtggacgacgctgagagcgagtgtggccttgataacttcggggatttcgactgggtcatcgagaatcacggtgtggagcagcggctcgaagaacagctggaaaacctgattgagtttatcaggagccgcctttag

SEQ ID NO: 199572 - DNA, 615 bp, synthetic construct
  misc_feature 1..615: note = Description of Artificial Sequence: Synthetic coding sequence
  source 1..615: mol_type = other DNA
atggagcccaaggccagctgccccgccgccgcccccctgatggagcgtaaatttcatgtacttgttggcgtcactggatccgtggccgcgctgaagctgccattgttggtgtccaagctgctggatatccccggcctggaggtggcagtggttacgactgagcgggcgaagcacttttattcaccacaagacatccctgttaccttgtactcagacgccgacgaatgggagatttggaagtcgcgtagtgatcccgttctgcatatcgacctccggcggtgggcagatcttcttctcgtggcaccccttgacgccaacacccttggtaaagtcgcttcgggaatttgcgacaaccttctgacatgcgtaatgagagcatgggaccgttccaaaccgcttctgttttgccctgcaatgaatacagccatgtgggagcacccaattacagcgcagcaggtcgatcagctgaaggcattcggctatgtagagattccatgtgtagccaagaaacttgtctgtggtgacgaaggactaggcgcgatggcagaagtgggcacgatagtggacaaggtgaaggaggttctgttccagcactctggtttccaacagagctag

SEQ ID NO: 199573 - DNA, 171 bp, synthetic construct
  misc_feature 1..171: note = Description of Artificial Sequence: Synthetic coding sequence
  source 1..171: mol_type = other DNA
atggccgagatggaccccgtggccgagttcccccagccccccggcgcggccagatgggccgaagccctgttacgctgtttcacctggctgcgcttgtgccagatctcaatgttcttgtccctcaagtgcctgaacacccgtagctcccacctcggtgcgcactgccgatag

SEQ ID NO: 199574 - DNA, 642 bp, synthetic construct
  misc_feature 1..642: note = Description of Artificial Sequence: Synthetic coding sequence
  source 1..642: mol_type = other DNA
atggccgagatggaccccgtggccgagttcccccagccccccggcgccgcgcgatgggccgaggtaatggccagatttgccgccaggttgggagcacaaggcagaagggtggtcttggtcaccagcggaggtacaaaagtgccactggaagcacgccctgtgcgttttctggataacttttccagcggtcgccgcggtgccacaagcgcagaggcattcttggcagccgggtatggggtattgttcctttatagggctcgctccgcattcccctatgcccacaggtttcccccccagacatggctatccgcgctacggccttcgggccccgctctcagcggtcttctgagtctggaagccgaagagaacgccctaccaggctttgctgaggcgttacgaagctatcaggaagctgccgcggctggcacttttctcgccgttgagttcaccacgttggcggactacctccacttacttcaggctgccgcacaggcattaaatcctctcggaccatcggcaatgttttacctcgccgctgctgtatcagatttttacgtccccgtttctgagatgcccgaacataagatacaaagcagcgggggcccactccaggtcatgggtgcaagcctgccggaaatctag

SEQ ID NO: 199575 - DNA, 936 bp, synthetic construct
  misc_feature 1..936: note = Description of Artificial Sequence: Synthetic coding sequence
  source 1..936: mol_type = other DNA
atggccgagatggaccccgtggccgagttcccccagccccccggcgcagctagatgggccgaagtcatggcccggttcgcggctcgtttaggcgctcagggccgccgagtcgtcctcgtcactagcggcggcaccaaagtacctctcgaggccaggccagtacggtttctggataacttctcaagtggcagacgtggggccacgtcagccgaggctttccttgcagcaggttacggggtcctgtttctgtatcgggctaggagtgcatttccttacgcccacaggtttcctccgcaaacttggctctccgcgctgcgcccgtcagggcctgcccttagcggactgctgtccctcgaagcggaggagaacgcactgccaggcttcgccgaggcgctgaggtcatatcaggaggccgcagctgctgggacattcctggctgtggaatttacaaccctggcagattacttgcacctgttgcaggccgcagcacaagctctgaatcctcttggacctagtgccatgttctacctggccgccgcagtgagcgacttctacgttccagtttctgagatgccagaacataagatccaatcttctggggggcccctccagataactatgaaaatggtgccaaagctgttgagcccacttgtgaaagactgggccccgaaagcgtttattatatcctttaaactcgaaactgaccccgctatagtgatcaaccgcgcgcgtaaggcacttgagatctaccagcatcaggtagtggtggccaatatcttggagtcacgccagagcttcgtcttcattgtcactaaagatagtgaaactaaactgctcctcagcgaagaggaaattgagaagggcgtcgaaatagaagagaagattgtagataacctgcagtcccgccacactgctttcattggggaccgtaattag

SEQ ID NO: 199576 - DNA, 417 bp, synthetic construct
  misc_feature 1..417: note = Description of Artificial Sequence: Synthetic coding sequence
  source 1..417: mol_type = other DNA
atgttctacctggccgccgccgtgagcgacttctacgtgcccgtgtcagagatgcccgaacataagatccaatcgtctggagggcctttgcagatcaccatgaaaatggtgccaaaactcctgagcccactggtcaaagattgggcccctaaggcattcatcatatccttcaagctggaaacggatccagcaattgttataaaccgggcacggaaggctctagaaatctaccagcaccaggtcgtggtagcgaacatcctggagtcccggcagtcctttgtgttcattgtgacaaaggacagtgagaccaagcttctgctgtctgaagaggaaattgagaagggggtcgagatcgaggagaaaatcgtcgataatctgcagagcaggcacaccgcgtttatcggcgatcggaattag

SEQ ID NO: 199577 - DNA, 417 bp, synthetic construct
  misc_feature 1..417: note = Description of Artificial Sequence: Synthetic coding sequence
  source 1..417: mol_type = other DNA
atgttctacctggccgccgccgtgagcgacttctacgtgcccgtgagcgagatgcccgagcacaagattcaatcttccggtggcccactgcagataaccatgaaaatggtccctaagctgctgagtccactcgtcaaggattgggcgccaaaagcgtttatcatatccttcaaactggagaccgatcctgccatagtgatcaacagggccaggaaggccctcgagatctaccagcatcaggtagttgtcgccaacatccttgaatctcgccagagtttcgtgttcattgtgaccaaggattctgagaccaagctcctgctcagcgaggaagagatcgaaaagggggtcgaaatcgaagaaaagatagtggataacctacaaagtcggcacactgccttcataggtgacaggaactag

SEQ ID NO: 199578 - DNA, 393 bp, synthetic construct
  misc_feature 1..393: note = Description of Artificial Sequence: Synthetic coding sequence
  source 1..393: mol_type = other DNA
atggccgagtacggcaccctgctgcaggacctgaccaacaacatcacacttgaggatctggagcagctcaaatccgcctgcaaagaggacataccctccgagaagtctgaagagattactactggttcagcatggttctccttcttggagagccacaacaagctcgataaggataacctttcttatatagagcacatctttgaaatctcacgaaggccagacttgttaacaatggtggtggattatcggacgcgcgtgcttaaaatatccgaggaggacgagctggacactaagcttacacggataccatctgcgaaaaaatataaggacattatccggcaaccatctgaagaggagattattaagctggccccacccccaaagaaggcttag

SEQ ID NO: 199579 - DNA, 456 bp, synthetic construct
  misc_feature 1..456: note = Description of Artificial Sequence: Synthetic coding sequence
  source 1..456: mol_type = other DNA
atggaggacgagggcaacaagctgtgccaggcccccccctggcccggtcaaactagtccagtgatggcagaatacgggaccctgctgcaggacctgactaacaatatcaccctggaagacctggagcaactgaaatcagcatgtaaggaggatatcccgtcagagaagtccgaggagatcaccactgggagcgcctggttttctttcctcgaatcacataataaattggataaagataatctgtcctacatagaacatatcttcgagatctcacgccgcccagatttgcttaccatggtggttgactatagaacccgggtcctgaagatctctgaggaagatgagctggacacgaaactgacaagaattcccagtgctaagaaatacaaagatattatcaggcagcccagcgaggaggagatcatcaagctggcccctcctcctaagaaagcctag

SEQ ID NO: 199580 - DNA, 327 bp, synthetic construct
  misc_feature 1..327: note = Description of Artificial Sequence: Synthetic coding sequence
  source 1..327: mol_type = other DNA
atggccgagtacggcaccctgctgcaggacctgaccaacaacatcacactggaagatctggagcaacttaagtccgcctgtaaggaagacatcccctccgagaagaataatttaagttatatcgagcatatctttgaaatttccaggaggccggatttgcttactatggtggtcgactacaggaccagggtgctcaagatctctgaagaggacgaattagacacgaagctcaccagaatcccttcagcgaagaagtataaggatatcatccggcagccctccgaggaagaaatcatcaagttggcgccgccccctaagaaggcatag

SEQ ID NO: 199581 - DNA, 1554 bp, synthetic construct
  misc_feature 1..1554: note = Description of Artificial Sequence: Synthetic coding sequence
  source 1..1554: mol_type = other DNA
atggagctggaggagctgggcatccgggaggagtgcggcgtgttcggatgcatcgcctctggcgagtggccgactcagctggacgtcccacacgtcattactttagggttggtgggactccagcaccgaggtcaggaatcagcagggatcgtaacgagcgacggaagcagcgtgccaacctttaagtcacacaagggcatgggccttgtgaatcacgtgtttacagaggataatttaaagaagctgtacgtcagtaatctcggtatcggccacacccggtacgccactacaggaaagtgcgagctggagaattgtcagccgtttgtcgtggagacattgcacggtaagattgcagttgcacataacggggagctggtaaatgcggcccgtctgcggaagaagctcttacggcatggaatcggtttgtcgacctcctccgattctgaaatgatcactcagctgctggcgtacacccctccacaggagcaggatgacacacctgattgggtggcgcggattaagaacctgatgaaggaagcccccactgcatactccctgcttattatgcatcgtgacgtgatttatgccgtccgggacccttatggcaatcggcccctttgtattggccggcttatcccagttagtgatatcaatgataaggaaaagaaaacgtcggaaacagaggggtgggtggttagttccgagagctgctcattcctctctatcggcgctcgatactaccgagaggtcctgccaggcgaaatcgttgaaatcagcagacacaatgtgcaaactctagacatcatatcgcggagtgaggggaatcccgtcgccttctgtatattcgagtacgtttacttcgcccgccctgactcgatgtttgaggaccagatggtctacacggttaggtaccggtgcgggcaacagcttgccatcgaagctcccgtggatgccgaccttgtgagtacggttcctgaaagcgcgactccagccgcacttgcttacgccggcaaatgcgggttaccctatgtggaggtgctctgtaagaacagatacgttggaagaacctttattcaacccaatatgcgccttagacagctgggtgtggccaaaaaatttggggtactctccgacaacttcaaagggaagaggatcgtgctggtcgacgactcaatagttcgtggcaatacaattagccctatcattaagttgctgaaggagagcggcgcgaaagaggtgcacattagggttgcctccccccccatcaagtatccctgttttatgggaatcaatattccaacaaaggaagaacttattgctaataaacctgaattcgaccacttggcagagtacctcggtgccaattcagtggtctatttgtctgtggagggactggtgtcttccgtgcaggagggaataaaatttaaaaaacagaaggagaagaaacatgatatcatgatccaggaaaacggaaacggcctggaatgctttgagaaaagtggacactgtactgcctgtctaaccgggaaataccctgtggagcttgaatggtag

SEQ ID NO: 199582 - DNA, 657 bp, synthetic construct
  misc_feature 1..657: note = Description of Artificial Sequence: Synthetic coding sequence
  source 1..657: mol_type = other DNA
atggagctgctgatcatgatcaacgcctgcaagatcgccagcgccagccgggtgacagccgtcataccttgcttcccatacgcccgccaggacaagaaggacaaaggctttttcgatatcccagttgacaacctgtacgctgaacccgcagttctgaagtggatccgtgaaaacatttctgaatggcgcaactgcacgatagtgtctcccgatgcaggaggcgccaaacgggtgacatccattgccgataggctgaacgtggactttgccctgatccataaggagcgaaagaaagcgaatgaggtggatagaatggtcctcgtcggcgatgtgaaggatagggtagctatcctggttgacgacatggctgacacctgcggaaccatttgccacgccgcagataagctgctgagcgcaggcgcaaccagagtctacgccattctgactcatggtatattttcaggccctgcgattagccgcataaataatgcatgcttcgaggcagtcgtggtcacaaatactatccctcaggaagataagatgaaacattgttctaaaattcaggtgattgatattagtatgatactggccgaagcaataaggcgcacccacaatggggaatccgtcagttacctttttagtcatgttccgttgtag

SEQ ID NO: 199583 - DNA, 507 bp, synthetic construct
  misc_feature 1..507: note = Description of Artificial Sequence: Synthetic coding sequence
  source 1..507: mol_type = other DNA
atgcccaacatcaagatcttcagcggcagcagccaccaggacctgtcgcagaagatagctgaccgcttaggactcgaattgggaaaggtggtaacaaagaaattctcgaaccaagaaacctgcgtcgaaattggtgagtctgtgcggggggaggacgtctatatcgtgcaaagcgggtgtggggaaatcaatgacaacctaatggagctgctgatcatgattaatgcatgtaaaattgcatcagcctctagggtcaccgcggtgattccatgcttcccttacgccagacaggacaaaaaggataagagccgcgcccctataagcgccaagctggtcgccaacatgctctctgtggccggcgccgaccatatcatcaccatggacttgcacgcctcgcaaattcaggtgtctgtagaagccaagtactggtgtctgaaaggggggcgcaagggcttaatgatgcttaagactgctgagaaacctaagatcatgccaaaatacatttag

SEQ ID NO: 199584 - DNA, 756 bp, synthetic construct
  misc_feature 1..756: note = Description of Artificial Sequence: Synthetic coding sequence
  source 1..756: mol_type = other DNA
atggagctgctgatcatgatcaacgcctgcaagatcgccagcgcctcacgggtcaccgcagtcatcccatgcttcccgtatgctaggcaagataaaaaggacaaatccagggctcccatttcagccaaactcgtggctaatatgctgtccgtggcgggagccgaccacatcattaccatggatctgcatgcttcgcagattcagggattcttcgatatccccgtcgataatctctatgctgaaccagctgttctaaagtggattagagagaatataagtgagtggagaaattgtactattgtgagtcccgatgcaggaggggccaagagggttacttctattgcagacagactcaacgtggattttgccctgattcacaaagaaaggaagaaagcaaacgaagtagatcgcatggtgctggtgggggatgtcaaagaccgtgtggctatactcgtagacgacatggccgatacttgcgggacaatttgccatgcagccgacaagctgctgtccgcaggcgctacaagagtgtacgctatcctaacacatggaatcttcagcggcccagccatctcccgcattaacaatgcttgttttgaagccgtcgtcgtgactaataccattccacaagaggacaagatgaagcattgctctaaaattcaggtgatagatatctctatgatcctggccgaggctatacggaggactcataacggggaatccgtgtcttacctgttttcacatgtaccgctttag

SEQ ID NO: 199585 - DNA, 957 bp, synthetic construct
  misc_feature 1..957: note = Description of Artificial Sequence: Synthetic coding sequence
  source 1..957: mol_type = other DNA
atgcccaacatcaagatcttcagcggcagcagccaccaggacctgtcacagaaaatcgccgataggttaggcctggaactgggcaaggtcgttaccaaaaagttttcaaaccaagagacatgtgttgagattggggagtcagttcgcggagaagatgtgtatatagttcagtccgggtgcggggagattaatgacaacctgatggagctgttgattatgatcaacgcttgtaaaattgcttctgcaagcagagttactgctgtcatcccatgctttccttatgcacgccaggacaagaaggataagagcagggcacctatctccgcgaagctggttgcaaatatgctgagtgtggccggggccgaccatattattaccatggacctgcatgcatcccagatccaggggttcttcgacatccccgttgacaatctgtacgccgaacccgccgtgctgaaatggatccgcgagaacatctcagagtggagaaattgtacgatcgtgagcccagacgctggcggggctaaaagggttacgtcaatcgccgaccggcttaatgttgatttcgcacttatccataaggagcgaaaaaaagccaatgaggtagaccgcatggtactcgtgggtgatgtaaaagatcgagtggccattcttgtggacgacatggctgatacgtgcgggaccatatgccacgccgcagataagctcctgagcgcaggtgccacaagggtctatgcaattctcacccacggcatcttctctggcccggctatctcacgcattaacaacgcttgctttgaggccgtcgtggtgacaaacacgatccctcaagaggataaaatgaaacattgttccaagatccaggtaatagacatcagtatgatccttgcagaggccatcagaagaacccacaatggcgagtctgtgagctacctgttttctcacgtccctttatag

SEQ ID NO: 199586 - DNA, 957 bp, synthetic construct
  misc_feature 1..957: note = Description of Artificial Sequence: Synthetic coding sequence
  source 1..957: mol_type = other DNA
atgcccaacatcaagatcttcagcggcagcagccaccaggacctgtcccagaagattgccgacaggctcggtttggagctgggtaaagtcgttaccaagaaattttcaaaccaggagacatgcgtcgaaattggagaaagcgtgcggggagaggatgtatatatagtgcaatcaggatgcggggaaattaatgacaacctgatggaactgttaatcatgatcaatgcgtgcaagatcgcttccgctagccgagtgacggcagtgataccatgtttcccatacgcccgacaagacaagaaagataagagccgcgctccaatttccgcaaaactggtcgcaaatatgctgtcagtcgccggagcagaccatataattactatggatttacacgcgagccagatccaaggtttcttcgacattccagtcgataacctgtacgccgaacccgccgttctgaaatggatccgggagaacatctcagaatggagaaactgcaccatagtgtccccggatgctggcggggcgaaaagggtgacaagtatcgcagatcggctgaacgttgacttcgcactgattcacaaagagcgcaagaaggcaaacgaggtcgaccgcatggtgttggtcggagatgttaaagacagggttgccatccttgtggacgacatggctgacacgtgtgggacgatctgtcacgccgctgacaaactgctgagtgcaggggccacccgcgtgtatgcaatacttactcacggaatcttttcaggtcctgccattagtagaataaacaacgcctgctttgaagcagtggtggtgaccaatacaattccacaggaagataaaatgaaacattgtagcaagatacaggttattgacatttcgatgattctggctgaggctatccgcaggacacataatggtgagagcgtctcatacctgtttagccacgtaccgctgtag

SEQ ID NO: 199587 - DNA, 957 bp, synthetic construct
  misc_feature 1..957: note = Description of Artificial Sequence: Synthetic coding sequence
  source 1..957: mol_type = other DNA
acccccaacatcaagatcttcagcggcagcagccaccaggacctgagccagaaaatcgcagataggcttgggctcgagctagggaaggtcgtgacaaagaaatttagcaaccaagagacctgtgtggaaatcgacgaatccgtgcgcggtgaggacgtgtatatcgtgcagtccggctgtggcgagatcaatgacagtctgatggagctcctgatcatgatcaacgcctgtaagatcgcaagtgcctcgcgcgtaaccgccgttattccttgcttcccatacgccaggcaggataaaaaagataagagtcggtctcctatttccgctaagctagtcgccaacatgttatccattgctggtgccgatcatatcattaccatggatctacacgctagccagatacaagggttttttgacatccctgtggacaacctgtatgcagaacctacagtgttgaaatggatacgcgagaacatacctgagtggaaaaactgcataattgttagcccagacgcaggcggtgccaagcgtgttacttctatcgccgatcagctcaacgttgacttcgctctcatacataaggaaaggaaaaaggcgaatgaggtcgactgtattgtcctggtgggtgacgtgaacgatagggtggcaatcctggttgacgacatggccgacacctgcgttactatttgtctcgcagccgataagttgttaagcgccggcgccactagggtatatgctatcctcacgcacggcatcttctcgggacccgcaattagccgcattaacaccgcctgttttgaagccgtcgtggtgactaataccatcccccaggatgagaagatgaagcactgctccaagatacgcgttatcgacatcagcatgatccttgctgaagctattcgccggactcacaatggagagagcgtgagctatcttttctcccatgtgccactgtag

SEQ ID NO: 199588 - DNA, 957 bp, synthetic construct
  misc_feature 1..957: note = Description of Artificial Sequence: Synthetic coding sequence
  source 1..957: mol_type = other DNA
atgcccaacatcgtgctgttcagcggcagcagccaccaggacctgagtcaacgcgttgcggaccgtctgggtctggagctaggcaaggtggtgactaaaaagttctccaaccaggagacctctgtagaaattggggaatccgttagaggagaggacgtttacatcatccagtccggatgcggagagataaacgacaatttgatggaattgcttattatgattaacgcctgcaaaatcgctagtagcagccgcgtgacggcagtgatcccgtgttttccttatgcacggcaagataagaaagataaatcacgagccccaatctccgccaaattggtagccaacatgctatcggtggccggtgcggaccatattatcaccatggacttacacgcgtcacaaattcagggctttttcgatattccggtcgataatttgtacgccgaacccgcagtgctacagtggatccgggagaatattgccgaatggaaaaactgtatcatcgtgtcacctgacgcaggaggagctaagagggtcacttcaattgcggaccgcttgaatgtagagttcgccctgatccacaaggaacgcaaaaaagcaaacgaggtagataggatggtactggttggcgacgtaaaagaccgtgtggccatcctcgtcgacgacatggccgacacttgcggcaccatctgccacgccgcggataaactccttagcgctggtgcaacaaaggtgtacgccatcctgacgcatggaatcttttctggacctgcgatttcccgtatcaacaatgctgccttcgaagctgtcgtggtcacgaacactatccctcaggaagataagatgaagcactgtacgaaaatacaagttatcgacatctctatgatcttagccgaggctattcgtcgcacacataacggggagtccgtgtcgtatctgtttagtcatgtgcctttatag

SEQ ID NO: 199589 - DNA, 966 bp, synthetic construct
  misc_feature 1..966: note = Description of Artificial Sequence: Synthetic coding sequence
  source 1..966: mol_type = other DNA
atgcccaacatcgtgctgttcagcggcagcagccaccaggacctgagccagagggtcgcagacagacttggcctcgaactcggcaaggtcgtgacgaaaaagttttctaatcaggaaacttctgtagagatcggggagagcgttcggggcgaagacgtgtacataatacaatctggatgcggcgagataaacgataacctgatggaactactcatcatgattaacgcttgcaaaatcgcttcctcatctagagtgacagccgtgatcccctgttttccttacgcgagacaggacaaaaaggataaggtgggagaatcaagagcaccaataagcgcaaaactcgttgcgaatatgttgagcgtggccggggctgatcatataatcaccatggatctgcatgcttcacagatccaaggattctttgacatacccgtggataacctgtatgccgagccggctgtcctccagtggatccgcgaaaatatcgcagagtggaaaaactgtatcatcgtgagccctgatgcagggggtgcaaagagggtcaccagcattgccgataggctgaatgttgagttcgcactgatccataaggaacggaagaaggccaatgaggtggacagaatggtgttggttggagacgtgaaggacagggtggccatcttagtggacgacatggctgatacatgtggcaccatatgtcacgccgctgacaagctcctatctgcaggggccactaaggtttatgctatcctgactcacggcatctttagcggcccagccatctctaggatcaacaatgccgcatttgaagccgtggtcgtgaccaatacgattccgcaggaagacaaaatgaagcactgtaccaagattcaagtgatagatatctctatgattcttgccgaggctatcagacgaacccataacggcgaatctgtgtcgtatctgttctcccacgtacccctgtag

SEQ ID NO: 199590 - DNA, 849 bp, synthetic construct
  misc_feature 1..849: note = Description of Artificial Sequence: Synthetic coding sequence
  source 1..849: mol_type = other DNA
atggagctgctgatcatggcctacgccctgaagaccgcctgcgcccgaaatataattggagtaattccttattttccttattccaagcaaagtaagatgcgcaagcgggggtccatcgtgtgcaagcttcttgcctctatgctggctaaggctggtttaactcatattattaccatggaccttcaccagaaagaaattcaaggtttcttttccttcccggtagataatttgcgtgcctcaccattcctgctccagtatattcaggaggagatccctaactatagaaatgccgtcatcgtggccaagtcaccagatgccgcgaaaagggcacaatcatacgcagagcggctgcggctgggactagccgttattcatggcgaggcgcagtgcactgaactggatatggatgatggcaggcattctccacccatggtgaaaaacgctactgtgcatccggggctggagctgccgttgatgatggctaaggagaagccaccgattactgtagttggcgatgttggcgggcgcatcgccattatcgtggatgacattatcgacgacgtggagtcctttgtggctgctgcagagatactgaaggagcgcggggcctacaaaatatacgtcatggctacccacggtattctgtctgccgaggcccccaggctcattgaagaaagtagcgtcgatgaggtcgtcgtgactaacacggtgccccacgaggtgcaaaagctgcagtgccctaaaatcaaaacagtggacatctctctgatactgtccgaggctattaggcgcattcacaacggtgaatcgatggcctatctgtttagaaatattacagtggatgactag

SEQ ID NO: 199591 - DNA, 1158 bp, synthetic construct
  misc_feature 1..1158: note = Description of Artificial Sequence: Synthetic coding sequence
  source 1..1158: mol_type = other DNA
atgcccaagaagctgctgctgctgcccccccccagcgccagcagcgctttccgtgtgccacgggctcgtccagtcccaccacccgcgatgaatgctgctaggacagggtatcgagtcttctcagccaatagtactgccgcatgtacggaactggctaagaggattacagagcggctgggggccgaactggggaagtctgtcgtgtatcaagagaccaacggcgagacccgcgtcgagatcaaggaatctgtgcgaggacaagacattttcataatccagacaatcccacgcgatgtgaacactgcagtgatggagctgctgattatggcttatgctctgaagacagcctgtgccagaaatatcattggagtgatcccatactttccatactccaaacagtctaaaatgcggaaaaggggatcaatcgtgtgtaaattactggcctctatgctggccaaagcgggattgacacatatcataactatggatttacatcagaaagaaattcaaggttttttcagtttccctgtggacaacctcagagcatcgccgtttttgttacagtacatacaggaggaaatccccaactaccggaacgccgtaatcgttgcgaaaagtcctgacgcagccaagagagcccagtcatacgccgagcgcctccgactgggactggccgtgattcatggagaagcacaatgcactgagctggacatggatgatgggcgccattcccctcctatggttaagaatgctacagtccaccctgggctggaactacccctcatgatggcgaaggagaagcctccaatcacggttgttggagatgtgggagggcgtattgctattatagttgacgacatcattgacgatgtggaaagctttgtggcagctgccgagattctaaaggaacgcggagcttataaaatttacgtgatggccacccacggcatcttgagcgccgaggcaccccgtctgatagaagagtctagcgtggacgaagtagtcgtgactaatacagtgccccacgaagtgcagaaactgcaatgccccaagatcaaaacagtggatattagtctgattctatcggaagctattcggagaattcacaatggcgaaagcatggcatatttgtttaggaatatcactgtcgatgattag

SEQ ID NO: 199592 - DNA, 1110 bp, synthetic construct
  misc_feature 1..1110: note = Description of Artificial Sequence: Synthetic coding sequence
  source 1..1110: mol_type = other DNA
atgttctgcgtgaccccccccgagctggagaccaagatgaacatcaccaaaggcggattggtgctgttcagtgctaatagtaattcatcctgtatggaactgtccaaaaaaattgcggagcgtttaggggtcgagatggggaaagtgcaggtctaccaagagccaaaccgagaaacgcgtgtgcagatccaggaaagcgtgcggggtaaagatgtattcataatccaaaccgtctccaaagacgtaaatacgaccattatggaacttctgatcatggtctacgcatgcaaaactagctgcgctaaaagtattattggagtgatcccctacttcccctacagtaagcagtgcaaaatgcgcaaacgcggttccatcgttagcaagttgttagcgagcatgatgtgcaaggctggtttaacccaccttattacgatggacctgcatcaaaaggagattcagggcttttttaatatcccagttgacaatctcagggccagccccttcttgcttcagtatatccaggaagagattccggactatcgtaatgcggtaatcgtggccaagtctcctgcaagtgcgaagcgcgctcagtcctttgcagagcggctgagactggggatcgccgtgatccacggagaggctcaagacgccgaatcagatctggtcgacgggcggcactcccccccaatggtccgtagtgtagctgccattcacccttctttagagataccaatgctgattcccaaggagaaaccacctatcacggtggtgggagacgtcggaggtcgtattgcaatcatagtcgacgatatcattgatgacgtcgactcgttcttagcagcagccgaaacactcaaggagagaggtgcttacaagatcttcgtcatggcgactcatggtctgctgagctccgacgctcctagaagaatcgaggaaagcgccatcgatgaagtagtggtgaccaatacaattcctcacgaggtccaaaagctgcagtgccccaagatcaagactgtggatatctctatgattttgagcgaggcaatcagacgcatccataacggggagagtatgagttacctcttcagaaacatcggactggacgattag

SEQ ID NO: 199593 - DNA, 1110 bp, synthetic construct
  misc_feature 1..1110: note = Description of Artificial Sequence: Synthetic coding sequence
  source 1..1110: mol_type = other DNA
atgttctgcgtgaccccccccgagctggagaccaagatgaacatcacaaaaggtggcttggtactcttcagtgccaacagcaattcatcatgcatggagctctccaagaagatcgccgaacgccttggagtcgagatgggaaaggtgcaggtctatcaggagcccaatcgggagacgcgcgtgcaaatccaagagagcgtaaggggaaaggatgtctttatcatacaaaccgtgagcaaagatgtgaacacaaccatcatggagctgctgattatggtgtatgcatgcaagacctcatgtgccaaatcaatcatcggggttattccctatttcccatacagtaagcagtgcaagatgaggaagcgtggctcgatcgtgtctaagctcctggcctcgatgatgtgtaaggcaggattgacgcacttgataaccatggacctacatcaaaaagagattcaaggatttttcaatattccggtggataacctcagggcttccccattcttgctccagtatatccaagaagaaatccctgattatcggaatgctgtgatcgttgctaagtctcctgcttcggctaagcgcgcccagtcctttgccgagagactccgtctcggaatcgcagtcattcacggagaggctcaggacgccgagtccgacctagtagacggccgccattccccaccgatggtcagatcagttgccgctatccatcccagtctcgagatccccatgctgatccccaaagagaaaccccccattaccgttgtcggtgacgtcggtgggaggattgccattatagtagatgacatcattgatgatgttgattcattccttgcagccgcagaaactctgaaggagaggggggcctataaaatcttcgtcatggctacccacgggctactttcatcagacgccccccgccggatcgaggaaagtgcaattgacgaagtggtggtgaccaataccatcccacacgaggtgcaaaagctacaatgcccaaagatcaaaactgtggacatttcgatgatcctaagtgaagctatccgcagaattcataatggagagagtatgagttacctgtttagaaatatcggacttgacgattag

SEQ ID NO: 199594 - DNA, 807 bp, synthetic construct
  misc_feature 1..807: note = Description of Artificial Sequence: Synthetic coding sequence
  source 1..807: mol_type = other DNA
atgttctgcgtgaccccccccgagctggagaccaagatgaacatcacaaagggcggattagtgttgttctccgccaacagcaactcctcttgtatggaacttagcaaaaagatcgcagagcggctgggtgtcgagatgggcaaggtgcaggtttatcaggaacctaatcgggagacacgcgtgcaaattcaagaaagtgtgcgaggaaaagatgtattcattatccagaccgtgagcaaggacgtgaatactacaatcatggaactcctcattatggtgtatgcatgcaaaacttcttgcgccaagtcgattatcggtgtgataccctactttccatatagtaagcagtgcaaaatgcgcaaaaggggcagtatagtgtctaagctgctcgcctcaatgatgtgcaaggctggtctgacacatctgattactatggaccttcaccaaaaggagattcagggattctttaacattccagtggacaaccttcgggcctcaccattcctgctgcagtacatccaggaggaaattccggattacagaaatgccgtcattgtagctaagtcaccagctagcgccaaacgagcacaatcattcgccgaacgacttcgcctgggaattgccgtcatacacggtgaagcgcaagacgccgagtccgacctagtagacggcagacacagccctcctatggtgagatcagttgccgcaatccatcccagtctggaaattccaatgctcatacccaaagagaagcctccaattaccgtcgttggcgatgttggtggaagaatagcgattattgtgtag

SEQ ID NO: 199595 - DNA, 585 bp, synthetic construct
  misc_feature 1..585: note = Description of Artificial Sequence: Synthetic coding sequence
  source 1..585: mol_type = other DNA
atgttctgcgtgaccccccccgagctggagaccaagatgaacatcacaaaagggggattagttctgttttcagccaattctaattccagctgcatggagctttctaagaaaattgccgaaaggctgggggtggaaatgggcaaagtgcaggtgtatcaagaacctaaccgtgaaacccgcgtgcaaatccaggaatctgtacgggggaaagatgtgttcattattcagaccgtgagcaaggatgtcaacacaacgattatggaactgctgatcatggtgtacgcctgcaagaccagctgtgcgaagagtattatcggcgtgatcccttatttcccatacagtaaacaatgcaagatgagaaaaagaggtagcattgtaagcaaactgttggcttccatgatgtgtaaggccggcttaactcatctcataaccatggacctgcatcagaaggaaattcaagggttttttaatattcctgtggataaccttagagcgtcaccctttctgctccagtatatccaggaggagattcctgactacagaaacgccgttatcgtggccaagtcacctgccagtgcaaaatag

SEQ ID NO: 199596 - DNA, 990 bp, synthetic construct
  misc_feature 1..990: note = Description of Artificial Sequence: Synthetic coding sequence
  source 1..990: mol_type = other DNA
atgttctgcgtgaccccccccgagctggagaccaagatgaacatcaccaaaggcggtctcgtgctgttttctgctaattctaatagttcttgcatggagctgtctaaaaaaatcgccgaagacgtcaatactaccatcatggagctgctgataatggtctacgcatgcaaaacatcctgtgcaaagagcattatcggtgtgattccatactttccgtacagcaaacagtgtaagatgagaaagagggggagcattgtgtccaagctgttggctagtatgatgtgtaaagcaggtcttacccacctcatcaccatggatttgcaccagaaagaaatccaggggttcttcaacatccctgtggataatctgcgggcgagtcctttccttctccagtacatccaagaggaaatacctgactatcgtaatgccgtgatcgtggccaagtctcccgcgagcgcaaagcgggctcagagtttcgccgagcggctgaggttggggattgctgtcattcacggagaggctcaagacgctgaatccgatctcgtcgacgggagacattctcccccaatggtgagatcagtggctgctatccacccatcactggaaatccccatgctgatccccaaggagaagccgccaatcacagtagttggggacgtcggaggccggatcgccatcatcgttgatgatatcatagacgacgtcgacagcttccttgccgccgcggaaactctgaaagaacgcggcgcttataagatatttgtgatggctacccatgggttgctgagctcagacgctcctaggagaatcgaggaatccgcgatcgatgaagtggtcgtgaccaatactatcccccatgaagtgcagaaactccaatgccccaagatcaaaaccgtggacatctccatgatcctctccgaggcgatccggagaattcacaacggggaatctatgagctacctctttagaaacatcggcctggatgattag

SEQ ID NO: 199597 - DNA, 531 bp, synthetic construct
  misc_feature 1..531: note = Description of Artificial Sequence: Synthetic coding sequence
  source 1..531: mol_type = other DNA
atgttctgcgtgaccccccccgagctggagaccaagatgaacatcaccaaaggaggtctggtgctgttctccgctaactcaaactcctcgtgcatggagttgtctaagaagattgccgaaaggcttggcgtggaaatgggtaaggtccaggtatatcaggaaccgaatcgagagaccagagttcagattcaggaatctgtgaggggaaaagatgtcttcatcatacaaaccgtgagcaaggatgttaatacaacgattatggaactgctcataatggtgtatgcctgtaaaacaagttgtgcaaagtccatcattggtgttatcccctacttcccgtactccaagcaatgcaaaatgagaaaaaggggctccatcgtgtccaagttgctggcctccatgatgtgtaaggccgggttgacccatctgattactatggatctgcatcagaaggaaatccaaggcttttttaacattcccgttgacaaccttagggcaagtccattcctgctgcagtatatccaggaagagtag

SEQ ID NO: 199598 - DNA, 735 bp, synthetic construct
  misc_feature 1..735: note = Description of Artificial Sequence: Synthetic coding sequence
  source 1..735: mol_type = other DNA
atgttctgcgtgaccccccccgagctggagaccaagatgaacatcaccaaaggtggtcttgtgttgtttagtgcaaatagcaactcgtcctgtatggagttatctaagaagattgccgaacgactgggtgttgaaatgggaaaagtgcaggtgtaccaagaacccaacagagagacccgtgtgcaaattcaggaaagcgtgcggggcaaggacgtcttcattattcagacagtcagcaaggatgtgaatactacaataatggagctgctcatcatggtgtatgcgtgcaagacgtcttgtgccaagagcatcataggcgttattccttacttcccgtactccaaacagtgtaagatgagaaaacggggatctattgtttcgaagttactggcgtcaatgatgtgcaaggctggtctgacacacctaatcacaatggacttacaccagaaggagatccagggcttctttaatataccagtagataacttgagagcctcaccttttctgcttcagtacattcaggaagagatccccgactataggaacgcagtgattgtggctaagagtcccgcgtctgccaaacgcgcacaatcctttgctgagcgactacgtctgggcatagcggtgattcatggcgaggcccaggatgctgaaagcgatttggtagatgggaggcactccccgccaatggtaagaagcgtcgctgcaatccatccgtccctcgagattccctag

SEQ ID NO: 199599 - DNA, 135 bp, synthetic construct
  misc_feature 1..135: note = Description of Artificial Sequence: Synthetic coding sequence
  source 1..135: mol_type = other DNA
atgttctgcgtgaccccccccgagctggagaccaagatgaacatcactaagggggggctcgtactcttcagcgccaatagcaacagcagctgcatggagctttccaagaagatcgcagagcggctgggcgtatag
